United States Patent Application Publication US 2007/0048818 A1 - sequence listing, part 2

SEQ ID NO: 1609 - DNA, 1440 bp, Homo sapiens
ctacgtgccgtttagatgctgggccatatcactgagtgactatagttgattctcaaaacatccatgtgccaaatgattaatgaagtattaatatttatcaaatctactgatttatcaataacttgatttaaggaatatgcatctggaatatatcatatatgaatatgtacttttttactcagcagtaacttactattctttttctatttactgctccttcctactgggtctctctctcttgctctcgctctctctcgctctctgtctctctcttcttgaggtattttccctcctctttctattcaaagctttattttcagtctttgctttcttacagtgttgagttgtttctctgtattcctgtgtgcagattttgttatttttatataatttattcctttattctttgaagctgatctacccctgtctggctcccttttattgtgactagactctgggcagctttttattgacacagaaaccatttttttttccacacacccactcccactccatatcattcgtaccttttgaaggaggaatacacgtctgaaatagtacttctcacacagcacagcctggttcttgtcttgagccaagtctgtaacttggcttaagcagtttcctcattagataaaccctggctcttaaatgaaaaacaagcaacttcattcaatccccaaaacagcctgccgcagcacgaagagcagccacaccccagtggtgccagctttcttctcttttttttccatgtctgccctcttactagcttgcaccagttctgctgctgcatgatgttgtctgtggagtgatttttttaaaaagtatcagctgcttctttccatcctccttcatcatgtatttcctttaggagactttgttcctctaatccgttccaaaaagtaaaactattccaggctcattgcctcagggggagagtcaggccggtggaaaacaaggagggaatggaggaaatggtctcctcttaacacgttccattccagaagtccaggccctttcaggaaagccacgcgttactggcatgcatgaaacatttgggcgacaacctaaattagagcagtgcatcctcctgccatatccccttccccagctgaggagaggaggcagtttctgaagaacaaggaaggagagcatagattttcctaggctttgaggaagaagacctgcatcctgtttggctggactaattgtagggaggcttgtgggatctaaggagagaaggaatggctgtctcccttgctgagaagggtcacagggaggcagccagaacccagtgggcagcaacgacttcatagtgtggctgaacagcgagggctccagacagctcttccagaggccttggtgtccccaaggccctgatacagtagagagagccactgaaccaagggggcccatgcagacaggcacatagggagcccc

SEQ ID NO: 1610 - DNA, 961 bp, Homo sapiens
  SITE (549): n equals a,t,g, or c
gtcaatggctgtccatgtcgcccgtgcttcacctgaggaggctggcgaggtgtatcctctttcacctgcctcagttttcctcatctgtgaaacggcctcatggctttggagcaaacagaatgacagataaaagggacaaatgacacagggctctccatttgtttaacgagtacttattgagaacctactgtgtgcagggcaccaagccaggctgtggagaaaacagaagcgggtgacaggatgggagaggttccagaagccgctaggaggagaaggcagttaagctgtgacctggggcaggtggatgggcctccctgggaagatctgggtgtgggaagcgcctgccaggcagggggcacctcaagtgcaaaggccctgargtgtggacaggcgagacaagaccaggacaagccccgctgttkccgttgtctggaaaccaaggtacaaagagaggaggggacggagccaaggccacgcagctggcagagktggagctgggatgttaggggaggaacagaggtcacgacctctgcaagcttcatcccccanccctcacccctcacccccagccagaatcttccagaggggtggcctccccttcctgagccaccccagctgttgcggaggctgctgctgtcctggttcccttgtttaattacaaacaacatttttcgccctcacttaattatgcaacagacgcccgtggatctgccaccatctggccccactttctggcttgagacgacgagtcgcagtgacttcgagggctgagaggggagcaagcgggaggcacctcggccaggagggcaccgagcttggcatggcctcagctctgtgatgtacctggccacatctctgagtcctcatctgcagaattgggacaattgagggtggcgcaagggtctgtgagacaagagctgcttggcaaagaggagccctcagccctaaagggggcctcgag

SEQ ID NO: 1611 - DNA, 1174 bp, Homo sapiens
cgagaaggattgttttttgttgacttagcaaaaacttctccttacaaaacctcttgagtgtgctgaattgtgaacaggaaattgacttggggtaaggggagagagggaaccagggcactcttaaagagaaaaagacccctgggtcgataaccaagtggtcctgggactggatctggctattacatgcacatcaacaatcttatgtacttgctgattaacaaattatatatattctgcatgtttacacaaacagttcttgtgctagagagtccacatcatttaaactttgtgggagaattttgcaaatgatccaatcctagaggcttgtactctttcttgagccccactcacctttcctttgtacctcaaacctcagtctgactcttccagaaatataggggatggttcccttctcttctcccattccctacataaccctgagtttaaatacaaacactcagtttaattgtttcataaggcttatttttggataaagatatttcattttccctgcacattaaacttttatcacacttactgataaaatgccacagctcttgtattatcaactacaagttcagtcttctactcagataccaattaatttctgtttctttgagtatcatggactgaattttgtcccccactcattcatgtgttgaagacctaacccacaatgtgtttatatttgacatagggcctttaaggaagtaattaatgttaaataaggccataagggtggagccctaatccaacaggattagcattcttgtaagaagaggaaggggcaccagagttttcaagcacacaagaaaggccatgtgaggagccacataaccacggctgtctgcctggcgtcgtggcacacacctgtaatcccagcactttgggaggccaaagtaggcagatcgcttgaggtaaggagttcaagaccagcttgggcaacatagcgagacccatctctagaaaaaatacaaaaattagcagggtatggtggcaggcacctatagtcctagctgttgtaggggctgtggtgggaggatcgcttgaacctgggaggcagaggttgtcagtgggctggaatcaggccatcgcactccagcctgggtgacagagagagaccctgtcttaaaaaaaaaaaaaaaaaaaaaaaaaaaaaaaaaaaaaactcgta

SEQ ID NO: 1612 - DNA, 1939 bp, Homo sapiens
  SITE (1874): n equals a,t,g, or c
agtaaaataaataaaaatagaaaaaaaaactcttcagtcaaatatggtggccactagtggctattgagtacttgaaatgtagctagttagaactgcaatgtgctgtaagcctaaaatacacacatttagtacaaaaaagattataaaatatcccaacttttatattgattttgaaataatattttgagtatattgggctaaacaaaatgtagcattaaaattaatctcacttctttcaatgtggctgacaaaaaagtttaaattaaatgtgcggctcacattttgtttctattggacagcacaggtggagaaggtctctgaacataaaacaccgawtaagtatattttccactgggactgggggtgggtgctttgggggaagtgcataggtgctgggcagtgttaaaatcagggtgggcgtaggtggcagtgaagggcagtctttgtgcagccagatggcaagtgagagcatgaatgcctgactgttggaaatgacaaaataaatcatggaatcctgaagtttcagggtgtaaaatgctttagaaatcatcatctgacccaataaatgatggaaagaaatgccctggactcggaatctgaatgttttggttccagtctcagctccatcatttattagataggacgtcttgggcaagtcagtctcttttcttatatgtctaatgggggacataaaatctgcttgatctttcctggaaggttatttctattattttaacttatttgaaagcccactcaaaattccaaagtactgcaacaatatgagatattaaatagatgttgcctattttacaatcctggctcagcccagttctacagacagttggtaattttcaaggtgagtaattaatacagagatactttggcagtgaaaatattattagtgtgtttgtgcttatgtctacacagagaagagagaggaggcaaagataaaacctgtagctcccattttcttcttatatatttttacttattttttctgtcacagttataaccccttaagaaaaatttagatgagtactagaatctggcaaaattagttaaatcagactgagatgaataagatagaacaaaatgagctgtagaatgatgttttggctgagccactcactctgccagggtcagcaccttctttaattgactcttttcaaggaaatgcagtacaggttgctctctgttgttacctgtgtgtcatgacccgctgggccattaacccatttgtcttgaatagtcaattctctggccccaggattgtcaggagccaggaggagctggggaacatggctgagacattctcactcctgttccagcctcaggaaaacccactgagcctgggtcaaatcttgggagtaactgctgacaatggtgattcctgagccatcctctctccattgcttgtcctgggtgaggcctcagggaggccaacaatttcctatgcctctctattgctgtacacatctggaactgaaattcattgcatatcccttcacccctgaatttaaccctgagaagtgtgaaaaattggttcaaacgtcctcatcaaaactcatgttgaaatttaattatcatatgtaatggtattggaagatggaaactttaatagatgataggggccagggtgcagtgctcacgcctgtaatcccaggactttgggaggctgaggcaagaggatcacttgagcacaggagtttgagatcagcctgggcaacatggtaagatcctgtctctaaaaaaaaaacacatacaaattagtggggagtggtggcacacacctgtagtcccagctattctagagtcgaggtaagaggttcacctgagcctagagaggttgaggctgcaatgagctgtaattgcanccactgcgctccagcgtggacaacagagggagaccctgtctcaaaaaaaaaaaaaaaaactcgag

SEQ ID NO: 1613 - DNA, 731 bp, Homo sapiens
ggcacgagacctggggttgtcggtgctgctccaggatgtcagatgctcccctgggggtgtgggtgctgctccaggctgtcagatgctcgcctgggtgtgtgggcactgctcctgactctccgatgctcacctgtggttgtgggtgctgctccagaccatcagatgctcacctgggtgtgtgggtgctgctccaggttgtcaggtgctcaccatgggctatgggtgctgctacctgttgtcagatgctcacctcggggtgtgggcactgctccgggctgtcagatgctcgcctgtggctgtgggcgctgctctagactctacgatgctcacctgtggttgtgggtgctgctccagacaatcagatgctcacttggggttgtgggtgctgctccaggtcatcggatgctcgcctgggagtgtggttgctgctccaggctgtcggatgctcacctgggggtgcagggtgctgttccaggctgtcagatgctcccctgggggtgtgggtgctgctccgggctgtcagattctcacctgtgcgtgtgggtgctgctgcgggctgtcagatgctcacctggggttgtgggtgctgttaaaggctgtcagatgctcgcctggggttgtgggtgctgctccgttcggtcagatgctcgcctgggggcgtgtgtgctgctccatgggttcagatgctcgcctggaggtatgggtcctgctccgggaggtcagatgctcac

SEQ ID NO: 1614 - DNA, 1374 bp, Homo sapiens
  SITE (642): n equals a,t,g, or c
ggcacgagagatgttggtcccacgtgactccctttgtgcaaaagcagatcttccctgacagggatctgcaagtgtgcagagatcacagtgctgtccacagtggtgccctcagggggaggcaggaaacgcttccactttttactttttgtaactaggtttgctagaaagcgtatatttatatttgtctttggaaaataatgattagaaatagaaggcataaaagtaataaatattcattaaagaagatgaggcatgaggcatgaggcgtgatcccttctacccataggcgccagtgttgcacatcgtggtgttctttctgggatgtttctcgtaagcacttattaagttgacttgaaactgcagcacgcatgttctcgcatgccactctcccttgcagagcagcccgtggcgcctcctcttcaggggccatctgccagttctttcgggtggttctgtgcccgcatcagctcctggcagccacccgtgtccagcccacgagggagcccacccttggacatatctaagctccccgaccacctccttggcctttaatgggagtgggatcagagacagaggggcgacaagacagagggccccggggggtctcatgggggggcggggcaagagcaggcattgctgaanttgggtcacctgccctctgtcaggagcaacgggggcctgaatcccagtccagcctcagcctcactgtggtctcacctttctccccagtttgtaaagctgtgaattagggacaggaaccctgaacaattttgagagtcacatgagcatttggaagtgggctttgtaggggaaagtgaggaggcccaggaggctggtttttgctgtggtcacgtgtgggcctgggagagcccagccctgctctggcccgcccccgtctcgccatctgtggaacttttggtttcaagcagctgcaagagttgccaaaaggttgaaagaattcagctgcctgactccaggtcctggcatccccaggagaggcccctctttcccaggggctctggtcaaagttccagagcctggcatccccaggagaagagctcctctttcccagagctctgctcaaagtcccagggagccccctggtcctgcatgggctggggcaaccatgctcccgagtcttgtggctggggttcagtgctctgaccaggggacaccagggcagggtggacctctaaaccctgtgcactgagggaggagtgaggggtccccagagcactgctggggcagctgggagcagccagggaggagcctgggagacattccggcggctttgttgtctgagtgagggaggaaaggggagtaaagggttgagtcagggcctgcctggggcttttcctgccaccaaactgaacc

SEQ ID NO: 1615 - DNA, 1000 bp, Homo sapiens
ggcacgagtgttcaagacattttttttcttttctttaattttcagaagtttgactatgatgtgtgttggtaaggatttcttttggtttctcctatttgggtttgctcagattcttgagtctgtaggtttacatcttttgccaaatttgaaaagttttctgtcattattcctttgagtatattttcagtcccaccctcttttgtaactctttctggaactccaatgacaagcgcattagatcttttgttatggttccacagatccctgagcatcaattcattttttctcattagacttaaatagactttcaagggactcaaaacagagtctactttctctcttttgtttagactgggcagaataatggcctccgaaagatgtccacatcctaatctctggaacctgtgaatatgttaccttatacagcaaaaggacttggttgacatgattacattaagaaccttgtgatgaggagattattctggattataatgggcccaatgtaatcacaagggtccttagaaatggaagagagttagaaggagatatgactatggaggaggttggagtaatgtgatgtgagaaggattcgatcctctgttgctggctttgaggatgatagaaggggactacaagccaaggaatgtgggctgcctccagaagctaaaaaaacaatgaaaaggattctttcctggtgtctccagaaaagaatacagcccttccaacaccttgattttagcacttctgacctacagaactgtaagataaaaaatgtgtaatactttaagcttctaaatttgaggtaatttgttgtgagaacaataagaaacaaacacaggaatccctattgtctgtcttcaagttcactgattcttttcttttcttttttttttttgaggtggagtctcactctgttgccccagctggagtgcagtggtgcgatctcagctcactgcaaactctgcctcccgggttcatgccattctcctgcctcagcctc

SEQ ID NO: 1616 - DNA, 1122 bp, Homo sapiens
ggcacgagtgaaagcctagaggtaatgacatgctcggcgagctcaaactcctggaaactctcccaggaaaactcgggatgcgaagatgtactctagaagggaacagatggcttctgtttttgtgtgtggtatggaatggatggcaaaaggtcagtgagctctgtgggagacagcacggtgccaaggggaccgtgtcaccttcctcacctctgcctctgtctcagacacctgctgacatatgaccaggtgcagatggagcagtgccagccacgccctgggatgaggagatcaagctggtgctcagccccagcaaggcggggtcagtgacatccctatatgtgaatggggacacatttgtaagcagagacatgaagtgacagaatgagatcacccacagcgacatctgccactacccaggtgactgggccaaaagtgggctgtggaattggaacaaaatacaacagattgtatttagatattgactccattctaatatatagactttgcaaggtaaacatttcaaaattgctctttactatgagaaccaaatgttttctccagatattttgatataaatttttgatgaaataaatgcatcctaggaaaggccttgctcccatattaggaaagtaaattctatatccaaggacactgggtaactacagccttgaatgttcatgggctacaataacgacgattatgagggaaccagatctctctcctttactgtgtttgggtagatcctttcatcagtatgtcaaggctactgaaatgttagtgtaatcttgatgtcagacaggggacagggtctttgcttggaagcctcccaaatccagggcctgtggaaagccaaagcattccctctgagatttcggcgaaatcttttgtctcctaattcccctttcttttttctttttctagttttttgttttttttttttttaggcggagtttcgctcttgttgcccaggctggagtgcaatggctcaatctcggctcaccacaacctccgcctcccaggttcaaatgattctcctgcctcagcctcccaggtagctgggattgcaggcatgcaccaccatgcccggcaacaagagcgaaatccgcctaaaaaaaaaaaaaa

SEQ ID NO: 1617 - DNA, 996 bp, Homo sapiens
  SITE (190): n equals a,t,g, or c
  SITE (985): n equals a,t,g, or c
ttcctttgccctggaaaagtttcaccacctttatatttttaccccagccttggagttatctttttctgctctccattctccatgtccaaaaacttgctgtcagtccagtttttaatcagttttctccttgaggcttgatctcccatttctctcatcccattatagcttttcatgtagatctgaggcccangttactgtaattcttttttttccaatttccttgctcccaggatccccatcttgtataaagtttctaaggtgctcctcctcaaactccatttttacaatatccgtattgtaaaattttcattttcagtaacacccagtagataatttttcaaagacgatcctcctcaaacacccatttttacaatatctctattgtaaaatttcattttcactaagtaacacccagtagataattcctatggagcagtggtgttccaaattctccattacctctatgcctaatattcatcagccttcattactctctagcatattcaccttgattcaacagattcaaacttcctacagccttctactgatgtcttataagctcttgcctctgtgcctttctcatgctattctttttgcttagattgctctttggtcccagctcatgttcatcactcccttcaaagcctttcttcctttatatcttctgactgagctctccctgattgacatcacctcatgcgatgacctccctcattctgtgctgcctcagcacttatcttttgagtttgtactgtggtccatgtacttactaatatgttgctttgtaattattttctagcactctgtgttacagtttcatatttgtatttatttccaaaattaaattgtaagctccttgagggcaggaataataacttttacatttgtatctctgcacccccgagtgcctagtatagtgctgagcacatagtaggcgtttaataaatgcttgttgaagtaaaaaaaaaaaaaaaaaaaaacgggncgggggggggg

SEQ ID NO: 1618 - DNA, 2111 bp, Homo sapiens
gaattcggcacgaggstttccatctctgagttggccttcaacgttcaagaaaatggatatattattttttttccttttctatttccttcaggaaagactaggtttcagtacggtttcaaataaaagcagtggagtaattttctttcccgtagttctccctcagccccctgaatcataagaatcaaccctcattccttttctcccaacctctcaggtgcatttgctgagtcactgcatgttggcctgaaacagggtccatgtgtctccccaccatttccaaggcatggaggtgggaagtgggaagtggggagggtgagctttggactgaacacccaaggsccacggccaccagctacgaggcttcccacaggcttgtctttctctgwatgtctgtcacaggattccagttctccagtcaaatcaatgatgcttctttggccctgtgctccctgaagtcctccctttatatcataagtaaccaaggagtccttcatgcctgatttttgaatgctagtaaattttcaacatcctcatccaactctattccccaggcttccctgctccaaactccaaatcacctgaaaaatatgttccagtcaccccacctctgcaccaacttgagtgagtctgaactgagaagcatttattccaatttgtcatatttgtggaggatttttcttaaatggtcacaatatttctagttccatgggctcttccaaggctttgtcacttcccatccagargcagtttctgtgttcttccccttgaacgtgggargcatttgtgacggctgccttgamcaacagggtggaagagacactgcatgamctctgagtgagtaaaggccaggcagcccttgcttgactctcttccttgagatgtcatccttagaacctccatgttgtgagaaagctcaggccactgggaagaacacgtgggtgttcccattgttgacagcctacagacaatatcaaacaccagacatgtgaatgaatgagcctccaggtaggtccagccattgagccagccctcagtcaactgtaccagctgtgaccccagacatattggggtagagacaattatwatatctctactctgccttgttcctgttgctgacccacaatcttgtgagtctactgctgggtcatgaaaaaaaacaaattgaactttcattcatwcattcattcattcattcatctatccacctactcatccatccaccaaagacacacttactgatatcccactgtgtatcatagactataagcatgggggctgcagagataaagaaagaagtgaaggtcctgaggagctcacagacatactactcattctgctgttgacccatcaccccaagtaacaaaagagcacccctcctaatatcctgcttcagattttcacagtcgctcatttatgcttgcatttctgctttgccattccaactaagtgcctttagaataagggatcaactttttttctcatggtgcttagcacggttttataaatttaacacatgtttgatatagcttgttaatttttgaaaaatcagtccatatactgctagaggttttcaaggcttcaagtaaataaaagaattacattttggaaaaataacttaataaatgaaatccttgtgccaaaaggagaaaaagaagaaaggtatgaatgatttttgggtccttattagatgactggggcctgctatttcatttactcttcatagcaaacttatacaaattatgacaatcctcaaattgcagactttaagataaactggctaaattgaatgactatcaaatgtggcacaaggagattagccaatgccagggactcttttgcagccactgtggtgactccagcacatgaagatgccacccagatgacatttgctttcaagacctttgaacaggctgccttgaaaagaatgctttccaatgtgcaactctatatcttctgtggctctggtaagtgaggactttacagcttatgttcactctttcctgtaatcatttccaggcctcgtggaaaagtgttaccaattaatactcccattatagaactggaacaaaacaaagtgcaggacgtgggacaaatcagttaaatatcctcga

SEQ ID NO: 1619 - DNA, 473 bp, Homo sapiens
gaattcggcacgrgcaatccacccatcttggcctcccaaatttctgggattacaggtgtgagccaccatgcccagcacatttctttttataattacccaatctgtggtattctgttacagcaacagaaaatgaaccaagwsgtatgttctctttggtatctgctgcttttattcaacattaggtttataaaattcatcaacattgatgtgcatagcaatagttcattcactctcattgccttatgggaccccgctgtatgagccatctatctattgtatctatggctgtggracaaactaccccaaaacctagtgacttaaaacaakaacatttatcttgcatagtttctatgcattaggaatttcaagagcagcctagctgggcagttctggctcagggcctctcatgtggttgcagctgagatgtccttcagggctgcagacatctgactggggcttgaccgttgctcgag

SEQ ID NO: 1620 - DNA, 1478 bp, Homo sapiens
ggcacgagttacactagataaacctgtattttaaaagtattcaaacaaaacacaacacacttacttagagcaataataataaatattacagaataatataatccttcccgttctaaaatatttttaaagaatatgataactttatattgggtcctagataccatactgtatttagggaatttaccaagatagagctggctttattgtaagtcaagcaaaatgaactggcgttcttgtaagctgggttcagtctactattatcggttctgtacagtgtctcctcgtgtgctagtgaaacaggatggggggcgaggaacctccttcccatcttttactagcctgagaagtatcttttcaatattttataattttgcctttggcaaagggctgcttatctcctgggaattcaggcacattttgaagatttccccatagccaatgagcacagaatgattattctcacaaaagttcttaagaaatgtcacctctcttgtgtctccttctttctagataagctctccccacacctttctcctgagacagtctagaatctcccttttatattgctgcagaaacacagactcatttccatacacgtttactccggcacctatagcatagatcaatgctatggacacgtgctgttgtgtgagatttaaaagtaaattttccattcagagatttttaaaaaaaaaaatctggtcatagcagccattagtcaacttagtcttcattgccctcctttttatttctaagcatgattcattcaggatataagattgcatgggcaatcattctagtattaaacaccttggaaagatgaggaccatcttcttcctccctgtgtctgcttctctttctgttccatcttctttccttccccatttctttcactctttccttccctgtccaggtcctgttgaatgctgactcaggccatctgtgctttccaggccagctctttcacttattgctcatgattttggccaagccatttaaaatgcctaggcctcaatttcctcatgggtaaaggaagctaataaggtctacctaatggacccacccaataaaattcttttgagaattaagtgggaaaatgtatattaaacacattggaaattcttgtctacaggggatatgtcatcaatgggagttgttactgctgctgtttctactagattccaaattgagaagaaaatctttctaaagcaagtatcaagtagagtcaggaggaagcatctaaagtttctgcaaggaccatggcacatcttcttgaacactgctgggatgattatttggataataggagttggcaccattttcattattttataggcaatatagaaatatatctgcactcttctttaaaaaaattactaatacataatagttgtatatttttatggggtacaagtgatattttgctacctgcatagaaagtgtaatgatcaagtcagaatgttaaggttgtccatcac

SEQ ID NO: 1621 - DNA, 601 bp, Homo sapiens
  SITE (7): n equals a,t,g, or c
  SITE (292): n equals a,t,g, or c
aggaatncggcmcgagcagatagagaaactgaggtccagacagggaagggactagccctggggccccacagtgccttttggtgagaccccaggccaggcctggagagagacaggcacacacacactaactagtaattcccactcaacagatcaacagattcctcttgcaggaacaagaggaatttcgtttcccttccaccaacaaatcaaagatcwgttatggtttcatgctaaccgccactgakgcttggttggcttttctctcttgcttatcacagtgacatctgcagantaccctgggcattctgtagaaagtgtgcactgcctggggtgggagttgatgggggttaggattaggtagaccccctctgtgctcccacaatctcctgaggaccctgagccccagtcctgaccacatcctcctccagccattcttgatgtgtctccctgctcaattgggacttcttgagcacagggacccttgtacggaattatctttatgtgactgtcacatatcttggaggtgaacttctggagagggggtcagagggagaggcctgggtgagttgtgctgccttccgtcatccccctcagtctcgag

SEQ ID NO: 1622 - DNA, 1120 bp, Homo sapiens
  SITE (994): n equals a,t,g, or c
  SITE (1045): n equals a,t,g, or c
  SITE (1049): n equals a,t,g, or c
gttgcagaatttgggcacgaggctccccatgccaggttcctgcttctcatggtccttctcacggttgttgggagttttcctatctctccagtgctcttggaagacggtttatggtatattatcaagggaagcctgaaagggaaactgctagttgtgttcaccacccaacgagatctggagtcctgccttctttctacacttagtcacacagacctagccccacagccctctagttgcagggcttgattgagaaaagtatgcagaggccgagagtgtgtgtgaccgaccacatcatagccatcgaatgtttatcaattcccattcagtgtttcagtgaatcttcagtagtctctgtgttctttgttagtcacctggtttagatgttccatgaattgttcttcctcttctagcaatgatgaccaacgtctatgaattgttaatatttaccggggactgtgctaagtgctttgcatgtgtatttttcatttggtgttcgctataactaggagtaggttgttttgctcctttcacagaggaggaaacaggcttggaaaaggtcactggcatgcataaatcccaagctagtcagtagcagagctagtcggtagcagaactagtccgtagcagagctagtcggtagcagacctagccggtagcagtgctagtcggtggcagagctagcctttgaattgaggtttttctgactccagattccatgccttaaactgacttcctgaatgtatccactgggataaatttctcaaaatggaattggtagatcagatgatatatgagtttaaaatatggatagatagttccaaccggtttttcagggcattgcctggtgtttaccattcttgkgtatgtgcttatttgcaccascagtatttatcttttagttttgcttttaaaaacaaatcttgtaggccaggtgcggtggctcacgcctgtaatcccagcattttgggargccgargtgggaggattgcctgancccaggagtttgaaactggsttgggcaacatagcgaggcccaatctcccanatanataaatgatatttttaaaaacaaaataacacagagcccttggaaatcaaaaatctagcaggaggaaaaaac

SEQ ID NO: 1623 - DNA, 755 bp, Homo sapiens
  SITE (512): n equals a,t,g, or c
gattttctgtaaattaaagttgtttttactaaattatgggccatattttttggatgtgtgctctgaaactaatactgcttgcaaggagaaaaaaaggagatgcaagtgtgtctaatatattggatacataaaagctggagtatgcataatcgtcttgcaagagttcttaaatctctgtatataaactgtttaaaagtaaattaaaattattccttaatgaaatacaaatctgaagtcacttgaataactaatcattttatgacccatgcagtgaatttttaatgcctacttctacctgattattttagatatgtctgtgttgtaaattaaaagctacataaatcattaatgtgttgatacagatcagtgaactgcttacactatatgtgattccttaggacatacaatgtctgattcacctccctccctttcaattatatggctgccaggctctttttctctattcattttttgcaaggtcttatttggtagaactgcattccagggtcttnatcactttcccaagaggaactgatgtttccaatcaaaagagggctcacactgcaaaaatgaacaggtcctaaatccaagagtgtgaacacacaatctacgagggagaagtttgcttttatttttgtttttgttttagtaatctatgctcccaagaaactgtagcaacgaaacataacctctgcacttttttaggtcattgcagcctttttaccttccttgaaaatgtcgtgccctttctgtac

SEQ ID NO: 1624 - DNA, 2388 bp, Homo sapiens
acgaggtagaaaccttgaaattttagaaaacatcaatttcatgcctaatgttttgcctggtataattgttgagcccagagactgtttgtacttgaacagttcaggaagaaaagaagtagaaatgatttttgttgctgccacacttcctacttttttgtatgagcttaaacctatgtcttgaacatttatatcaccattcttgcccctgaacacaaatgaattttttatctttattttatgctacatttctatacaattaaatttatattttcaattgtttgtttgcttgctcccattgggagtcgttaaagtgtaaacagggcatagggactgcaattaaccttgagaacaaaagaacaatttatcactttaccaaacaacaaaattcactcttattgttaataattcataataaaggcagcaactatcaattaagttgagaacagaagtggcaaaacaggcacagtcatcaaatttgcaatagctaactgctctattctgaattatcagcagtagctgagaactacccaaaggtttgctgatggccacagtacagaacgattagtgaattcacggctgcatgtctggtttgctctatttcccaaactgagtaaataaatgagagcttgctaatcaggactattaggggttgctaggaaataaaaaatttgctactatgggctgtctccaacctagcaaggagtttgacacaaaacttctattacacacggttaactagcacttaaaacaaatatatctataagaatttatcagtactggtctgattcgtaggctaccccaaaaccctgcctagccaatgaagtagctggaatagaaggaaaggtaactgttgccaactgattgaacaactttttggttctttttatttgtaacagtgtacccccaaaatctgaggtgtttgagggttacctccctctgccaaacacctagacatttactgaacagacttttactacgaagtgttaatggaagtcagggaccccaaatggagggactggctgaagccatggcagaagaacataaattgtgaagatttcatggacatttattagttccccaaattaatacttttataattttttacatctatctttactgcaatctctgaacataaattgtgaagatttcatggacatttatcacttccctaatcaatactcttgtgatttcctatgcctgtctttactttaatctcttaatcctgtcatcttcataagctgaggatgtatgtcaccataggaccctgtgatgattgtgttaactgcacaaattgttcataactcatgtgtgtttaaacaatatgaaatctgggcaccttgaaaaaagaacaggataacagctatgttcagggaacaagggagataaccattaggtctggctgcctgagagccaggcagaacagaaccatatttctcttctttcaaagcaataggagaaatatcgctgaattctttttctcagcaaagaacagcctggagaaagagagtgtgttcctagcaggaggtctctgaaatggctgctctgggaatgtctgtcttatacggatgtagataagggatgaaataagccccagtctcccgtagtgctcccaggcttattaggatgaggacattcccacctaataaattttggtcagaccagttgtctgctctcaaaccctgtctcctgataagatgttatcaatgacgatgcgtgcccagtggaacatgcaacttcattagcatttttaatttcaccccagtcctgtgatctcgccctgcctccatttgccttgtgatattttattaccttatgaagcatgtgatctctgtgacccgacccctttcctgcttttctggagggtaaggacccctgaaccccttgcctccacggcacgagctcgtgccgttttttcctgtttttggattttatgtaaataaacagagtcataaatttgacactctcaaaatatcccccatcagattcatgtaagacttttattttggtgatacttctccacaaccatcgcactacaacttaccttaatccactcaactaacacttacatatttggctttagagatgtatatcaatatcttctgtggtctggagataattcttatcatattagcaccttagatgtaattgccagtattcatgatatgttaaaaaattattaaatgtctactaaatttgctacagcttagctacttcacgagactctaaaattcggttccctgctatactcttaaatttcaaatataaacatatatacctcttcccttgataaaatcttacttccgatctgtatcttttcttgacactttccttctcttgacacttttggttgactgggtctgtatgttgaaatgtctgccttgatagata

SEQ ID NO: 1625 - DNA, 1245 bp, Homo sapiens
gaattcggcacgagtgcttccaggtaagagccagctgtggtaaaagcagatgggtatgtacttgatctttgtttactgtgtggtactcttttttgtttcagccctgacgggggtggctggtggagctcctagtgaaatgcactgaagtctctgcaggggggctgcactagctccaagtcttagacaggcagaaatgtgatctctttccctgtcacactcctgtactggggctcataactctccatgcagatgcacactgtcgtctgtctccaggccatagtgtgattgagaaccgcagaagacacctctcccctggctctccactggagtggtttcacgctggaactcctcactcagcccaatacagacagctctgtggctttcctgttctccaatgtggtaatgctgctgattgaagcagagagggagaggggctccatcttttggcacatgcaggtgggtgtcagctgtggtgctgtcagctggctgggtcagcctaagctcagacccgatggacctaatagacatttacagattattctacccaacaactgcagaatatgtatttctcatctgcacgtggaacattcccccaaattgaccatatgcttggccagaaagcaagtctcaatacattcaaaaaaattgaaatcatatcaagtatcttctcagaccacagtggaataaaattagaaatcaataccaagaggaaaaaataaggagtttttcaataggtagaggaaggagaatggtgccctggggttaagaacacattaacaaaagtacaagaggcatgaaaatgcagtgtgtaaaggaagagaaaagttaatgatgcaccttcatggtaaaggggtacaaagccggaggtagtggactggacgaggcaaacctccaagcccagagcctgtaaatggcctgctcgatggtgtatgggaagcctcaggcagtaacagctgagttggtggcagaatacgcaggtggtgggaaccccagggttgatcacagacctgtcagcatgggctctyagaagggctycagctggcagctgaaacggttgggtgggarcagggtggccgtgctgstgktctttygctgaggaaggcggactyccttagctggagcaagggaggctggcagctgtgggatgcgtggcccgattgcacttcccttttataggagtggaggtgtatttcgctgttggggacatgcaaacgtgctcagcctccccctctctccctggctcga

SEQ ID NO: 1626 - DNA, 431 bp, Homo sapiens
ggcacgaggtgaattgtcttctccacatatccattagcagagtgcatgttcggtaccaaagggtggtgtgatgcaagctctctttcctgctgctctcgtagtttcctgtgttgctgtgaaatagaaggtgggataaggcactttggttctccaggagtactttcctctaactgccaccgtttttaagcttctcagcagtgtttttcacaccctgctttccgtgtgcatgtcttgtcacttatgattaaactaaacacaagtttttccatttttaatgctgctatgcttctatacctctggtaagtttgatcatcgtgttctgggttgggagggtgagagttcttgtgattccctttgtacttccctgacactaacacatgccctgcacacccatcatgttgcatcagtgtccatggtggtggtataaaatt

SEQ ID NO: 1627 - DNA, 1011 bp, Homo sapiens
  SITE (863): n equals a,t,g, or c
gattcaaaatgcatggcccagctgctcctcatattgaagttgcgaccatgggatttggcaacattgagctccggctctgggcattgctctcacagctgagagtgacgcccaggctctggcagcccagacttgtcatcctgtaaatgaacaatccccagtccccgggcctcattttattcacttggctgagctgcctgtttgctttccgttctgtgctcgccagctcactaagcaagaggatccgtgcctgactgcgtggagaagctgtagaggaaatggccaccctgactgtcccagcacctmccggggtggcccggggcctgggscctgagcagaactgtgataaagggaagcagggaagcagtgcgagarccctgaccaggtgcargagcctgattccgaatccamctctgccatgggcagattgcatgatgccatcagagccctctaamctctggccttcagttgtcacacctgtaaaatggggaaatattctagagaagtggstcaaaacctgatcatccatcagcytccccccaagaacatggggacagtgcacatggcaaggccccatgcccagagtttctgattccacagtttgggatgaagcctaagaatgcgcatttccaacaaggcttctggtgaggctgatggcccagggacctcactttgggaagctctgtagtaaatccagtttctcagccagtctgctctgtagagctcctgagacagactctttccctaggcctcccctgaggttcttacttaagcaagtctccatttttcaaaagctctgccaggtaactctatatggcactagggctgagaggcacttggtggatgtttctaagatcccacgtagntctcacatgccaggatgccatgattttgaagcagagtgcctcctgccttgccaaggctgacagcacacacagggcaaaacgccatcgtcacatattggaatttcactctttgaaaacctggtaatcgtgtgtcccatttcagctcgag

SEQ ID NO: 1628 - DNA, 569 bp, Homo sapiens
attcggcacgaggacttattkgggctaatcagcctaaagaggatgatgcatataatatgcataggagagatctctctgtctgtgtctgtctctgtctctgtccctctctctccctttctctttgcaaaacacgcattcactgttgccgtgaactgccacagatagctccatagtgaaactgaggctgaaaagggtagagtaggggcacaaagtgagccgtggctcttcatggcatcactcagactcagctgccttgagccagctccacccccgactcccaggtattcaacataataaatttggtggtgttgttttgttttgttttgtttttgtttttgtttgcttttttttgagatgtagtctcactctgtagcccaagctggagtgcagtggcatgattcggctcactgcaaccttcacctcccaggttcaagcgattctcctgcctcagcctcctgagtagctgggactacaggtgcatgctaccacgcccagctaatttttgtgcttttagtggagacacggtttcaccatgttggccaggctggtctccaactcctgggctcgag

SEQ ID NO: 1629 - DNA, 1223 bp, Homo sapiens
  SITE (243): n equals a,t,g, or c
  SITE (1218): n equals a,t,g, or c
ggcagaggccagactttggacctcccactcagaggtttctgtctccatcattctgacctgctgcttgtccacatgtgggccccaactccacttatccacctaggacttggtaaaatgcaaatctgagtatgctgcttctttactgaacacccttcaatggtttgccaagtctttagcatgtggcacatgatgtccttcacaccctgctccctgccttgttctttggccttgtgcctccctatnggccccgcctgcctgcccccggtccccctccccctcacctccaacatccaactgaaagccaaggctggtttgctcctgagacaaaggctctgctccattgcgtcagttcacctccctgccctgctggtgtcagcaaggtaacaatcaagctggtgaccccaccagcctcatctcccagccggtcctgccaaaccttcttgacattgccagtttgtgaccgtgaaggccacatggtcctccaaatcstttctccccaagaaaaggtgcaaaattgaagcacacatgtagggggaccctgggagttcaaggagcccaggttagaaatccttaaacccagcctgcttcacacaggggctggcttgatgaccgtgagtgctgccttcaccttttccccactgagctaactcctaactcctcacccgtgacacggctcaagatcgcttctcttagaaggaagtcccgatccgctgctaccccacatggcccccaagctggattggtgcctgcgttcgttcccagcgctgccgtgaaaagtgactacaaagggagcagctggatacaacagggatttactccttcccagttctggaggccagaaatccaggtgtcaggaccgtgctccctctgaaggccctaggggaggacccttccttgcccttctcagtgtcccgtggtgtctggcatcctctgtgtccctcggcttgggacagcccctctctaatctctgcctccacctgcacatggccatcttccctgaatgtgcctccaaaactctctcctttataaagacaccagtcattggacataagccccaccttactccagtgtgacctcatcttaaatccatgacatctgcaaaggtccttatccaaatggcccttatcccaataaggtcacattcacagggatcaggggttaggcctggaacgtatctttttcagaacactattcagccagcccacaccagcgcccccnacagg

SEQ ID NO: 1630 - DNA, 1626 bp, Homo sapiens
aattcggcacgagacaacaccaacatatctgcagcccatagtgcaaatgtccatgtatgtcagattaaatgttacttattatttaggtctgttttttaaattaaagtttgcacttgctttgcagccagccaggcagggagtcattacctagctctttcacttactcatgtgccaatgtgaatgtgttacttcacttctcctgcctcttgtctacagtgggcaggaggtaagcctcacggtgtgactgtgaagccaagtgaaatctcacacctacctcagaggcctttttcccactctccttttctgactcttttaatattttctcaattatttatagtaataataataatacaatgccaattgttcattcattcatccatttaaatcccaaaggaatttaaaagaagagtaacatttaacctgacaaagacaaaaggaggaagctttttaggtaatattaattatcataaagcaacaataataacaacaataataatagcaagctcatataagcaagaagcaatagtcagtgtgtcatgttttgggggaattaagaatttcaaatagttcattttaacaccacctttctcattccttattctcctaccccactggcctgatcacttctagaaacttccagattctttacctcttcatgacatttataattgctgttctttttttggaggtacaatatacatataaaatttaccatctttatcatttttaggtgtacagttcagtggtaatatatctaaatttatattctttatttttctgttctttatgtctaggacatttcaatcctcaacacttcacattgctaaatcctcatctctcaagcctcagcttaaatattaccttttcagagagaccttcacagatgatgtaatataaatcactctcccctaccattattctcaaagacagaaatctattttctttattttactaatcacaggctgaacttattttgctgactttattatctggctctcctacttgacagtaagttcaacgagggccaggacaaagtctgtaccccagcagttagttagcctgggttccatacatatcatttactcaatagctatttattaactggataaatggaaatgaatgcaagtgatagggatagatacaggaagagaattagataactaaaccaaggtcaggaaatggcatggctaaacgtttgcactaaatctttaaaactctggaaaaatcctggaaggatctcagtggacaaatgcctccaatacgtttctattaaggaaaatcactctcataagaatgtaggggaattgactggaatgagagaactgagggagggagatccattaagggtctgactgcagtaattcagatgagaaatactgcaaaagcttaggctaagttagtggctataaagatggaataaatagagtcaagggttattacaattgaacagaatgtggtgtctgactagaaataaaaagacaatctagagaagtccaaaatgacttatagatttctgacctgggcaagtgaatagattagaaaacaagatttgtagggaaagatgaaaaacagttattggatattttgaatttgatgcaattattggatatgtttcagtctggagct

SEQ ID NO: 1631 - DNA, 1347 bp, Homo sapiens
  SITE (830): n equals a,t,g, or c
tctcccctacactcctctccagccacaggagttcctttraattcttggaacatgccccattcccacttgcctttrggactcactcacgctgtccgtctgcctggaacacgcttcctccttctgcttgcttggctcagtcttacatatcctccagctctcagcttaaatatcagttcctgtagggaagccttttctgtcacccagtctaggattgcactcattatatgctcccaaatatagtgctcccttcatggtgcttggtatgcctagtgcaattctcgtttactttcctgagtccatctcattctccaagaattgtcaccactggtctttatactcctggaaggcatgaacccaatttattgtcttgctctctgctgcatctctgatagccagcccaatgccttgccataattgttgaaacaaaatgcatgttwatctattgaaaaaaaaatttttttttgagawggagtttcactcttgttgcccaggccagagtgcaakggtgccatctcggctcaccacaamctycgcttcccaggttcaagggattctcctgcctcagccccctgagtagctgggattacaggcatgtgccaccacacccagctaattttgtatttttagtagagacgggatttcaccatgttggtcaggctggtcttgaactcccaacctcaggtgatcctcctgcctcggsctcccaaagtgctgagattacaggcgtgagccacctcgcccagcctattgaaaatttgarttggagaataaaaggattttggaataaaaattaaaacaaagcttcccatcatwggayccsccttatgtancttgtacctgtggcaaaatacggarttgtcttctatcarttcttctgctgaagcccagggaaarartgtwtgtaaaaatgtctccctgtggctgagagccagctttatctttttatcctagtctgggctatcatttttatttttatttttatttttattatattagagatggagtttcactacgttaatgttgtccaggttggcctcgaacccctggctcaagtaatcctcctgcctcagcctcctgagtagctgggactacagggatgtgccaccacacccggcttatcatttctaacatgaaaatttaaaagttaactttaaatttaatgcgttaaagtaatctaacccagtaacataaaaatgtgaagttgggctgggcacagtggcttatgcctgcaatcccagcactttggaaggctgaggcgagcagatagcttgagcctggcagttcaagaccagcctgagcaacatggcaaaaccctgtctctaccaaaaaaaaaaaaaaaaaactcga

SEQ ID NO: 1632 - DNA, 741 bp, Homo sapiens
  SITE (86): n equals a,t,g, or c
  SITE (92): n equals a,t,g, or c
  SITE (640): n equals a,t,g, or c
  SITE (673): n equals a,t,g, or c
  SITE (696): n equals a,t,g, or c
  SITE (712): n equals a,t,g, or c
  SITE (713): n equals a,t,g, or c
ggaaacagctatgaccatgattacgccaagctcgaaattaaccctcactaaagggaacaaaagctggagctccaccgcggtggcgnccgctntagaactagtggatcccccgggctgcaggaattcggcacgagtccatacggggagcacccagcaaagggccccgcctcccactctgctctgtggtggccatggggatgataatttgggtaaacccaactggcttctgggagagcaagaaaggatgtgaggggtaggggatagaacagcccggggcagacaaagaacctcagcccaggcaggtagggaacttgagacctccaaggtctgatttcccctcacccccaccggagggctccattttgtactctctaggctgttggcaagaatgcggaccagactctggtgataactgctctgagcaccaggcagctcttggttctccctgctgatggggggctcggtggcacacttaatcctggaaccatcactcatccacgagccacttgttgagcccctggcactctctcttgtcccagcatcactgctgaccctgtcagcctctgagcccttgctcgaaggggggcccggtaaccaattcgccctatagtgagtcgtattacaattcactggccgtcgnttttacaacgtcgtgactgggaaaacctggggntacccaatttaatgcttgcaganattccccttttgcaanntgggttataacgaaaaggccgcaccgat

SEQ ID NO: 1633 - DNA, 962 bp, Homo sapiens
  SITE (294): n equals a,t,g, or c
ggcacgagggcagactcagggcaaacaacgggaaaataaaaactcaactggtgaagtcagacaggctaagttgagctacataaaggggaactgagccagacaagggaggaaagagaggtggaggaacctcacaggttggttgtcgtggaaagtttttgttctggctgtgaaagtaagaaggaacataagatttcaggaagcacctgccatctggatgaaggagattgagaatggcagcmattgggartaatggattttaaagatatcttggtgtgcattaaatgcactcttcancccttgggctttttctttagagactgagtatagatttgaattgctttagattatatattttttgaatgacagctgtttctttgaatgtgactccacaccaagattkgaccacaaagctgcctggcatttacagaagaagccaaatataacatggatcaatggtaaaccactcttgataaatacagagcgggcatctcagaraccccgttagcttcacccttgtgtcctgagatgctggctctgaccctgggggctctgtgaagtccagtctgaaatcaccctctagatccacccacagtcccttccaactctaaaagtcattgtgcaatgccagccttgcctcacttttagtcacagacactgaccacagggaaatgtagactctttctgattacacatctgagttgccacattttggaaaagatgcccttggcatggagcctctaccggctctgggccatggggtgtggttttgtgaatgggacccactgtggtgccatggagtccaggtaacatgacccagttctctgccttgcctcagagcggacgtctagttaccaccgccagcctctgcaagacttctctgattacccaatattttcctcttgtctgcagacatgacttctcataaatccctttgctgtatcccctttggaacagggctcgag

SEQ ID NO: 1634 - DNA, 943 bp, Homo sapiens
gtgtattttgataactcagtttcccaccttttttctccaatcagagtcccgcaagagctttatttctatgctgcaatttcaaatgacctacaaattcttagaagtgtaaagaactaaaaatatgtaaccaactaaaattgggttgtgggaggctgcagaaagcagagagagactaattcaccattgctcaaaataaagtgtcaatactgtctaaagaatgtactctccaaacttcacatcaaacttttttgggatgcagtgcgatgtggtacagagagtaacaggttttggagtcagatggctctgaattggttgacactcttactaacttggacattcgaaagttatgtagtcacttattttcctcatctgtagagaaaggctacactggtgaaatgagatcatgaagctaaaatgcccaaaggtaggcctggggcacagttggttatcattaataatagttattatcagttgtagatacttaggaggactaaaataaatatggaacccaatatcctagtagatgagtaagagagggttcgcagacctcgtgggtgtgaacgtarggagtgttgtatggagtcagaccaaccaaacaaagggagttggcatttgcggtcactcagattttatgcagccaggttactgctggctctggatggttgacacacagtgtgatgtttcactgcatttgtatcaagataatggcgcaaccatccccccaaaatccagcattattcataatcgcatctttcatcatcaatttggggaaagtctttggtacacagtcaattcctggggatgcaaatgatgatttcttccttttttttttgagacggagttttgctcttgttgcccaggctggagtgcagtggcactatatcggctccccacaacctccgcctctggggttcaagcgattctcctgcctcagtctctcgag

SEQ ID NO: 1635 - DNA, 1120 bp, Homo sapiens
  SITE (68): n equals a,t,g, or c
  SITE (133): n equals a,t,g, or c
cttgctttggcctcccaggcatgagccaccatgccaagctgttttctctgttttatcctggaatctcnatgggcctcagcttagcaattgtgagggtgggtatgcaggaggtggggtgtgaggaggggctggnaagcaacctttagaagcaggtctgaagggacttgtcaggggttccccaggtaggaaataggggtcacctgtgcccccagcccacctgccattgaggtgctagcccccagaggctgttatctttgtatagatgctgggggcatcaggacagcctgaaacactgtttccaggagtacagcatagaaaataagtctttccatccaaattggaaatgaaaaggccctggtacttgacagatctactccagtgacttggaacactgtgtgggagacttgtccttggcagcagtagaaatggggcggctctgaactttctctctgtaaccccaggcacatgtgtgcagacttgccaggccctgtgggcmaagcggatgtaggacctggctcttatccgggcatttggtaactcgaggaaaatggacttttcctcttctgctgcttttgtttttacctttggggccttatcatttgtggcatctgccctctaggacctatagcttttgggactgctggtagacacctattctactagcagagttttttcccccaaggcaggtgttttgatgagggcttgggtcacagcctcgggactcatggctgctctgtatcttccatcctgctggcctggaccacacggttccatgactttgccagattccttggcaggtttcattaagagagatgcacaggccggacgtggttgctcacacctgtaatcccagcactttgggaggctgaagcaatcagatctcttgagctcaggagttcgagaccagcctgggcaacatggcaaaaccccatctctacaaaaaatacaaaaattagcccacgtggtggcacacacccgtggtcccagctacttgggaggctgaggtaggggttgagccctaggggttgaggctgcaggaagccatgatagttcccctgcacacttcagcctgggtgacagagcaagaccctgtctcaaaaaaaaaaaaaaaaaactcgag

SEQ ID NO: 1636 - DNA, 402 bp, Homo sapiens
ggcacgagcatttgcacacacagccacaaacttgcacaagcagcacttgtacactgacacatatccgtttgtgcctatacagtgcacacttacacatttgcacacagctgtgcttgctcacacatttgcacacacccacctacacacttgcacacatactacacacttgagcgtgcagcacacatacctatgtgcatacatgcacatttgcacatgcacacagcagtggcacacacttctctatcactctccctagtcactgttctcccctgtgattcccacccctctgaccgcccctgctcacttgctgccccctccactggaaggggcctggcctggtgccctgtctctgtctgtctccaccgtgcagggaggtttcacaaggactggctgatgtctcgc

SEQ ID NO: 1637 - DNA, 214 bp, Homo sapiens
ggcacgagcggcacgagtgtatgtgtccctccaaaattcatctgttgaaacctaagacccaatgtgacagttttaagatgtgggaccttttgggaagtgataagtcccgatggctctgcccacatgaatgtattagtgagtgcccttgtaacagggctggagagtactatctacgtaggccctctttgcctttttttttttttttttcctttct

SEQ ID NO: 1638 - DNA, 570 bp, Homo sapiens
ggcacgaggtcgcatgggcagccctggggctctgttagctctcctcccgtcccttctccctttttcctggggcctgggtccctggccactactgtcctcacccaagacgtaggcggccaccaacttttgtcccagggagacgtgcaggacttgaggcagctggctgcagagttcgtccgggagtgggagcagcaggaaggccacagacacaatccccgtcagcaagaagaggaggaaggagctggtggccagttgctggcgggggtctgagaaacaagactcatcagatgctgcagcccccactcctgcccagcccaggtcctccagggagaagcctgaacaaggaagatgtatctacttttttttttttaattatcttttattttttgtagagatggagtcatcactacgttgtccaggctggtctggaactcttggcctcaggtgatcctcctgccttagcttcctaagtagctgggactatgggttcatgctaccatgcctggctaatttttaagttgtttgtagatggtcttgctatgttgtccaagctgatcttgaactcctggc

SEQ ID NO: 1639 - DNA, 1811 bp, Homo sapiens
  SITE (5): n equals a,t,g, or c
  SITE (1024): n equals a,t,g, or c
  SITE (1127): n equals a,t,g, or c
  SITE (1160): n equals a,t,g, or c
  SITE (1728): n equals a,t,g, or c
ggcanagttttctgctaattctaaaatacatgtcatatctcagtctgattctaatgagtgctttgtctcttcaggctgtgttttttcttgccttttagtgtgccttgcaattttttgttgaaagttgggcatgttgtaattggttatagaaatttaagtaactaggcctctagtttaaggatttatgttcatctgggtaggagttagtctttgtttaatgtttactgtagctatagatgccagagacttccgcttcctctcatgtcctaatttttatctcccttttgacttctagcttctctaagtattcctcatcagaaagagtttatttcttgcatttcttttatcygtaatccattatcatgctcccggaaccctgtaggtctggaggtaaggcgtgagaacattctataatattccagttcaattgtaatcttttagtagtctgggtctttgsctggtgaccttcacaaacatttattctttttttttttttgagacaaagtctcaccatgttgcccagcctggagtgcaatggtgcgacctcagctcactgcaacctccgcctcctggttcaaatgattctcctgcctcagcctcatgagtagctgggatttcaggcgcacactatagtcacccacttaggtgagttaagaaggttaaagggggctgaagtgagaggaatctcctccctcacatccgttggacaaggtcctgataaagtatttcttcataagagtaggacttttattaatggagagggctctgggtatattgcttaaagattagtgtttctcttctgctgttagacccgccaaatatttggggattttccagttatctttcatcaattgatttctagttcatttccactgtggtctgagaacacactttgtataactcttattattttaagtttggttagatgtacattatggcccagaatgtggtttatcttcaccttgaggtaaagtccatggggcccaggccattctttcttccaagctagtacacactcagcctncagcaattcactgacattgccatttaagtattcctaccagtttatggcactagtggattttaccccaggtaggtagatcttggctgkgagtctctggatttgnctctctagattttcgaaaggcagtttgscttgnaaactcagktctttgatgagttcaagaaaagttattgattttctctttgcttggctttttcttgtggggatgggactgatgacatccaggctcttttaaagttggggctgaaacttaaggttcatctttcatcttacgtttttgrtacatattcctmwgttctactgkttttagcwttcctatatctgactgcccttagtgtaccttctatactcaatgtactgctaaatcttgtcctttttagtccaacctaaaagtctttctcttggcttgtacatttacatcatttacattgatcatagtttctgtgaaaatgttttagtttctttcacgttatcttgtatgctgtgtttgctttattgcttcttttcctgctttctactctattggttgcattttcttctgactttaaagttatactttcatttttttttcttctggaggttacaccaggccaattagggctcataactaaatttatttttctttattaatttttaagtttctatagcctatcttccttctgaattaaagaagtatttttgcacacctttaaccctcagccacntctggcttaccatgaccaccttctacccaccatcccctcggtattatgtgttggtattctccaggattaagttcagactcgag

SEQ ID NO: 1640 - DNA, 462 bp, Homo sapiens
ggcacgagcccagctttagttgctggtgcccagatcatatcgtggaattgtacaggtgtaagttaaaaataaacttagagcaaatgattctcttttgattccctacccaatccacactcttccctgtcccctctatgtcattcctggcaggtggacatgaagctccaggtaagaggcaagcatccgtgttcaaatgaccattcccagtttgaatgactttgtttgcaggatcttacttctgcttaactaaatttgtaccccaccctctatgcacttaaaatccctttaaaattcgttgatccttagttacctccctggagctccttctatttatacacaataactggtttccaaatattgaaaatcaactcttgtagcccctctagtttttgtttacttacttgcttcattccccacgggctgaacactccagttccctggacttttctcatatgatatgta

SEQ ID NO: 1641 - DNA, 534 bp, Homo sapiens
ggcacgagaaaattcatgaaaagtatctctttttttcaataattagcagtcttcataagtctgctagtggtgttgattacttatttaatatttggcttactggaaaagacgtccttaattttatctttcagtgtttcctgaatgactccattccccttactctagtaattagcaagcatttttcttgaacacagaatacacacattcacacacttcagtttttaaagcacagttaggcaatgctaatagaaaagtgccagaatcagaattttcttaattcctctgtgctcaacgtctcttcccatccccaagttcttgccattggggagaaaattcttacttttgctatttgatttaatctttaattctatctccatgattttctgttttgttttttttttccttaggatgactgtcttttgaaggtttggtataatgtagaaaactggcggacagctgttacttctccagatggaagttcagaaaaacaatcccaaggagaaattgacttttcttttgtgtatctggcccatc

SEQ ID NO: 1642 - DNA, 1011 bp, Homo sapiens
  SITE (383): n equals a,t,g, or c
  SITE (925): n equals a,t,g, or c
  SITE (948): n equals a,t,g, or c
  SITE (976): n equals a,t,g, or c
agcaaaaagatacacgggcctaagataaaagatcaactaaacgtctcgtaaagcctctaaacagggcaggaaagcctgggccaacgtggagatgttacatcaaaggcagcagcagctcagtgatcctcacacacagtgggctgaagttaaaaaaagcagagtcatcagtggttcacaatttacattataattgtaatttattatttgcatgtatagttatattagtttatgctttgtttgatatttcatgtttaccatatctttatttgaaatatagtaaatatttatttctatacatatttggaaaaaatatattctgaacaactttttcttaatgctagcatccctggtgttgtggcacttttcagaataaaccctagcanggtcaagatgattggcattagccttcttctttaatcatctcaaaccattgttccctttgcttactatagtctttctgtgtttgcctccttttcatttcttactctaaactctttcctgccatagcctttgcatttgctattccctttgtctggaatgttcttgccatgactctgcatagtggctttactgacacatatctacaacacataatttgtacagagatctaaatattttttccagatttacattcaatgacctttgtataacagatatttctattatatcaagtactgtgttatctacttggaaatattgtcctatcttaactttgccacttgtcaattaattaatatcattgccatttgaggagtggaggaatttcagagtggcttagtgawtgcacaaagtcatacagctaataaacaacaatgccagggtttgaacccagggtttctgartttggatctcttttgcattaatctctgacatcactcatgcttttgcctttctgtatccagcagtctctcctatctatttttantaataatcaatggtagtttttgnaaattgtactcctgtgtaactgaakgcntttaakgctttaatttgmacttgtaataatcattg

SEQ ID NO: 1643 - DNA, 1665 bp, Homo sapiens
  SITE (1004): n equals a,t,g, or c
  SITE (1010): n equals a,t,g, or c
  SITE (1122): n equals a,t,g, or c
ggcacgagggaaaagttagaaatataataatgttagaccttaagagtaggacccacgaaagttgcaaacacttctagccttattattcacatacctctcatgaagtttcttggttcttgactctttctattgctaccggttacaacttatgaaaatattacatattgacatggcatgagtttttactatcgttaagcccaaaagctttctcccgctgcttcaactctaaagaatgatcaccggaaaattctgcattgacttcccaggtaatatcttacctcagagttctttatgcctctgcactggtggtggccattcacactttgggcaggttcagggtagctgcaaggtcaaagcacagtatctggaacgtaagtgattcagtatccgtctgttgaatgaaggacacttttaagaaaytttctytcttctagactaaakacagagagmgaggaagatgaaaagaaactacaggctctatctgggttatgctaacttcaaaaatagaagggaccagtgtaactgggtaacacagaaagggggaagatctgaagacttctttggaaattctagcaccagacagccacaggaaagaaaggacccaaggactccaaaaaatattacacaatagaaaagctgggatttggggatgaggcctaccaggaatccatcagcatgtacttcaaaacctctgttactaaaaagacaagggaagaagtttggcccaaagagccaagttggaattgctgatattatacagctgaccttgggtaagaaggaggagaaagtgtattaagcgtgtatcagttggctaacagccaggctgtgactgcttattcagagaactagcattcagggaggagggcttggaggctttccatgcaggagtgggaaaaatgcctcttatttcttttctgggatatgcacccaaggggagagacaaacttgaaaccgcatacaatatgggaaggttctgggcttggcatattatagcatctcttctncttttncacaccattttctycagaaacaactctgaatcacaagaagttaaggaaaatgcaatttcaaccctgtgtagaattgagagacacctcacaaatagatgtggttcccagatancaattttctagggaatcttctcaggtacttggtgtggaaaggactgacccatgtcaaaccttgtcacctctcttgtgtttgaatacaaaatgtggcaaaactaaatcttggcttttctggggacaaataaatatgacatgggtggattaatggaaagacatttaactttcagtttgcaagatgaaaatatatctgtaaaaaatcctaccacaacagtattcaaaccatatgttaatggctcaaaacatctgtagtactgtaacttgtcctgaaaaccctgctggttttaagcactgacgggaaacagtatgcaagctgaagagaaaaccgctttttgataaatatcacctcctcctttaaccagttcaccccctccccctctcaggatacccatatagttcgcaaagtgttgttacataggaaattctaactcttctcagagttttccaatctataaagcagctaatttgtacaggctacattctgaagctaagaaaacattttcacacaataaagaagagtaaagtctggaatgatctcgag

SEQ ID NO: 1644 - DNA, 963 bp, Homo sapiens
attgggtacgggccccccctcgagcattctgcagggactcatcctggggcaggtggggtcagagggcagatggccaggagcagagccagatggggagcaacagccttccctctgccaggacagggagagacctggctgcctcacagtgagaggtctggcagccagggagggcactggggacaagggcccagccgggcaccctacggagcacatgacccccacctgtccatggagcacacgacctccacctccagctgcccctgtgctgcagacaactcccagggtggcgagggtggcatcctgatcccagcagcgcctgcaggactgggaacctgctgcccacccaccccctgccacttgctctcccttccttgcccaaccccaggagctcaatgcctgctcagggcrggaataaraggcagaggaggggtgaggagagaaaggagtcattaggggccttgctgatccttcgtggcgcctccatgtccctatccctcatgcaaagcactaacctggaggcggagcatttcatcgaagcaaagcatctcctgccaccaagcacgtccacggtgttggggattgattgcttctatcctccagcccactctacggagcacccaccgtgtgacaggcgcggcgctgggcaacgaggataagaaaatgaataggccacgacatgtgcgcctgagaagtcacagactcagacgggagacaggctcgataccacacaccaaggtctggatgcacacaggacactgagtaactcctgcagggtgagcgggtttccagggcactcgacaaccggcagagtctggaagcagcctggaggggaaagggcattcctgacgggggcacagcagaagcaaaggcccagtggcatgaaagaccaaggagtgttgagggaacagagagcagcttggtgttggggcggcatcagcgggtggagctggagccgctcgtgcc

SEQ ID NO: 1645 - DNA, 1573 bp, Homo sapiens
ggcacgagtgataactgtccaaagaaatgatttttctttgctttcttggggcctttcccttttactttgataagtctttcaaggggtttgcagttcccccataatcgttttgataggagaaagattttaaattgggaagctcacagaggcaagaggacagcgtttctcagaattccagtttgaccctcccctacccttcttccttgccacaggccaaggagcgggagctggaactgaagaacacctggtcagagaacaagctcagccgccgtcagacccaagccaaatatggattctagggctctggaactgattgctcccaggatctcctgccagcccagctggcctggcccccagcttcacctctgggaccccagctgctctaagcccaggatctctttccccaaggacccagccctcgcctctgcgagaatgaacatatttgatagattttcttaacaagttagaaaattcagctccttctgtcctggagctagcaaagacttgtgtgatgcctccgaaggggctctgagttctggggtgggagttttgctctctgtcaggtgtgataaaatgttgaaccctccccaccaccacttttttttttttaaaccagggatgtctgttgaaataaaacattcagtctgacaaacattgcctgccctgtccctggatttgtgtttaccttgtgtaaagcaccttccaaatgatcttgagctgcctgattgctttgctatttttcctctctatccaccatctagctgggtttgtggccattggaaaccctagaaatggtatgcacaactttatatgaggcaggatgattttcagagaggcctgtgatcccaaatatgtattgccaatctcaggtacctctggagactgggtgaagtcaggaggttttttctgtagtacaaaatagtgtcaggcataaaaatcctatccagcaggaggtaaagtggcaaaatccctgtccctgaagatgattcagattgacgctggtagtcactggtctggatcagtttggaagcttcacattgaacttgggtgctagagagatacccttggagacttccagagccctagccttcattgaagaaaggagtacagggtctgtagactccaattatctgtaaggcactgtgacgcccagaagtggcaagacggatgggatgattccaaaaacagtgtgcaaatcatactgcaaaccaccactgaaaaatatggctaagggtactaggatccagtagggcttagctgctgtggtttcctgcaggaaagtagcgttgaggaaactcctgcagagaaggcaggagtgtggtgtgggaaatgtgatgaataaaagcactggaaagactacagctggctaccatcaataatgaagagaacacagaagagttgcatgctcagaatctagggactccaggatttctgaggtgctgttgtgcccacacctcaaaaatgtgctgagccaggtcccagcttgaaacaatgaactaaccggggccgggtatagtggctcatgcctgtaatcccagcactttggcaggccaaggccagggtaggtggatca

SEQ ID NO: 1646 - DNA, 1361 bp, Homo sapiens
ggcacgagctcgtgccgctgacataggacaggaatgagccttagtatctttgccatgaccagttgttggtacgtggcctcaccacaaacacagtgatggatttcagagcccagcagctgaggccgatggtcagttatgctctcatggttaaaggtcttccaggcacattctcatgacagccacgatatatttttgtaagaaattctaccaaggcaaaatatgattaagataggtagccaaaacaaacaaaaaagaaagaaaagccgcaaattcctccctgcttgctctttatgcatgctcctttgcaatgtgattttgctattagctccatcaagagatgggtctcctgaatctgagcttgaccacgtgaattgctttgaccactggagcattcacaaacatggcacaacggaggcttgaaaaatgcatgtgccttgggacttgccctctcttgttacttttggaaccagagacctccatgcaatgagcctagactagcctcctagaagatgaggacaagaagaagcagaaatcaagcaccttcccaccaccaggcatgtgagtgaggccatcctagactgtccagccccagccaagctgtcagtgaccacagagaccagctaagccaaactaaaaccgaaaggactgtgggaaaacctatagtactgtgagaaaccataaatgcttgttgttttaattcactcagttttgggacagtgtgttatgtagtaaaaactaattgatatcatttatgtccattttatagatggaggaactgaaacctggagacatgagaaagcccctcaatgaatggaagtctcaaggtgttcattggtcttcctcagagcctcctacagcaagctgggcttgatcggaaggctctgagtttgggggtagctttactcatttgtgttatttgcctaaaccctggagtctactgagatcgagacccccgaatttgatcattaataaatctcttttggatgaataatataaaggtgttaggaggcccttctaggccattgaagccactagaacagaagtcaaggaattctcaatcttcaaagcatgggaaatgaggggtacagggattctccctagcccagttagaaactccttcaggcaggacgtaaaatttatatttctcttctattcttcttcactactgtgctagtcttataagtctattgttcattcattcaacaaatacttattgagtgtgccaagaaaaaagcaaagatctttgccctcatagagtttactttctaggagggaaatagaaaataagcagaataaataagagaaatatatggtgtaccagataatgatgtgtgctaggaattaaaaaaaaaaaaaaaaaa

SEQ ID NO: 1647 - DNA, 1043 bp, Homo sapiens
  SITE (927): n equals a,t,g, or c
gaattcggcacgagtttccatatgttccctagctatttgcactttatgttctgtggaacgtctcgtggctgccactgctgccctaagaaaggcctggctgcaaggctgggaactcggctgggaaacagttccctgactgatataaaccttccctaatgacgaaggtggtttgcggttcctaatctttacaaacaatgtggtgtatgctggacatcactttcctcctagggctctggaattttggtatatgccaggcagagggtatcaatgtgaccaccccccagtaaaaacctcaggcaatgagtccctaatgaacttctcagatagacaacacttcacaaatgtcattacaacttatgcagaagttaagcacatcctacaggactcccctgggagacggctcctggtgcctgagccctgtttcctctgactcctgggagacggctcctggtgcctgagccctgtttcctctgactcccctgggagacggctcctggtgcctgagcccygtttcctctgactcccctgggagacggctcctggtgcctgagccccgtttcctctgactcctgggagayggctcctggtgcctgagccccgtttcctctgactcctgggagacggctcctggtgcctgagccccgtttcctgggtgcctgaggccccatgtgccttttccctttgctgacattgctgtgkattattcactgtaatgagtcttagccagagtgtgactgtgtgctgagtcctgtaacactgaatcacctcaggatgatcttggggacccttaacacatgcctggtccagtcttttgctttctttttttgagacagggtctcattctgtctggctagagtgtagtggtgtgatcacagctgactgcagcctcaacatcctaggctcaagtgagcctcccaactcagcctncctgagtagccaggaacacaggcacaggccaccacaccccagctaatgtttaaaatgtttcatggagacaggatctcgctatgttgtccaggctggtcttgaactcctggcctcga

SEQ ID NO: 1648 - DNA, 1113 bp, Homo sapiens
ggcacgagctgctcttaacctaaaactaaatacacaaaatgtggcgtcaaaaaaccctttacttcactttcctattaaatgtctcgtttagcctgtacttttccttttcgctttggtacttttttacaccatgcccccacccccatccccccacccctactctcgcgcttcccaacgccaccaagattgtcttgataagaactccaggttctcccacgaaccgttctgatactattaattaaaagcagtggcctcaggcagagggctcaggaagtagggagggcgcgggcccgcgcgcacaacttcagggaaaaggtctttatgatttcagcatccagagaccctatttctgaggacaactccgcacccatgtcctggtacatgaaaccatcaccaaacgcgaacgggaagtgtcctcttcctgcctaggtgctgctggggcgctgccactcctgctgaccgggttcagaacccgatttttcgcaaccgcggtggcacccacgccggagtccttacctccccgcgcgggctcaatcagtggggattaccgcccacccttaccccagtttacacgcaggaaggggggaaaaagggaagaaaattaaaagctcatgcagttctcctcccattcttttctagatttgggcacagctcggtgacaccttcaaagccactcgtatagaaaggaccgcgggcgggacgcggccaccggggctcaggttaaatttaatctatagctgagctactcgctcctccaactcacccagtggaccagtgtttgacccagggggcgaaacaacggataaagcagcctccgccagaatttcaaaaactccctggaggccactgaatgttttatgcatcagaagggaagtctgggattccggtcactgtggctaggaggggggagggctcggccagcagggtgagggtgggggcggaggcggtttcagccttaagccatccaggcctcgggtttatggcccggggctgcttctggccgcggctctctaccttgttgccccggcctctttcaaaaaagcagaggttttttgctccctggcgcagcccaaagcgagggcacagattgtcggagctctaaagctgccgact

SEQ ID NO: 1649 - DNA, 495 bp, Homo sapiens
ggcacgagcttgccttgtggcactggcagcagcagccaaccacagtggcagatgcagatgagaaatgtcaatggggctacagggatgtggagatgcaggggctattgggcccctgggcagaatgcaatctggtggctggctctcaaaatggtactgtgctgtagctgcttagggctcggggagttcatgagacccagcatgagctccctgtctggagcagtgccattatgaggtctctaggaagctcctcatgttagtctcagggcctgtgagggttgaggagcattcccattgataggattgcaggagtcttcaatggaaatatggaccactgggggtctctcatctttctccacattgagaaacctctctgcgctcccagctaatcctggctgaccacgatgcctggcttcctgtccttccttggccttggatgtttcctgtcacttctctgtttaatgcaaaaaaaaaaaaaaaaaaaaaaaaaaaaaaaaa

SEQ ID NO: 1650 - DNA, 1099 bp, Homo sapiens
gtccaaagaatctctggcttggagtaggcaagtatgatacaaggcagaaatgagcagtgggtctgaaaactgaggtgatcacttgaattcctatatgtgaaatgctgtgctccctgtcactttctctattactgtttgccaacagctcaacgcttaaccccaagtcataaaatgagggctttttttcacaacataatttgaggaaattatctggggagtatggccccagagaaaagctgttttatggcaagaaagagggaaaatgccagaaacagaaagacataggataaataaaatggtgtgcctaatccagagatgtctcaaaacacacaattgaaaggacgacatacggtttcagaagaaatatctctatgggggaaaaaaaagaagaagacttcacaaaatagttattatgattgaaagagagaccaaatttaggctatgatcaagattcagaacctccagagaaaacaaaaaatatatataggaaacgcataacccaaacataaactagatcagtgtagcacaactttaagcaatagaaaagagaatctatttgaccttcatcataaatcattcccctctgagtggcccaggggttgtgacattgggtccttggagaagaagatatgatttcagtatcctacatcaccctgtactaaataaaatgtatagagtcacagtaacattaatggtgcactgtgattttcaacttttactattagctaacgaacaaatgcagatgacttcattatggttgcatatcagaaattaaaatgttaacaaccttggtcaggcttggtggctcatgcctgtaatcccaacactttgggagggccgaggcaggtggatcacctgaggtcaggagttcgagaccagcctggccaacatggtgaaaccccatctctactaaaaatacaaaaattggccgggcatggcggtgggtgcctgtagtcccatcttgtcagaaggctgaggcacgagaatagcttgaacccaggaggcagaggttgtggtgagcagagatcgcaccactgcactccagcctgggcgacagtgggagactccgtctcaaaaaaaaaaaaaaaaaaaaaaaaaa

SEQ ID NO: 1651 - DNA, 670 bp, Homo sapiens
ggcagagaaaaaatggcagaatcatgcctgtacacagccacacacctgtggagcgccttgtgtacttgactttgttcttttctctgctgaagaaatgccatttaacaaattcaattacttcataagatcaaacacagccattcatcctatcttccctcccccaccaaaggaatgcattctctttgaaagctccagtggaaccaaggaaaaagtttacacccttctaagactacccccggcctactcagcaaggtcaacacctgggcctggcatgcagaccattcttcaatgtgactcagcttccccttccagacctccttgcccaagaggtcaagccccaggccgacacctcttctaacacacactgcttttacatttccattcggaaaggatgggcctttacatgcccatcccctctgggagaaccatcccataacgtcatgcagtgtgaaatgccacatcatccttacgtcctgtctcagctaccacttccctcaatagggctctcctctctccccagctggacgtaagcattttcgccttttgaactacctcttccccttgtgcgtgtctcttctcgtattctgcctactgcatttcttacacagttatgtgtatactcgtcttatccttgatccttgtctcccaccctctatcagagtacaggctc

SEQ ID NO: 1652 - DNA, 1360 bp, Homo sapiens
gctcgtgccgccagtgcttacacatagacggtgcattctctggaattcaccctgggtcagagccttctcacctcccagcacaagccagtagttaagcctcagtgtcccagttcggtgcactgggcaggagatgggtctcccaagaccactcagccatgtggttccttcagctctcagcacagccgagtccaggctgcaggctctccmtcrcaagccaactacagagtgacacatgttctctacacatgccgtgactgawtatgttgtgttctgaaaatatttgggagttaatttgtgttttgtgcctagtgcttcmyggaccggtgctcattgcatccttacagccatctacaagggtgtcaccattatttgtattttattagacttagagaggtgaagtgacttgctcaaaataatacggttagcaaatgactgaaccccgacccaacagggagaatgtgggaagaaatcaacaaagcttatttaacaggtatctgccaagggttggaaaaaataagatttattgytgctccactgagcagaacacagcccatcagaggttactgcaccttcaacgacatgtgcttttgactgacccatcaaaacactggtggcaagagcactaaataagttgcctatcatacttaatctttccaggattcaaagaggagtgtagagtgaaatgacctataagactcctgagcctaaaatataatctaatggactcagctttaaagcgctcattgagaggatggccaaaaaccagccgccacagtgcgaagcacgattcctccaccatccgcagtccactcgcacaaataccctcagtgaaacacttctttctctccacccacttttgagtaggatgaaatggcacattccattttcaaagtgggcagcttgcacgtatcagcagtgccaggaatttggaaaacgataacgtggaacccacagtaacttgctggctgaatttactcacccaggtgacccaggtcgatgagggcttcagagccacggggattttaaatgccgcttcaaagccaacaaggagcagaaccagtgctgattcgtgtttatgataatgacatttgaaaggctaaaaattacaaagttgtttacagagatggacttagaaaataattgtatctaatgtctcataaacataaaagaaagttattttgtggtagatgattgaaaagaaaaaatctcctttaaaaaggaaataaatatactagtttyagacagaaacaacttcaaaggcaatcagaaaattcagtggaattttaaagagggartctcactcaaagaattctctaaaattgcctaaacttaaaagcattatttttctcgagggggccgg

SEQ ID NO: 1653 - DNA, 840 bp, Homo sapiens
ggcacgaggcacgtgtttgcctgtgttcatgtttgcctgagtgcatgtgtgtttgcctgtgtgcctgtttgcctgcgtgcgtatgtacacgtttgcctgtgtgcacgtctgcacgtgtgtttgcctgtgtgcatatttgtctgtgtgtgtgcacatctgcatgtacatgggtcctgtcattgctgcccgtctcctcccgagagctttctctgcacgttggccctgcctttgcagcttctgccagccccgtggcgccgagtggccttcttcccagccccagtgggcgcagtggggtgggccgtcctctgagggcacccgagctgctgcatctcccgtcttcccgcatgcagtcctcagggcacctgtccatgagccccattcacaggagcagtccccaaggcacctgtcccacctgggccacccttggccctgcgtccgtagccagagcttggagggctttgtccaccaggcctgggaccctgggatccttcctcagagtcccccggcgtgggggcagtgtggagggtggcgcgggtggagggtggcccgggtggcggggtgaattcctggggagagcctgccccctggcggccacctgggagaatgcagggaacatggctgagcagcgtcggctgtggagggagggcaggggcaggggtcagggctgcaggcgtgtccctggggctgatagcggtgggatggggtctggccagtggagggtccatggggtctcctagcaaacgcagtggcgctccttaaatgacggtgccaggcggggctgttctccttggttggcctctgtgtcccttcaggctcccaaggcccctcctcacatcctcc

SEQ ID NO: 1654 - DNA, 1590 bp, Homo sapiens
gatttttgtttgtttgtctcttttgaccacctctataactcttatggatattcatcaaattctgtatcaaagaatttaagatttagtcagtaaaatatagctatgatatgacacagcacgattctgtgtaaagccagcaaactaaccagcagcctcagaaattttatggttctttctattgacagtctaaggtcctccctggttaccatttccccaaaagaacaatgaggaatttggaggttatgcattctcgcagtctggggatctgtgatagtcactctgttaggtgtttttgagccaccaggttcctcatagcagctttcaaatctttgttcctcgggctgtagatgatggggttgagaatgggggtcaccactccatagaaaatggagatgagtttgtctgcaaggtcctgtttgtctgctcccattgggtccttagacttgggcttcccatacatgaagaggatcatcccatagaagacgatcacgacagtgaggtgggcagagcaggtggagaaggcctttttcctcccctcagctgaggggattctcaggatggtggcaatgatgaagacatatgagacaaaaataaacaggactgggagtgcaaggaagatcatgttggtcacaaccatgctgatcacgttgatgcagatgtcagcacaggccaactttagaactgccaggatctcacaggtgaagtgattgatgacattgtccccacagaagggcagtcacattgctagggatatctgtactacagagttggtgataccagctgcccaggagccaacagccatgggcatgtaggcagccttgctcatgaccacagggtacctaagggggttgcacatgtccaggtagtgatcaaaagccatcatgctcaggagaacacactctgtggctcccatggcaaaggagaggaacatctgtactgcacaggctgagaaggagatggttttcctgggggtcaggaagctgtcaaggatgaggaggttgtatagcagatgtccaggaaggagaggttccccaggaagaagtacatgggtgtgtgcaggcgggagtcaaggatggtcaccaggatgaggaccccgttgcccagcaggatcaccaggtacaccagcaggatgaacacaaagaatgtcttctccagctatgggtgggcagagaggcccaggagaacgaaccccaacacaggggaggcctcattggacctgttcatggtgcatctgctctgtcacctggaggaactcagaggtcaacctcagcatcctcttactccaaaagtacctggaaggccaggcacaaatccttgccctgctgagcaactggagaatagcgctgatgatttgttcatctctatggggttctaggaacaatgtagtacaggtcaatatttaacttctgcttctggtaagaacaaacaggctaatttggactaactgtcttgcagatgaccattagacaaactggaaaaaatacataaaacattggagaagtaataagacaatgaggaacatagggttatgactctggggaaaaacaaggacctagagatgtaagtctagcacttgtggctgtgattcaa

SEQ ID NO: 1655 - DNA, 177 bp, Homo sapiens
ggcacgagtgggctgtgtacgtgtttgtgccatttttatgactgggaaaatgacagtgatgatgaggattcctagttctattgttactaataccgctatggagtctgaagtgccaggttttaaaacccaggtgtatcgctcattagctgtgtgaccttgagcaagatcttcaacctc

SEQ ID NO: 1656 - DNA, 1014 bp, Homo sapiens
  SITE (930): n equals a,t,g, or c
  SITE (949): n equals a,t,g, or c
agggataacctgtcatctacatttgaaaattaatgaacaattctcgttacatagataatatttttcagtgacagtcgtatttttttctgtgggagggtgcacatttatattcatgaaattttagtttccagctttgaactggcacccttgttaaaaattctgatttttttttttttttaaactctggggattttacttaacaggttctgaaaggcttggaggctataacattctcacattggaaattccttactaggaattacttagtttgaacttagaatgatgatgaacttttgggacttaaatatactataacttttgtcactaggatcaggaatattcagagtgtgaagtcaagtgagtggtgtaatcaaagagtctgaaaagaaccatgagacatcatgtagcagtcttgcctttaggcagtaatgtattaaagctactttgcttattctttgaaaggaacatctctagagaagttccaaagtcatccttggtgatatctttcaatgatgcagaaatcttagtcaagaaattaggaagtcttccctaaatatacattctgaatccttcctgatgtgatagtttatttgccccttttcatgctcttactagcaataagagtaagccgctcaaatgtcactcatcttttcatatctctgaataatgtgtttcctttcttttttaatttaaaggatgttcactaaacaaagttttggggaacaccagaaaagtagaaagaacaaaaaagataatacccactggtattgcactatccaaatatgtaatcactgctaacaattcctgtgcatttttaaaacttacaggcgcgagcactgcgcctggccacattttcatattactatggtatcctttctcaaggactcatggtaccctgtccacttttatcttattaaagggaaattgtgntaatataatggacgtctgnttttgcatgttgaagtggtcacatatgcctgtaatgtggtgctagtgtttctgtcccaaacagtg

SEQ ID NO: 1657 - DNA, 1270 bp, Homo sapiens
  SITE (155): n equals a,t,g, or c
  SITE (752): n equals a,t,g, or c
  SITE (767): n equals a,t,g, or c
  SITE (835): n equals a,t,g, or c
ggcacgagaaaaatcagaaaagaaaattaaaattccccaccaatgataacagccattggtatttttacatgcatccttctgagttttattagtcccatgtatatataaagaaaagttggaatgtactttacagccagctttatatgctgcttttntctctagctcttataaatgcttatttataagcattttctcaacataaattacttttgaaggtttcatttgatggccacgatatgccatcacaattatttttcagtcataatttatgtagctgatcttcattgttacacacatggatgttccccaccatgtggctgccataaatgattctccgatgaccaactctacacatagatccttgtcttcatctctgattatttccttatgatagatttctggtctcatcaggtcaaaggatatgggcatttttaaggctttgatatgtgttatgaaattgccctcctgcaaaggtggcctgggttccactccccatgaaggctcaacaggtttctgaggcctccctcacacctccttcagcatcttctctctcactttcctgcctcagcctcttctccctgggttcccttgtgaaacacaatagtaaaggattatattatcaaatatttaattatgtatgtatctgaaaatattttaaaagtcaacataattactctatttccattagtttgatttgcagcaaattatgcatttagtgtgaagttggaggtgcyttgctggttggagygcanatagcgkttggctgnctacaatggggcgggcgctggtgacaacagctcaggctggtaaagccgtatcaggtccttgcagaggnagggcttcctcccagctggggagcctcagtaccttggagctctgaaatcacaccaacaccacaaatgaccctggggactgggtgtcttagttatctattcttgcataacaaacaaccccaaaacttgtggttgctgaaaacaataaatatttactgtctcacagcttctgtgggagctctccatccgtggccagcagctcaggctcaggatctcccaagaagctgcaatcaaggtggccccatggccgcagtcaactcaggcttgactcagggagaaagtatctgcctccaaccttactcacacgatctctccaaagggctgcttcaggacgtgacagctggcttctccctgagcagacaattccagagaagcactcaggtcggcacgcaaggttttcccatccttttggcatagaagttagagcccagctcgag

SEQ ID NO: 1658 - DNA, 1100 bp, Homo sapiens
ggcacgagattacataaaaacaaacaattctcccaccatattttcagtacagctccgctaatgaacatcctcaaatcataccagacactctgtatttatttttctgatgtacttccctataatctgtttcagattatttttatttacagaaatgattttttccaagattgggaccaccaagaaactacagatgcagacatacgtcatatcactcctctagtcctgaatttataatattatttaactcagtttttctttttacctgagaacaaataaacaaaaataacaaacaccatctcccaccaaaataatacaaacagcaatgaaaaacttttctaagtagctgtgagtcaaaaaggtgaaatttcattgagctgcaaaactaatccagcagttttaggatatgttcacgttttggtaatttagatgactatttctacatttccctatgatccaggataccaagggacctgctgcctgagacgttgagatttagagggctttttctctgttacaatgactcagagcaaatggagagagtgtccatttttcatggatgatgatgcttgtaaattttcattcatatctttgataactgatgtacttagcaacttccagataacattggttagagttagctctgcttattttggttctaatttagaaggaagacagagaaaatactcattctaagtacctactttttgtcagtaactatggtagctactttatgcactttgtgtccatcagggttttccagagaaacagaaataataggatacacacacaaacacacacacacacacacacacacaggtttcacatccatagattcaactaacaggctctaaaaaaattcaaaaaaaaaaattctacaaatttccaaaaggcaaaacttgaatttgtcatgtgctaaatatcacacaaaagaaataacatgtaggcatggtattcaattgaataattaatctggatgggtgtggtacttcacgcttataatcccagtacttatggagtccaggcagaaggtctgcctgagcccaggagtttgagagcagcctgggcaacagggagagactgggtctctgaaaaaaaaaaaa

SEQ ID NO: 1659 - DNA, 1473 bp, Homo sapiens
gccacgaggggaggttggctcttccgggccatcccggcctctgtggagcatggccgggtctatgtgggcaatgttgcctggatgcacgtgctggcagcccgggagctggagcagcgggcagccctgatgggcggccaggtatacttctgctacgatggatcaccctacaggagctacgaggatttcaacatggagttcctgggcccctgcggactgcggctggtgggcgcccgcccattgctgccctactggctgctggtgttcctggctgccctcaatgccctgctgcagtggctgctgcggccactggtgctctacgcacccctgctgaacccctacacgctggccgtggccaacaccaccttcaccgtcagcaccgacaaggctcagcgccatttcggctatgagcccctgttctcgtgggaggatagccggacccgcaccattctctgggtacaggccgctacgggttcagcccagtgacggtggggctggggcctggaggcccagatacagcacatccacccaggtcccgagccctcacaccctggacgggaagggacagctgcattccagagcaggaggcagggctctggggccagaatggctgtccttgtcgtagagccctccacattttctttttcttttttgagacagggtcttgctctgtcacccagactggagtgcagtggtgtgatcatagctcactgcaccctcaacctcctgggttcaagcaatcctcctgcctcagcctcctgaacagctgggaccacaggtgcacgccaccacacctggctttttttttgttgtttttagagacagggtctcactatattgctcaggctggtcttgaactcctgggctcaagtgatcttcccacgtgggcctcccaaaacgctggaactacaagtgtgagccaccgcgcctggcccaagccctccacattttcaatccaggagccttgagtctgtgttgtgtcctgacacctccaagttctagggccgtcaggacacgggagggtttggggacagagtgtccttcctctgtcctctcatcccagtcctgatggccgcttggtgagtgtctggtgccctggtggcctgccccagctctcttctggctttctgagcaggaagcgagcagaggctccacaggcttacgctgctctcctgacagccacacgcgaccctcggtgcagagtgcagaggcggctctggttcctccagccacctcagtccctctttgggaggtgatgttcccattgtttttcaaaggcctcaccttcaactgtctgtcttagaattcccctctggagggctatggcctccctatgctttcacttcccacctctctacctaagttccttcccagcacatcgccagccctgggcctggggatgtccccaatgctgtacctggctgaccccggattaaaagcctcatccacgaccgtgaaaaaaaaaaaaaaaaaaaa

SEQ ID NO: 1660 - DNA, 1291 bp, Homo sapiens
ttcggcacgagctcaaacacattacgtggaatgaggggggagtgtatgaaggaatcattagcaacagattagagtccccaccaaagaaaaagaaacaagactcaagggctttttgagctgccacctctccccagagagggctcagaaaaaagatggcctggactctgctgggcagggtggtgggtcatcacccatgaatcaaggacatgaactaacctatatacacctatgccagcattgcagctttggcatttctgggtatgagggatgcaggagcagcaagcttgatgcaaggggacttaggaacgggcctctaaacaaagcttctctggtaagcacaggatcttcccttaaattacgtgcctattaaggggtttaggatgccccgcccaagctgtggcttggttcttcttctatacacacacatacattcttaaattctcacatatttatagccctcacatataaacacagtgtctgaaacacaacataagcctttgcaaaaatatgcactagatagggaaggcctggaggatgcccaggcatgaaagtgtccacttctcagaggaacatggctttgggtcactgtcatttgcacctgcactgcattttcctttctctcatctacatgcagaatgcttcatattcaagggaggtgccacacccagtcagctgagctgtttacacgtagtgggctagcttgctcatgcttacctgctgtgtcttctgttcatcagttctttctactttgttttacagtccattcgtggaactctagctttcaattattgtttcataaatacaggcaggtaggacaaaaatgtggctgaatcattgcaaaatcaaaatattttctgggagaaaaaaatcatagcacttcttctactgacaagtcagaaacttcatgctctcatctatgtgcccatctgtgcatattcctccattttgtacctgtccatgcattcttcttacctctgacaggaaatttccacattctactcttgaatcctccttaatttagtacctgcagaatgtgcctaacagatgcttgataccctaaattacagtcagataaggcaggatgttaggggtccatgattctttggggagattttttgcaagtacatcttccttcctacaaaaggtaaaaaaaaaaaaaagcacccacagcgttcaagttgaaataactccagcccaatttttatgactccttctctgtacttccaatactcccttcctacaaaaaaaaaaaaaaaaaaaaaaaaaactcgagggggggcccggtacccaa

SEQ ID NO: 1661 - DNA, 582 bp, Homo sapiens
  SITE (297): n equals a,t,g, or c
  SITE (335): n equals a,t,g, or c
ggcacgaggcggcggtggctgcggcggggcgcccgggtgctcggtggcctccgagtacttggtgaaaaccagcggcacagcgatgtccgctttgtccaactggttccagaagcgggcgatgcagcaggccctcgtgatgcacggccacgccatgatgctagctgaaaagccggcctcctctttcttcttgtggttctaaagcaagtctctataatcttccttcagcctccgatcctgacggccaatgtggttcccaccgttttctacccccgatcagccggagctagttcgccctcntccctcagcgagcacccggggagactgtcctaggagantctgtagagtccctcgattaccggtcgcaaacgcctttgggagcgcagtgtgmtgcgagcgccgaagggtgagacgcacggcgttcccgagtccccggcgagggtgtctgggacgcgcccctccctacggctgcggcggcgcacagacctcggtcgagcgaggcgacgtgaggagaggtggctacaggcttaagccatggcgcagaggaggggccgggcggtgtggccgcagggtccgcggaccggg

SEQ ID NO: 1662 - DNA, 1219 bp, Homo sapiens
  SITE (888): n equals a,t,g, or c
  SITE (889): n equals a,t,g, or c
ggcacgagcatgaagatgcaaaactatgagctgatttcatattttaaatgcaagttagcaaaatttaccttctacaattatttgacaagaatttaaagtgcaattgacaaacctttcagaaaaaagctgggaattgggcctttggggtaaggttgccatatttagctaattaaacatacaagtttcccagttaaatttgaatttcagataaatgatgtacaatatttgggacacacttatacaaaaaatgctcattgtttatctgaaattccaatttaactgtgcatctgtattttgcctgggcatcctactttggggtacttcgaggtccctggctagctcctggtctatgtcttagtccatgctcagaagtcccatgtattcaaccagctgcttcttcctccattccagtggttcttttacaggtaggtgaggtcttaaagaatcttttgaaacttttgagccattccccaggagaatatctacatacaaaatttggcatctccagggtatgtgggtcccacgtgagccccaccccacaatggtcggacccaaggactcctcccacagtccatggcactgtgcagatggccagctacgaggaagtgagcatgttggactttgaggagttcaaccagactatgaaacagcaaaatcacaagaccttttttgccttctttgccagttccaaggacattggaggtaacagatatagccccaatggcatgcgggccaaaccagttgtagagacgggctgaagcatgttcgggaagaatgtgcattcatctactgccaagtaggagaaaagccttattggaaagatccaaataatgtcttcaggaaaaatttgaaaggagctgcagtgcttaaccatggaacccaggaaannctgatagaatctgagtgtcttcaggccagcataatggaaatgttctctgaagattaagatttgatgatggcagtcatgccttgatttcctgctctgttctggtaaactgcatacttggtttgaattcttgttagcaataaataaataaatgatgatgggctgggcacagtggctcccgcctgtaatcccagcactttgggaggtcaaggcgggaggatcacttgagcccaggaggtcgagaacagcctgggcaatgtggtgaaaccttgcctctacaaaaatatttaaaaattagccaagcgtggtggtgcatgcctatagtcccagcta

SEQ ID NO: 1663 - DNA, 1543 bp, Homo sapiens
ggcacgagtgtaactgtataatattgacaatcgaacaaacagcttcaatcatgtctattcatatctccaggcaaagttttgttcttcttcctttattttacaaatgtattgcttcaaaggacacatacttttgtggataaacaatttccactagaagaagaacaggaaaggtagctatttaatatatgcagttagagccatgaggtatggatcatagtaaataatattttgcaatgatactagcactaataaagatgatgacatttgcatgattagctatgtttttagtaaaggaaaattaatggataggaatatttagcttgaaggatacatacaacatgctgacaaacaaaactgagtttcagcataaaaatggatatattacacagagagtatacataggctcctaatgtctctgtgtgcatttgtatgcatattattcatctagtattttctttttacttccaagttggaatgcatttacttcatatcttattataagcccatttggtaacacttctgtcagatttcagttgcatattcactgttgaataaatcagtggttaataaatgtccttggaaatgtgtttagagataaataatgaactgctgtatctgatcattaagtgtacatcaagctcacatttttactctcagaatcctaaaaggaagatagcatgacctactatatatgtacatggaaaaaagggaaataattatagagaaaacatgtaaaaggagcctggtttattactcttaaatgggtacatgatagatcaaaataaatgttattacaactgatcaaaaaatcctactgcaaaggaaataataaataaagatggagagtcaacctgtccatcataagtgctttttgttacaaagccaaggacttggagtgtggacccaaccccacagcatgcaaaaccgtggggctctcaggattccaagcctagcatccccaccctctcataggcgcttcggagctgaccgcaggcacacttttaatttgtggcaagatggtctgacaaacagcttgggaggacagcacaggtgaaaatacagatcaagtgcagataaaaatatgttcaccttgaaaaatacaaacaagacttttaggtaataatgcacagggaaatcctatcaaaaaatgagaagaatagaaccactgctttctcattaacaattttcacaatcccttttagcttgtattccaacttctgtccataatccaatatctgcatactccttacatctatacttaaataatatagatttttgtcccctgtacatatcttataaatgtcaatccatcccacctcaaagtttcttggtattcagcaagttttttaaaaagtcaatcatgtaggagatcctttagcaatacttcaaggtatcatccctataaaaagtgaagagggatctgaggtcctaaaaagaaaaataatgacagagaatggctgtaatttcatatgttcctgatggaaatctcactgctcagaaaaaaaaaagaacacatatgccaaaataaaaaaaaaaaaaaaga

SEQ ID NO: 1664 - DNA, 817 bp, Homo sapiens
gcttctaggcctgcggaatgcacctctgctgggctggggctctgagttttgtgttttgggccaacctgatcctcatatatctatttggaaccagcgagtctccccagaatattttatcaagttattttgagttaggagtttaatagacatagaagcctttaaggagagtgagtaaatgaagttggcaaggggagtaggcaggggagagaggaggaaatcccaggctaagttttggaagagggcttgattatgttggtgacagcaggctgcatcttccaggacaggaatccccccgtggtttacaaaacacttccccttacataatcctatttaattcacacgacaagcccaagagttagggarggttcattgccttattagcctgtgtttacagatggtgaaactgaggctcagagaggtgctgagatcacacagcaggatcatgcagcagaccacgggcagggctgggattccggaccaagcttggcattcttttcctggcaccacagtattccctgcaagccctctgtgttttccactcctgagttagatgtcactggtggtgctgtagagggggctgctggagcactgtccttcatgtgaaagggggttccctttgccctttttgggtgcccacccacaagcttctctgtgctctgcttcccttcgctctccaagatgctaccttagagctactggagccactttgttcaggcagagggctgtacgtgccctagggctgatgtgcccctggaaaggtttgcagctaaggactgcctggagcagggatatgaaagcccagctttcttggctcgag

SEQ ID NO: 1665 - DNA, 829 bp, Homo sapiens
ggcacgagaaggcaggggccttgaatgaacaaacgaacctgactaggggctacatgaaagccatactgtgcttcctcctccttctcatgaatccctttcctcccttctcttttccatcccccatagatcagaaatgtgaaggcggttaggaaatgtccagactccaaacagaaaaaactgtgatcctcagcagacacaagacataatattggattatttccagcttcatcctgggaaaaatataggagactgaagggaaacaggaaaataagtaaacacccatagaaaaataaaatgtaagataaaaactgaaatgtaagaactatcacatggtgagtgtctatattcactcataatagagtaactacaaaatcataagtttgatatttaatcctaatgggggtgaataatttttttaaatgttgctactgtcgtgataaaacaaattagctacatactgacaaagtaaaagcgtgttttctaaaattgaaataattctcaaaataacagtttagaaaggctgcacattttacaggaaatgggttgaacatcacatgatttactcattaaggagataattattgagcgcctaaatgaggaaaaaagatttatagattttaaacaagcatccaattaactaaatattactgagtaaaagaaaaacaagttaatgatacttttgtaccaattttattataaaatgtacgtgaagaaaggctattttgtcaaactgtttttccgtatcatgtcatattttatatttacagcaacatcctgaaataggaatttctgaggatatgcttcccatttgagagatgaaaacctcgag

SEQ ID NO: 1666 - DNA, 783 bp, Homo sapiens
  SITE (743): n equals a,t,g, or c
  SITE (752): n equals a,t,g, or c
aaaacttggagctccaccgcggtggccggctgctctagaactagtggatcccccgggctgcaggaattcggcacgaggaggcaccgcaaagatgcaagaagtcacccggagtacaaggacaggacgccaggctttcagggggacgttgaggcagtcaaaggaaaaaaatggcaaggcagaagaggaggctgtggtactccaccggaggccagtgccttccatgcatcccctgccccgggcctgggggttggtcgttgggtccctggctttcacccagggtgcgtgtctctctcatggggggcagcccaaagtgggaagaagtcccctgggggattgggataagatgccaagctttcagagaaacgttgaggcatctcggaaaaaaaaagcagtgaggccagaggagtctggggtcctccaccagaggccagtgccttctgggcagcccctgcgttgggccttgggtggttgtggagtccctggctttcaccaagggtgcgtgtgtctcccacggggggcatccaaaaggggcaagaagtccactgggggatggggacaagatgtcaggctttcagggggacattgtggcagcccaaggaaaaaagtgacgaggctgaaraggaarctcggatcttccgytgraggccagtgccttccgggcagcctttgcgccaaktcraggggggcccgyacccaattcgccctaaagggagcggattacaatttaattggccgccgttttnaaaacgtcnggacttggaaaaacccctggggttacccaaa

SEQ ID NO: 1667 - DNA, 578 bp, Homo sapiens
ggcacgagctcataacaaaggccagaactgttagaaacacacatacctccccacacacccaaaacctgaacatgtcatcttcctacttacaacccttccatggcttcctactgtggttggattaagaccaagacccttgcgtggcttataaggtctgcaggttttggctctgccaacctgtctagcctcctggccctctcaatcagcttgctgtttccctcatttgttacacaagtttcatttttaaaaatgcatcatgggctgtttcctcctcctggaacattcttccctccctttcccctgacctgtcaatttctattatccttcatttccctgcttaaatgtcactgtttttgaggaagccttcaaatccccagattaggtcagaatcccctaacacactcactcttttcgcaccccatacttaatttttgtattatttttctccaagtgaacttaaataaccatataactgattaaaattgttctcccctgccagaacaagacccatgaggacaggagacccttttgtcatggcttctgtagcacccggcatagtgcttggaatagaggagaca

SEQ ID NO: 1668 - DNA, 1142 bp, Homo sapiens
  SITE (954): n equals a,t,g, or c
ggcacgagcatagatatcattccaatttttcctgttgcaagtaacagaaaaccagaccccatctggctgaagccartaagagaaaagactaacaggagggccagcctcaggactcaaatacgtcaccaggacatgggttgcgtcccagtctcagctctgccagttcctgtagaaccctccttccaaggttcacagggtggctaccatagcttcaggccctcacctcatgataagacagcaatacaackgccatttcatgtctgttgctgtttctacattcagttagaattaaataaattttccagtagcacccacaaaaatactgagtccacctggttggcctacctagatatatcgccagccctgatcaagtcactggtcacgggcctggattttctggttcgcttaggctaatcatacgtcccatcccaggactgaagaagtaccagggctgttgctggagagtggctaatgtcccctttacaaataaggagctcattgtttaggaagatgagcttgccaaaaatcacacacttgtaaaataagtcaaaatttgaacttaagtctacttatctgagcccaaagtcttacaaccatttatggctgttatcctaacacctacgtcgcggaacggaagagtcctaagactgcaaagacccttccttttcttctagatccagtctaagttggttggtaatttctttagaccctgctttcagggaagtttaaaaaaaattacttgcatttgtatattttccttgtattttcggccaaatttcttctaattaaagtacaacataagttgaaccaacacaataattgtcatattaagaaaagataaaacaaactttactcatttctgcttctgggcatggagtgtgagggaccagacttaagttctcaaacaactacaaaatcagaccaaaaaatacaatggtttccaggcaccggacnacaggcagtgcagggctgtgatccttaagagaagggaagcagcgagccagagtatccaggccacaacccaaatggaggccaagagaggaacagcagaggatacagagggagggttccaggggccaagacgcaatccgaggggaagcccttccggggagagctggagtcctggggtggccttctcgagg

SEQ ID NO: 1669 - DNA, 2478 bp, Homo sapiens
  SITE (591): n equals a,t,g, or c
  SITE (599): n equals a,t,g, or c
  SITE (1252): n equals a,t,g, or c
  SITE (1272): n equals a,t,g, or c
  SITE (1275): n equals a,t,g, or c
  SITE (1402): n equals a,t,g, or c
  SITE (1480): n equals a,t,g, or c
ggcacgagtgacctttcaaaagttgatgaataataaaaaacaattcatatgttctctctgtctcttatactgtactttgtttcacaaatatttccacagttttcctggctcaatcattttaattgcaaaggcaagatttatatatcataaattattacattaagcagtagaaatcagaaatactgaggtgggaaatatgaactatccttgcataggaacagctggaataacctggtccaaaaatgtaataataaaaacaacaaccaaacatactgctctactgataattcagatttttttaagaaatctaatttttaagaaaaatcttgttcaacttgccagaagacaaaaatgatttgaaggttttaaaaagtgttcggttcattactggatttgagctggactcaatgtatctctactattattgttaaagcagaattatgtttaccacaaaactaaacagtttgcatgaccaataatgatttttaaaaaatgtttagctatgaaactcttatgtggttgtctcttgatatctagagaaagagaagggaaaaaattatatttatcaatgttgagacattagtttcattntacctaanaaaaatttaaaagaaaaacagttacataggaattgttaaggagtttgtagaacactcactcccttcatatgcattgtagttgggtatcacttaaacatctcaactaagctggatttctactacagcggtctcctaagtcaatcaggaaaatgttagtttttttggttgctttaaatgaatgaatttctcctagcaaatagaagcaatatgattttaataaacagtgatgaagactctgggaaacccttacaatgtagggtaataacatctttctattaaaaacaataatgttataaacatttcaacatccaaatgatgggacatttcacatactcatgccttttgattattttcaaagatgcttcattacctaactcattcttgtcacagaattcttgtagctaaaagcaaaaatagactcaaattgaaagatttttaaaagataactacttggcagcaattataggtgtatatacccttgaagatacaaagacttaataataacacctgaagaatatttccctgccccctyccacacacacacacacacacacacacacacacacacacaaatactagggaagtgtgctcctcctcagatcctccagctgtgggcttcctaattaaaaggctgasctgtttcctgctcaaancmcttcaaaagcctttttgntgntctccacttgcatatagttcgcagcacttgtccttcttacctgtccattcttatttatagagagctttcttgaatcagaaacccaagaagtgatgcagagmccattttattttataaagttgaaggncaataatatttatgttaaaaaaaaatccaagtagctgaattagcaactcagtaattttgctagactggcaaaaaggancaatgcatgtggcatagtttttaaaacataaatttttatagcataatttaaaaacagtatttattactggctgatttttaaaataaatgggtattttcacttgctgtaaatgtgacatgttaaaatctatttttaaaaaaatactgagtttgatattcatgtttaaagttggagactgttgtaaaagtctgcctctgaatttgatatcttagacaaggaatatttaccttggtacaaatcaaatggatgagagatctaaacataaaatagtcaacagaatcgtcttttgtggattcaaaatagaaacggtwcaagtrgcaaacactgacaaatwgccctttttaaaagcccaatctwaaaatcgacgtccacaaaagctttcttttccaagtatttgcctataaagttatttcaacacggctctgacaaatgcctgtgtgtcctgtcccatagggaaaggtgtgaacgcataacgttttgctctttgcaaaaaagggtcgttaattgkccgagagcasccaccgtttagggatgaagggagattaagtgatttttggccaatgcatctgccaattcccttcagggtagtcaagaatgggggccggcagccmtgctgcagttggaaggtctgtccaaaaaaggccgttttggagaaagagggagagactgcgagtggccgactgcgcccccctcccagccctccggcccgggcgcctgagccgccgctcacctcggtgtcattgttraggttccagaggtccaagcgccccatcccgtccacgcaggcaaaaarcscargatgcacgggggaccacatgacatcgtacacatagtctgcattgtcttcaaaggagtagagcggcttgttgtgctgtaaagcagagagaccgtgaagactttgtggcgctgctgctgcctcgggctgtctagagagcctaattaaaaactttgcacattcacaaagtgtcataaaacttcccgagatgaaagtcctcgag

SEQ ID NO: 1670 - DNA, 1092 bp, Homo sapiens
ctgcaggaattcggcacgaggttcatttcacttttcagaaaggagctggctatcaccttgatttgctcatggttggcgttatgttgggagtttgctctgtcatgggacttccatggtttgtggctgcaacagtgttgtcaataagtcatgtcaacagcttaaaagttgaatctgaatgttctgctccaggggaacaacccaagtttttgggaattcgtgaacagcgggttacagggctaatgatttttattctaatgggcctctctgtgttcatgacttcagtcctaaaggtaaaatttctttattgccgtgttttacaatcttattataacatttatacttagttatgtgaacatgaaacattaaaatatacttaaaatacctaaaattaggtttgttttccacagtttactttggaaataatttcattaggtttttagtatagcaagcatttcagtggtaagctgtatatatttttaaaataatgtataccaggtgtagtggcttacgccwgtaatcccagcamttcgggaggctgwkgcgggyagakcacttgcgsccataagttcgagaccaacctggctaacatagcgaaaccatcatctctaccaaaaacacaaaaattagctgggcatggtggcacgtgcctgtagtcccagctactcgggaggctgaggccaagaatcatttgaacccaggaggcagaggttgcagtgagccaagatcatgtcactgcactccagcctgggtgatggagtgagactctgtctcaaaagaaaaaagaaaaaaaaatgctaggaaaaagaaataagaatgggaaaagctcatgaaaattaaatctataaatatcaaaataactaaaattttgtagtaataattttcataagactgaagaccaatataatgatatgaaaaaaggagaaaattttctttaatagcaagggggaggagggataagaatattagaacaaatccaaaaggtctgagatctgtttagctggagttgaagaaatttgtaacagagacaacagacgaaaagggaagtaaacaggggaagaaaattctcacagcagaaggcacaggtttctcgag

SEQ ID NO: 1671 - DNA, 846 bp, Homo sapiens
  SITE (22): n equals a,t,g, or c
  SITE (823): n equals a,t,g, or c
gatcactataaaaaaagcaggnacgcctgcaggtaccggtccggaattcccgggtcgacccacgcgtccgacggctgcgagaagacgacagaagggtacggctgcgagaagacgacagaagggggagaccggaagtgagtgatcgaaagcatggcgtcggtggtgttggcgctgaggacccggacagccgttacatccttgctaagccccactccggctacagctcttgctgtcagatacgcatccaagaagtcgggtggtagctccaaaaacctcggtggaaagtcatcaggcagacgccaaggcattaagaaaatggaaggtcactatgttcatgctgggaacatcattgcaacacagcgccatttccgctggcacccaggtgcccatgtgggtgttgggaagaataaatgtctgtatgccctggaagaggggatagtccgctacactaaggaggtctacgtgcctcatcccagaaacacggaggctgtggatctgatcaccaggctgcccaagggtgctgtgctctacaagacttttgtccacgtggttcctgccaagcctgagggcaccttcaaactggtagctatgctttgatgtcctgttgaggccatcggacagagactggagcccaggtgacaggagatggtgataccagaagtcaagggttggggtggcgacacggcctcccgaggaagaggtctgcttgatggtgactctgcaggagactctgaagtgactgctgggaaaccctttgggagacctgacctggggccaaaaataaagtgagccagcgtcatgaacgcatgctatttagggacanaaaaaaaaaaaaaaaaaactcga

SEQ ID NO: 1672 - DNA, 630 bp, Homo sapiens
ggggctgcatttcatctggaggctctactggggaaaactccccttgcaaactcactcaggctgttggcagaattcatctctttgtggctgcatggctcagggccacagttttttttgctggctggtggctgaaagctacctgaatttcctgactctgtgggcttttttaatgtgcccagtagcttcttcagtgaggagaatttctctagttcatgccagcaagacagtgtcatgtatatacatgtatgtgtgtctgtacatgggtatgtgtgcctgtgtgtgtgtgtggtatcctagtcacctttgccatcttttcttggttagaagtcagaggtccttcacacactcaaaggcaagagttgatgcaggtgtgaatcccggtgccaccgttggtctgtctgcaacaccagcttccatgcttggatcacacctcggatgcacacgcttgaagatcatgtgccacagaagctcatttgccaaccctttcaccaactctggtccatgcactcggcagccttcaggccacccttgaaggttccacagagcctccacagacaggggagtccctgaaagtaaaaatacctcatggaccagacaccccccaaaacaaagcaaagccactgcctcgag

SEQ ID NO: 1673 - DNA, 2521 bp, Homo sapiens
cttgcccaaggttatgtgtctattaaatggctgcgtctgtaaaattaaaatgctaactgtggccaccctgcttctctcactccccctagggctgctgtgatgagagcaaacacacccacaatgctggccacacagtaggatgtaataaatcgtggctattattactactttttaatacacacaatagccacagccagtctggaaggctgtagtggcaatggcccgagggcaaaaatccttggggccccttcttgcttggtctctcacttcaaaggctatgcacagtcagtcacaggaaacagaatcagagaaggactcacaacatcctggaggacgtgatgcctccaggacacaacagaggaccgtgcaccccagaatcaactactttgcctcatctgaccttccaaatagtcccaaacagaagggagcaggagatgatggccattggagagaagcctccagggctgaatggccccatgaatgggatgttgattctggaccagaatcaggccttgtttctgtgctcccattgggccccagtggcacagaccagcccttgtatgctctccacggctgggctggaataggcttttgatttcttcccactcctggctggaggacttgccggttaagctctgtggagtgtttactttttcaacaatggcagcaggctgaagaataggaaaaaacctggcccctttttctaacttagcaggccagggtccccttagtaaccaaaatgccccgagcaccagtctccaggcaggagctgggacggcacagtttcctcttgaaggacaatgctgccctcctggtggcaaggcctcttccaaaagggctggcgtggactcaagggccttcctgaagctcactgttcccaaggaaagaattggagcccagctcgctggacagtgcccggtcccccaaaggatcaaggcaactaggggaatgaagaaaggcaagaaaaactcaaactgggggtggggacaggaagcgcggatgagaagaaagccagaccgtcgccaggtgccggtgcctctcatcttaaccatgccatcagtcagggacactagcatctctgcatgggaaccaagtgggggcgcagagaggtcaaacaagctgcccaaagtcagagctaggaagcagcagtcaacttttgaacacagtcttattgcgggatctggccagcagcccgcaatgcaacggggctctctctttgttcccaggtggatcggcaggttgagaaataatagacacacacgagatagtgaaagctgggtccaggggggtcaccagcttctggtcctgcggtgccaacaatgcactggatataccagcatttattattaagtttagtgaaggcgggggtaggttagtgagggatttagggtcatttgattatgcggtgagatggtcacatggggatgaagtaattctttaacatagcatttgtttgtagaagtacagagcataactgagtggctcagtatatagagtacacagagataagaatttacaatatagtgtgtgcgtcagtaatttctaacagagccttaaaacagaaacacaatctttccgtaacctatgattagcaagctattaatcagcagtaacaattgcaacaaaagctggttacaaacaatccatggaaacaggacgtgaagctagacaaccagttagaccagaaattctcagaagggagtatgccctaaccctaaagaggcctagaagagccgtggcaagatgagggcatttatagccctatcttatccatatggacaggcgtccccccatgcgtccgtttataggctctccacaagggtcgtattccattcccagagctatgaacatcttggtgatgtgaaacctccctgactgcacgtccattcataggttctctgcatggggaatcacatcacacactgttggctcattttggcagtccaacctggcattgtctttacacaaccctgcatgcaattttgtatttacaataatcaggagcatttcatcttttattctgtagcaatagtttcagggggtctccctaaacagtctgaccccaaagctgactttcttctgaagatacccctaatccgatcgctcagacatcagaatgagtacctaactgttcaggacacacagttatatcaacatgctcagagactgctttctcttacataaaatactactttcctttttatcataaaaaataggatgggcatggtggctcacacctgtaatcccagcactttgggaggccgaagtgagcagatcaccagaggtcaggagttcgagaccagcctgaccaatggagaaaccccatctctactaaaaatacaaaattagccaggcatggtggtacatgcctgtaatcccagctactcgggaggctgaggtaggagaattacttgaacctgggaggtggaggttgcagtgagccgagattcagccattgcactccagcactccagcttggacaataagagtgaaactctgtctcaaaaaaaaaaaaaaaaaa

SEQ ID NO: 1674 - DNA, 1475 bp, Homo sapiens
  SITE (40): n equals a,t,g, or c
gaattcggcacgagattgacttcaactctgctttgcaggnaatgccttgagaaataagagggtaaatccatttgctgaaggatatcaccatacgtgaaatttctatctctccaacacactcctagttaatccactggattcttaattgagaaaaatgaccattcccaaagatagcttgattttatttagactattggctttcatagtatatgttttatggttttctacgaatattcactaccctcaataatctccacctacaataagctgcattgccaaagggtcctgccactgccaagtcatttgtttgtcctaaacttctttgttatattatttktacaaattcttaaaagaaataattgtcaataatcagttcttgagcatttactatgtgktttacataatagagatgatattaaatcagcatattttccattcccctgcaaatctctttgccttgaaaatcacatactctaacagtctcctaccattcatgctaagtaagaaaaatcaacccaggaaagaaagcacaaactacaacaaatcaatcttttgtcaactcaaagctgactctcttgagtccttagcaaatctaagtaaatagttttaaaagccaggatttgtgaaaacaaaatagtttttctgaattgtaatagctccctttacacatgttaaaatacaggcttatctagatcatggaaaatattatttgttctttttttttttttttttgagacagagtctcactctgtcgcccagcctggagtgcagtggcacgatcttggctcactgcaagctctgcctcccaggttcacaccattctcctgcctcagcctcccgagtagctgggactacaggcacctgccaccaggcccggctaattttttgtatttttagttgagacgatgtttcaccgtgttagccaggatggtctcgatctcctgacctcgtgattcccccacctcggcctcccaaggtgctggaattacaggcgtgagccaccacgcccggscaatttgttcattttcaagataatacctccattgattgctctattatgacaagcmctgawtgatataagtgttttgcatgtwttcactcctttctaccttacaacaatctccatctcatttgttcactcgtgtgtcccaagctcctataacatggactgatagacagtggacaaaataaatatgtgctatgtgaataagcaactttatgaaatatatactggacagtatatatttctatgtacattttgcagataaataaacagaggcacagagcagttatgcttcatttccaagattttatactcagtagtaataactaagattcaggatagggaaagtgattctcctaaacttcaagtgaggtggtcaacgtcattagagccaaaacaactctagattctctaacttcaaacctatacataatttataggattttctgccaaaaaaaaaaaaaaaactcga

SEQ ID NO: 1675 - DNA, 1784 bp, Homo sapiens
  SITE (555): n equals a,t,g, or c
  SITE (559): n equals a,t,g, or c
ggcacgagctggtgtgttgataatgctctgtttcttgatctggagactagttatgtgggtgtgttccacttgcaaaaaaatgcatcgagctcaagataagtgtgcttttccgtaaggatatttcatctcaatagaaaatttggcttttgtgtcaactctgcctaaagtaagtgggaaactacaaaaactggggacttggacatcttttaatcaaactatgtatcaatgtcatgtcaaaggttttgttatgtgtcatcttccttgaatgagaatggcaacaagttttttttttatcacacagatttcctatgtgccttttttccccagtcctgatagtctatgaaccaaccaaacttagggaaaagtaaaacagttaagtcctgtatttccaccttatttacaatataatgccctctacagaaaataatcacagaaacacagaaaatgacttctccagagatgagaaatgtgcatgtgacgccactctgagttatctccttcaagaagtatgtattcyataatctgggagaagagtaaattaacactccaactccnaagntcaataattataatatgagagagacaacagtggaaagaatgaatgtcctcaggcttaatttactagcmggraagamcagtcagaggaaaaaaaaaaaaaaaaaagmccgagamcaytgagctctcttctggaatgscagaaggmccactttctcctgcataaatgaagscagggctaatmcaaaacgttttctgggtattatttaacctctcctacccaggctattttagctcagtaggaaattcacccactaggtggaccttggagttcatccaccaccccaataaagattgcctttcttatttgaagtgatgatcacttcttccaagcaaaccaacaaaccctaggtattcaacctctgataacctgcctactaaggaacttcagtggaatcaggggatcaacgatgctgtccccaaactggcctaaggtgaaccaaggggagaagttaacagcagcacttaaattgatctactcatactcaaggattactgagtcttctgggcaagaaaagaaagcaattacaaactaccaataaggaaaggtgttttgaaaatagcgaaaaaaaaatgtcccctacacttcctttcaaaggtagcctcagagctagtctggctgcgcagatgaccagtgaaaataaatgaaaactgcagtacggttatagatgatccttacacctcagcttgttctcaattgcaaaaaaaaaaaaaaaaaaatgcatataatctaacactctcctgtctaaattgcttcaaactttctcagaacgaccttcatcgtggcggattctttttctgcaaacctttacaggttgcacctgcttcacacagaaccagcggaaacaaactaggaggagataaaagagaagaagtaggaaggtttaaaccaacacaagtcgattttgtacccaaaaaaaaaaaaaagtttagtctaaaaagggaggtccagtgaggaacaagacagagggtgaaacagaagtctggcttactcccaaggcagaaatcatgactcatcaaagctttcagaggggacagaaccagactttgcatttgtcttgaggtcatcttcgagccaagaaatgctctcttaaccgggacctgagaactttaagggtctgcgacaactggctgtgaggccttgggcaaaacctctaacgtctctggggctcggtttcctcatcaggtgaagccagggtccactctagctttactagtctctcctcgag

SEQ ID NO: 1676 - DNA, 1743 bp, Homo sapiens
  SITE (1561): n equals a,t,g, or c
ggcacgagtgcattggttgccatgtaaacagccagcttctggcaggaaagcagctggaccaggtgacctggctgtgacagagaacacagatattgaatccatgaaaccaagagtaatcagtacaacgattttttttcttttactttttaaaagtgtttgtcaatcctttaagttctttttgtctgactgctgtcattaagtaagaaaaatatgaaataaataagtctttgggtatgcaaaattgggaagatggacaggaattagtccctctatgcaatttcctctgaatctttcataatttctgtatcctcatcccttcaccctcaaccctccaacaccctctgttaccctgcaggcaactaggacagcatagagagcgtctcttgaacttgactttctcttccagtgcttgcctgccaatcccgtgacccatcctggagaacttttatagtcttcgacaatgcaatgcatagcaaccagttaataagataagacagtgactgtatagtgctccccaaagtgccatcacctaaaatagccctttgraaagtgcycatatagaactgagaattttagtgtagtgscaggctggatttgggtagggtgccyttcggtggscctccaaatcctatgggragcttaattacttcatctttctgtaaggccaacagttctcaaaatttgtggtctcaggmcaattttacactcttaaaaactgaggragatttctggtctggacatgtagtacagacctgtttttcattgttcctccctgctaagcacaagtataaaccctggaaataatgcaagagacaaccagggtagaactctggaaggttgtaaggagaaggcaaactggtttgagacccagggaaaaacaaagagcaagggtatcctatgtttcccacccagcagaagaaagaaacctagtcctggccattcctgatacccaactgaacaacagagggcagcccaggtaagcttactcctccctcagagtccctctgacaacatcaggtaggcccaacaccacaggtaaggggggatcttcagaaaccccaccaacaacagtggacaaaagaagcatttgccttctccccaggcctgagatgtcccactttcacctagagatatcgaggtgggagggtagaacagacacgaggcataaagtgatggcaagcggcccagtctgggaaggctctgtctcagtgggtgtatgactgtcctctcctacccatagagacaccaacagtgcagggcgccagtagaagtgtcccaccatacctaccccaactgagaggcacctggaagcctgacctagggaaacctttctgctccttcaggcgatatgatctgggacaaatgtcagcctcagtgatatccgataaaccaaacagagcaaaacaatactgaaaattaaactgctgttagaacaacagaccacaaaagtaagccaacacctgcttgcatgtgaagcataaataatgtgactgactgcaaaaataaaaaatgtaaatatgagtttcctaacatagtagacaaaatgttcaatcaaaaatcntctgtcataccaagaatcaagtaaatcacaacttgactgagaaaaggcaactactgccaacattaagatgagttcgatgttggaattatctgacaaggatttcaaagtagccatcataaaaatgcctcaacaatcaattaacattatcttaaaacaaataaaaaaaaaaaaaaaaactcgag

SEQ ID NO: 1677 - DNA, 1201 bp, Homo sapiens
gatatggagagtcaattgcatttcattatgcccaaaggtaaatgcataactttttccgcacagctaatcttctagcaaccccgttgctgtccatggcaagcaggttagttactctcgccctttcccgtttcaggttcattaaaaaactcttgtcaaaatctctttcatcccatcttattcttcattctcacttccatcagcatatcagtccaggccctagtaacattaatgttactaatggcactgttagtaacattacttaccagcattcaagtgggtcttcctgatgccattctctcccatcctgaaatcactgctgtttatatagatcttgtatgatgtcattcattggctcaaaaacttttaaagccttcctttttctaccaccccaatctaaatttcaatgcctggcttttattaaaacccataatttggccccaccctagctatttaactttattttccactattcgccagtctcctccctcatcaacgagaagacataccataatcaacctcacctctaacccttggaatatctaaacttaaaaatggtccttccttycccctttactkgtatttaaagamcctgatgaattattcctcctctgctaaacttttcacaattcttcaacctcatttatgtttcacattttcagaacatatcttgccgtttattaggaatctcacaattaggcactctcatgtagatagatttacgatcatgtatgttgtcatcttctattaaattccatactccttgaaggcaggagccatgccttattctgtcccccagagtactcagaatgatgcagagcacacagaaagtactcaaatcttgttgactgatccagtgagaaatgaccaacttcagttccagcctctctttaacatgtacatagcaatttgggcaagtcaagctccatcctgaaggacataataggggactctttaagcacattattatgaaggcccttcagggataacaccagagtgatgaggtgccctataccagggataatggagacagagtacttgggattcatcactggggtcctcaaagcatcttccaagggcataataaggaaggactcaaacacctttgaatctctgtgagaccagtcatgaggtcttttgaaagagttctttaactggagtgaatgtcaaagagaagtataataaaaaaaaaaaccggcacgag

SEQ ID NO: 1678 - DNA, 1815 bp, Homo sapiens
  SITE (1360): n equals a,t,g, or c
ggcacgagcgacaagccatccccctgcccttcctgcaggctgccttacccattcagagggaggccgaggctgtgccggagcggcccacagctgcgggaccgcgttccagggtgtgctctgctgcaagcatgagggaaggacagttaaaagcaaaacggaagccttgcatgggccgcttatgcttctggagctactttttttttttttttttttttactatacatggtatttagataaaggtctagagtaaaaggctctacaaccatcttatgttcagaggtcagtgtgtgacttaatttaacatttcctttacttttgtttttctccatcttgtattttatagccagagcctgaacctcctcgtcgattttttgtcgaccagtgggagctttctcttagtctccgctcctctgcccgccccgcctctccctccyccgactccytccgacaggtagcatggcctaggactcactaaaactctgccctccgcagcctccactcacgtcactttcgcaagtgtcatgtaccccaggaggctgcagtgttcctcacttgggcccgtctcctgtagggagccagctgcatgtgttgctgtttgcctgtgtcggtctcgtgtgtraggtctgtggcacactcctcagctaaagtggctgctggctttcatccaamtgawctgacacatccaggtctgttgatgtgaacccgctttgatcctatttcaactatatcaaataatgataaatgttttgcagccattggcttttttaacttcacatgtcttccaaaataatatgtgttaaaaagtaggaaccacaatgtaattaaatcacctcaatggaggggtgatgatgcggtattctggctgcctgttgtcatcatttgaggaatgtacgcgrctgtcacctgaagtagcgctggtccagttgtagggagtttctagagagattggaaggtctctttgccactcctactggtatttcccatgcctgagttgacgccagacctcacgtcctatgtgcatggtagcatatgcacgcgtatggtgtgcggcgggatctgaagtagcactggttcagttgtagggagtttctagagagattggaaggtctctttgccgcttctactggtatttcccatgcctgggttgaggcctatgtgcatggtagcatatgcacacgtatggtgtgcggtgggatcgatcccgcaattgccacatttctgctattttttatgagtgatgagaaggaaaccatcgcttttcatgccagaaacaaatagaacttgagtcttcacctctctkgcagggatgcttgtcagtgttgccaacttgctgagaactgaatgtggcagatgcctttgnacgggcagccccaggtttagttcaactaaacccagatggtttagttcaggagaaaagggtcctggctgagcagtgagggcccagggctggcttggtgtcctggcctcatacttggcatctggcccacactgccccgtgtctgctgcagaatgagagaaatgccattttctgctccctcagtgtcagctgttaagttacctgctcagctctgcctggtgtctgtctgtcccaagcctcagtttctttagtgtccctaaagaaggtttagatctgagagccacgtgtttgtcttgaccactaataggtataatctgtgaagttaatgggcaaatggcaccaatccttgggaatcttatttttgaattaaaagctataattgcttcttcagttcagctgagccttgagctgagccacaagaacggcttcgtcgtgtgtgcatctgtgagcccctcgag

SEQ ID NO: 1679 - DNA, 925 bp, Homo sapiens
ggcacgagcagaaatgtagttgtaaggaaaaatgaaatgaaaaagtttgaaatctaaaggaaaaaaggaaatctaagtagcaggccaaatttatctgcaatgtaaagcctccttgatgttatttcctttatttttcatactaagtatttttagtgtacatattgtaaattcaactttagaaatggaaaaacagtcccaaagggtgtaagtatcttgaccaccatatcaagagcactgtgtgagaggcaagatggaaacccatggctacttcatgacatagcctctaaagagacggtgtaggtaggacccgtcatcttgcttcagcaagttgccctggttccttgccgcttactcctacctaggccctaattctttcatccagctctatagcctagggacttctcacatgttttgtggcaaatgggatacccttagaaaggaagcagatgaggagagacatagcgcaaggtatggggaaaggggtagggagcttctgtgcccactaggggcatgctgccctccatatgttcagctagccagaagccgtctgaatcctgtccttttggttttgatggaggttttcatctgtaggcgtgactgattaaactgttgtcctgccactggggatcaaattaaccttctgcctcttcccgaatgctgggrgggggggggcagctgaaagccccaaccctcctattccccaaactagagctacctaggtgctgccagccatgagtcaactcactagcatataaaaagacaccactttgtggagattttaaaaattgtagtagttgtatgccaggaagcagggtctaggaccaaatatgtattacacaatatcacacctgtgcataccagctcaatcagaacacaaaatttcaaaaatgatactgaatttaaaaaaaaaaaaaaaaaactcgag

SEQ ID NO: 1680 - DNA, 921 bp, Homo sapiens
ggcacgagggcatgcctcccttgctgcagtacattccctgatcctctcaacaagctcacctctgtaagctgctggcctccataacctgctccaactcattcttcttgcccattggggaacacctctcctctgtcctgctctcccatatgctgcaaactcaccctctgctctcccagctcccagctcctgggcccaggttggtcgtttctcttgctttcctcctctactgcatagcacggtactgtcccacctgcaccatgctgcgttctctcagcaccacctgtgattctgccactggcctaattcgtgttctcaggtgtgtcctcccttcttgacctggccccgcacccactgctccaccagatgcagtcctctctgtgtcaaacgtactgcactgaatccacacgctctgctgtccaagctcacgtcccagtggcccaggctatgagtcctttccagggccccacaaccctgactcccctaaaccttcctgattcttttctcatcctttctttcacactgtgtaaaaacactctggggagcctctgcctctgaatctcctamcttcttcctgtcaccagagtagtttgtctttgtcactcattcgtgtcccactttctgcccatcctcgtccccccggtacgaatgcamccagtctcaacctgamtctcctgccctgsctgagamccagctcctctgctcctcctgggtgctcctgtcagtcccaccctcctcccacctcctccctccttaaggcccatgtcttcaagacgctctccttccacactgtctccatttccctttgcaccttccctccccgtgacaacagatcccctgctctctgctctcacccgcacagcccacttcctctgtgtcactgggcccctatcttggcctcactcctccacctgagtcctcgag

SEQ ID NO: 1681 - DNA, 979 bp, Homo sapiens
  SITE (48): n equals a,t,g, or c
  SITE (773): n equals a,t,g, or c
ggcacgagaatagggctacctggagcaaaccctggctccgtaggatgnatcctggggtttcctggctgctggggcggcagtctcgccctcccagtcggcctgcggttggtgggtgggggagggggcggttctcgctgccacggatccagaaggccaaattgaaccctcgttctgggatttctggctcctactcccgcaggccgcttgggtgactgtccttttttggagaggatatagagacacagctgtggcctctgcacactgctcttcttccaggctcaggaaaggccctcgcccaggatgtcgccactcagaaggccgagacccagcggtcttcaatagaagtccgggaggccgggacgcagcgttcggtggargtccgggargccgggacccagcgttcggtggaagtccaggaggtcgggacacagggttctccggtggaggtgcaggagsccgggacccagcagtctctccaggctgccaacaagtcggggacccagcgatcccccgaagctgccagcaaggsatgacccagcggtttcgcgaggatgcccgggacccagttactagattatgaaggcatctcagsccctggasccagagccagtcagggkttaaagtgaaagcccgtatttccgcccagaagctggggttggggagaggatgtggattttttgttttaccctttctgttgcatggttgcaaacacaaacttgagttctaataaagaattgcaaagtggaagcccgccccccgcctccccccycmtnacttaagtccaggaagctggggtggcgaggaaggatgatgtggattgtttttgttttacaccttctgttgaatggttgccaacacaaacttgagttctaataaataattgcatttccctaacgtctgtattttggaaggtagaggggagggaaaggcgcattcctccaacagcccagttctgccctgcgcagccctctacctcgag

SEQ ID NO: 1682 - DNA, 548 bp, Homo sapiens
  SITE (4): n equals a,t,g, or c
  SITE (37): n equals a,t,g, or c
  SITE (56): n equals a,t,g, or c
  SITE (548): n equals a,t,g, or c
tgtntgaaattgtgaccggattaacaatttcacacanaaacagctatgaccatgantacgccaagctccgaaattaaccctcactaaagggaacaaaagctggagctccacgcggtggcggccgctctagaactagtggatcccccgggctgcaggaattcggcacgagtgtgcatatatgtgcacgtgtgtgcgagtgtgcgtgtgcatgtgtatatgtgcgcatgagtgtgcatgagtgcaagtgtgcatgtgtgtatgtgtgcaagcgtgtgtgcacatgtgcttgtgtgtgcatgtgtgtgcaagtgtgcatgtgtgcgagtgtgcatatgtgcattgtgtgcgtgagtgtgcgtgtggtccgtgtacacatctgtccatacatgtgagcttgcatgcacatgtgagcatgtgagtgtgcatgcatgtgttgtgtgtgtacgtgtctgcacgttggtgtgtgtatgtgtgtgcctgtgagtgtgcagagaggccctggcgctcgagggggggcccggtacccaattcgccctatagtgagtcgn

SEQ ID NO: 1683 - DNA, 975 bp, Homo sapiens
  SITE (401): n equals a,t,g, or c
ggctgcaggaattcggcacgagcttcaatgaaatttatagaaaagactctcacaagtaccattgaatatagttttctgatgattttgagatcgtagtatttgactgggtaagaattccgaacttcagtgaaaaaactgaactcaaaaaactactaacccaacatcaagcagaataagaattattacatgggactaaagcaatgaaagattatgattttatgacttttttgtttggcacatggcttattctttcatgtttcattttccacattaattttttttttctttcagctatctacagtttacgggaatatgggaaggtgtacttttgtgtgcagaattgaaatttttttttctccctacctgatccctccagagtttggagactatttgtgagtatncttatttcaataacaatatagttatttgcttacatttaagaagaatctattctctttctaataggacacaattggaaacattggccatattaccaaggctttgcctgacatgtcctattctgagatatgaccagattgctctaaggaattaaagttgactttataaagccaattaaaaccccttggaaaatctatcttgatatcttggataaataattaacatggttgatttacaggtgagaaaaaatgtcacttcctgagaggccctggaacctgaatatatttttgggaaccttgagaagagaagtattcactcaagtttaaaggtattacaggcacaatttgagggtgactcctccttggattggcttcccagcctcaagaggctttcaaaagtttaatctgagattccttgtgaaaagttccagcaaagcaaaattgaaaatgagcttatatgattaatcatcattttgctgtacttctgtaaattattaggcaaagtataacaagcctaaaacttattttgcaaacaaattagttttattgtgattaactttggtaaaaaggggggaac

SEQ ID NO: 1684 - DNA, 481 bp, Homo sapiens
ggcacgaggaagaccccactcttccctcatgaaccatagcagataagttatcaccccttaccattaagtatccaaacccttattaatggaaatcatccattacgctgcccttgcaggaatcaccctacttactctactctttgccataggaatatatactgtcttgcctcctgggtggaatttcagacaaaaaaaactcaatattcgtaacctcttgcctcataatcctcctcatagctggtataatagccaccaccaacagatagtggcccctcctaaatgtcctgtctttgcccatcctggcatttcacactcttccttcactgcatcacagaaaacctttcatggtcctacccagaacatcccaccctcacagcattccttgattggatcaccaatcttatatttcaaggggatttacaggaattcactccagatgaagccgaattctttacctttacacttgctctctgtctattta

SEQ ID NO: 1685 - DNA, 825 bp, Homo sapiens
gcttacttggttcagctcatggactggcttcttaattctctgtatgctggccttttgtttttttccataaaagcacttttctttagtttccataaaatccattttcagaaaccagttgtgcaaagcatagaatttttttaaaaagatacctgcggatggtagaggggatggggaaagttctcactatgtggcaatattaataaatacagattaagtattgggtatctttgctatttaatatcctcaggctactcttcactgccctttcccaggttccctcccactgcacatcatctctctgactcctctttggtgccttccttctgccatagcttgttctcacatcctgagttttggatttcccccagaaattccaaactttccaactaggtcatacaaagcaattcagttctcttcagcctctattcgcaaactctccttttgatattcacactcatcctgttgcttgaaggaccctttatttgccataatcaatcttccttagaaagtagttattcaggctgggtgcggtggctcatgcttctaatcccagcattttgggaagccgaggcaggcggatcatgaggtcaggagttcgagacccgccctgccaacacggagaaagctcgtctctactaaaaatacaaaaattagctgggcgtggtggcgggcacctgtaaccccagctactcgtgargctgaggttggataatcgcttgaacccaggaggtggaggttgcagtgagccgatatcccaccactgcactccagcctgggcaacagagcgagactctgactcaaaaaaaaaaaaaaaaaaaaactcga

SEQ ID NO: 1686 - DNA, 455 bp, Homo sapiens
cccccgggctgcaggaattcggcacgaggttttattagtttccttggattgggtttcaaccttctcctgtatctcactgggcttctccgccatccagattctgattctgtgtctgtcatttcggacatttcatttctgggggagttattgaggtagtttgtggaggtaagaagacactctggcttttagagttgccagaattcttgtgctggttctttctcatctgtgttcactgattttcctttactttttgacattgctgtcctttggatgaagctatttgcttttatattctttgatgttcttgagggtttgaaggcagtataaattgtgtttagttgattgacttcatttctggatgctttcaggaggccaaggctcagcttagcactcctgagcttcatgctaatgccttggggactgggactgggcatatggctttgttctttgacctc

SEQ ID NO: 1687 - DNA, 811 bp, Homo sapiens
  SITE (5): n equals a,t,g, or c
  SITE (6): n equals a,t,g, or c
  SITE (107): n equals a,t,g, or c
aggcnnccccaggctttacactttatgcttccggctcgtatgttgttgtggaatttgtgaagcggataacaattttcccacaggaaacagctatgaccatgattacnccaaagctcgaaattaaccctcactaaagggaacaaaagctggagctccacgcggtgscggccgctctagaactagtggatcccccgggctgcaggaattcggcacgaggctggaagtataatggaggccagttgggggaggagggggaaaagattcactctaagtctagatgctctagcacccacccaggatgtgtgcaaggaagtgcaggatgctcctggtcttgcaaactgtggtttgtgggactccaaagcccctatccttccacgatgctttctgtcytgttatcacatttccttggaggagarcccagccttggtggagagccctgcyctggctttgtccctcsgcatgagatggcaaaggatggtgctgctgggagaccctcacrtctgyrcactgggggctgcttgccttctccattcctccttcaagtatctgagcagctcctgtgtgccagctgctggtctacaagatggatsggtccttggagatcaygctgtagcagaggaggcaggctgtagcccacacgccacaaccagccccctgcctgttcacacaaataaagttttattggaatacagccacacccatttcagtgcatattgtctgtggctgctttcctgctacaatagagagttgaatagttgggacagagacctatggcctgcaaagctgaactatttaccatctggcyctcgag

SEQ ID NO: 1688 - DNA, 636 bp, Homo sapiens
ggcacgagccactactgtccaacatcaatttggaggttctaacagatgcaataataggaaaatattaaatgattgttataaacaaaattaaaactatatatctttttctggttatgttacagttcacgcggaaaatccaaaagattttaaagaaaaaaatctgctggaattagtaagataatttagaagatggcttgacagataatatatctgtcaaaatcgttttcccttatttccacaaaaagcatctagatatagaagcagaaaatgtttttcattacaagggtggcaaatgttacatggtgcctagaataaatttagcataaaaaaaacccagtcggccaggagcagtggctcacaccggtaatcccagcactttgggaggctgaggcagccagaccacctgaggtcgggagttcgagaccagcctgaccaacatagagaaaccccatttctactaaaagtgcaaaatcagccgggcatggtggcacatgcttgtaatcccagctacttgggaggctgaggcaggagaattgcttgaacctgggaggcggaggttgctgtgagacgagatcgcgccattgcactccagcctgggcaacaagagcgaaactccatctcaaaaaaaaaaaaaaa

SEQ ID NO: 1689 - DNA, 1132 bp, Homo sapiens
ggcacgagcttggagcacattgccaagcatttgtgccagttttttctacactggaaaataaaccctggcccatgctaatgaatcaggtcctaacagcaccaattggtctggttcttcttttgctttttgcattgctgacatttcctccttccagctctatcagggaaaggaattgatcatttggataagaaacaaaaaaaagtctctctctgcttcactgtgtctcttatgtgtggtgctactgtactgccttaggaacaagcatagtgtgtctatttttagggcaaatgtgcctactctatcttcgccaactaaatctttctacatgactaatttgcaagttgaattatcttggtaaataggctgactcactagcaaataatctgcagaatttatgcattaggcttctgtagtgaattaggtccttttgtcttgctcagcatgctgtaataaactgcagtagtgctctggttaataataaaaaaaaagaaaggcaaggaagagaagttattccaaacacatgaagagtctttctttagaatagttagttatgatagagatatatatagcaggttatattgagagatatggcaatgacttaagtcaaataaggaaatgaaccatgatataaatagatatatgcatagctgatgtgtgtatatgtaagatatgttttgtgcctctgtttgtgtgtgtatgtgtgtgtatgtttatctcctaaatgagttaatggaataatttatacttacataatcatttatcacaaaatgtgcatagcaatcagtatccaacagctagtagtcattcaagaaacatttgtaaaatgaatgaattgcaatgttaggttaacattctccattgtcagtggtcctccccttctgctgtccctactccctctatgcttgtggtgattcagttgcagaaagacacatctatacttcatagctgtagaaaaattctttttttgtggttgatttcatgtggtttaaaaagaatgccaaattatttgtacctacagggataatgaccgactaaatttttttttcatatatgtgcgtatgtgtgtgtctatgtctgtatgtatagtctaaatattattgtccaatcatggcagggattatggttgtatgta

SEQ ID NO: 1690 - DNA, 1062 bp, Homo sapiens
agcacgaggcctttggtagcctgccagcgcctccctcatttcccacatgtcacatgacttcttactgtccagccggctctgttcctcggttgtccctcccaagcacagtgcgtcctctcctgggatggctctattaataaccctcatgtggatgttctgggacggccattcatgcttcctgtcctcacgtctggcccccactctacgccattcatgagagtgacccccaggcgtggctggctccctccctttctccactgccagcgtgtctgcaggatccaaggtgccatgtgtttgctgttcacagtgacccatgagtgagaggcagcggcgttcacaccatagtttaagttaacaatgcccggctgggacgtgcgctgtgtggccctcctcggggactgcagtgtggcagaaaaaaacaccctgagcttcctctcttctctttctcctgctgatattttgctgcccctaacaatcattggatccaatataagctataaaaggcagcctcacaagtgctgagcaggggaggaagatggagaggggtctgcaggggcgactaaagattcccagcattaaaggcaactgctatctatcaaggatattcatccatctaacgggggtaataatttatcctagactgttgctaaggctgagttaatatagctgaagtgtactatcaaggttaatggcacccacctgagttcaaatctttgcacacatcctcacttaaatgtaaaaactcaacaaagaatgcaaatgaagccatgactcactccttcaacattactaggagacagaacccaacaaacttcaaataatctgcaggtagaaaaaaaccaccaaataccagcagaccttcactgcctctataggtcatgagcagggtcaacaggtcaagggaggcttaaaggactcagtacaggccaggcaccggggctcacgccggtaatcccaaccctttgggaggcaaaggtgggaggattacttgagctcaggagtttgagaccagcctgggcaacatggtgaaatcccatctctacaaaaaaaaaaaaaaaaaaa

SEQ ID NO: 1691 - DNA, 675 bp, Homo sapiens
ggcacgaggtttggaatttattttttgtctgtgatgtgaggtagggatcacccctcccccatattgtaaaactacctgttatatgcttttacatttgtaactgtttcatctagcatagcttaagtggtgatgggagtctgcttttgagcttcatctatgcattggcaaatacagttaattaactggtctagttttttatctctattttccttcttgcagatcagtgctcagagtcctaagtactgcctttcaggccccataatgtgcccttgtatcctctaacatgtctggaatttgcgtaggctgtgctggggcagggaaaggagagtttctttgtcacaacaaacaaggggaaagctttcttcctgtctcttcgatttaccaatgcctcatcagaaactttcagcacttatgtaagaaatgtatttattttcttgaactttagtatatttcgtttgttttacaatattgtagagtagaaagttgtttttgcttaaatatagtagttttttctttagtcctatacatttcttaagttcttaaatatgtttcttgatatttttagctttatattgtggtgttgtgtattctttggaaagggattagtgggctctgtgcaattatgaaacaacaaaataaggcacatgtgcatgttgcaaatatactcgtgccgct

SEQ ID NO: 1692 - DNA, 835 bp, Homo sapiens
ggcacgagctcgtgccgaattcggcacgagagaaggttcagtctcagtttagctgtagtctgctcagggtctcacacagctggactcaagatgtcaacttggagtgctatctcatttgaggctcagagttctctttccaggtcaattagattgttggcaaaattcaattgtttgaggctgtcagattgaagaacctattactttgctggctgcggctgaggacaatactcagcatctagaagccatctgcggtttcttgccatatgacctgttccagaggccatctcacactaccaatctctgacttctgtctccaacctccagacccagacttaaaagactcatgtgattagggcaggccactcaaatactcttccttttaactcaaagataactgattagtaaccttaattatagctgtacagttccttcttccacgttatataacataatcatgagaatgatttcccatcatacatcatattcagatcttcatcccgtacccttccttcctaaatatttcagcttcaagtggagggattgatataagacgtggatactaggggacaggaatattgggggccgtcttaaaattctacttaccacatagattttcataattattgtatcatcatagtggattatgaactttttcataatgtgatgcatttaaaaaatcacctttactgcctcaaagcttattttaaagcctgaaattcaagtttgtctgaattatgatcccaacactacttagtggttgtttacacttttttggtattccttttttccgtctttttatttgcaacctttttgagatactttgttttataagtac

SEQ ID NO: 1693 - DNA, 598 bp, Homo sapiens
ggcacgagcccattggcacttattggttccactggccagtccaccctacccaaggacagtgtcccctcctccattgtctgctgccatatttgattcctctctactctattatgggtcagcaggggcgggggcccactgtgagctttcctcatgcccttggcctcagccttctgagcagacacctgttcctacttgtcttggtgcccagggtagcaggaggcaaagtgcactcaggaccccttaactctaagattgtcaaacaacgacaatccccttggggccagtcattgggtgggttcatggttccttctgagaaaccccatatgcacttcattcttttcatttcccatgctctctcttttggcctgaagagagtatttttccttagaagaagcaagtagttaaaaaatattttcttcttttctttgacctagagcttaacaaaagacaaaactcagatgatgaagtacttaacatcttccttctttctttcctgctgacttgatgactctgctttggagcagtgggggcctcagggtcgcagtggagaaagccatgggccagtgggaggtgaaacggagccaaaggtgggagaggg

SEQ ID NO: 1694 - DNA, 1445 bp, Homo sapiens
ggcacgagtcagtacacatatgcattgcctaacgatcaagtcagggtatttagcaaacccgtgacctcaaatatttattatttctttgtggtaaacacttttagaatcctctcttttaggaattctttgtatagtttcaaggcttctgccacctccacagaatgctttttggttctctctgtgatctgcacagtgcattttttctcatttcatctactgcttgtcctacactttcatttcttcatagcactcctgatgtatttcaaaatctttaaaagcattactggtaatcatcataataataataatgaggctataacattttccataccacagtcttagaaatcatctagtttattacgttcaaaaaatttcccaaaagaaggcctaccaaacatgtaataagcctaaaaatgtatcaggcactagttcagaggctgcatacaccaatctgatgctcataaactcattctagctatttgtacaatacaggctttcttctccaaggtttccatagagtcctagaggaattattagaatcctgagccggaattaaatgaaatgagtgttaaactgtgatctggtaaattgaggtagatggtgcaaacagctgattgttaaaggaaagtatcctcaagcctcacagttgcagggtctgttttataatctcatatcctagttttgcctatttggccattgaaaaccaatccaaacagcctctttaagtgacagctagattcaattccctgttgaggtgttgttgtttaaccctctctccagagagcttcagtgggattgaaaaatacttgtccctggagctacagtaggaatgctctatgatttgtgcataatacatatgataatctgagctttaaattaatccctaacccttctggataatacgctgcaggtaatttctccttcctatattacattgcggaagctagaattcagaagtatagtcttgctcaccttttaaggataatagagcttcaaaacagtattgcaggaagcaaagtggaataaacagaaaactgtcaaactagatgccactactgtgagttgttgaaaaggttaaatgtcagaagcaaatataattggatgactggaatgaatgactaagtgctttttacactaagttgcttgtttcacaagcaaccctagacccttagaaacagggttgatgaagtcaaagggacggccattctgtcttgtctttccccttctcagatcagcagaaaagcagcagaaaaacatggtgttggattgtagtccctacagatttggtacttccaagactctcccactccagcaaaaagaaaggacactcataacctttcctttttttctactccatggtaaaaatctagagatgggtatagtgcaaaatattcagattttggagaattattatccattttgtacttaaaaaaaaaaaaaaaaaa

SEQ ID NO: 1695 - DNA, 888 bp, Homo sapiens
  SITE (380): n equals a,t,g, or c
ttttttttttttttttttaggtcaaggtgagtttattgtccaaatagcataacctaattgcattcaaaaccattttcaaatccatctttaaactagtcagaaaacaggttattatttttttaaatcacttaacactgaacagataagacctcttaaaaggcagctgactatatcatgtcaccatcatagccaatacaacatttttgccatacttcctaaaaaccttttcgcatacactgatcatgctacttatcagcactttctaacatcctgaccaaacagacacccacacctcttatagagtacactgtgagagataacatggacttgatatggcatcacacttgttttaaagcaaaaaaaaaagaaaaagaaaaganaaaaaaaagtccaagacaagaaactatataactgagmgagaggagagagagagagatctgaggtacatgatataagggtgatgaacataatggaaaaaatccaatggcccgatgatttgctggggatgtaagagttggccagcmgttaagractaaacccaattaaaawwaaaatwgraactttgkttttcarggacaggcacctgtcaaaagacattggatactgtaatggctacagtcagtaaggcactttatttccccaaagtaggctgcaggcgaagggatgcaggctgcagctacagcatgcacgtacacatttgctgatggcttctcaaaacctgagccgagaatagggtctgatagcccagccaagtttaaaagcagacacacacgaatgtagtatcgttgtgcctgaaatgaccattctgggttgtttagaatccagaatcatcaaaagccatgtggtatgaggaagtaataaatatcctcttgaatcttctctcgtgcc

SEQ ID NO: 1696 - DNA, 642 bp, Homo sapiens
gattcttgtagtgccccccagtcccggaaggtgtgtgtctggcaacctggacttaccctgttaaacactggcagcatcatatacagtttctcttcttgttccttctgagtcatgtgccggggaggatggcacaactccgtgaagagccggcggaggtgcatcagtcctaaggcgttgtcttgtgggctgcactcctcctgcctcggccgccccatgatcctcttcaccatgttcatcttggctggttggtgagacgcacttctaattctgtaggaaaatgtcaatacatgaacagtcaaaacatcatcatcttgactaggtcaagcatgcatgtaagagcttataagaaatttgcaaaatagaaaattctgtctaaaatatatctttctacttctttaaacagaaaagacagagaagcaaaatttgataaatccccctgaagggcaaattatgaatctcagcattggaagttcttactcactttgccacaatttgtataaaatgtaaaacattaatcagacaagtaataaatgtttccaattagtttagtcatatcaagttcaaaaataaaggcgccgggaatagtggtgcacacctgcaatcccagcacttttggaggccgaggccggtgaatggctcgag

SEQ ID NO: 1697 - DNA, 826 bp, Homo sapiens
aaataacacatgcttttttyctcttagtgtttaggaggtcaaagtctaaaagcaaggtgttggtaaggctgcattccttctagaggtttcaggggagawttgtttccttgcctttttcagcatctaaaggrtgtctgcattctatggstcatggactcctcttaatatcactccaacttcttggtcccattatcacatatactaccatttctgatcccactaccttcctcttataaagactcttgtgattacattgggctcacccagataatctgagataatctccccatctcaaagtcgttaacttgatcacatttgcaaagtcccatttgccatgtaagataacatatgaaatgttctgaggattaaaacactattctgccaactacaatgatgaaggaaatatgaggaggaatactagatcttaggttgcaatgattttgaagactttttgaatataggcacgggaagcactgacctgctgtggcctggacttccatggttccttttttgaaatactagaagataagaatcattgatagccatcttagaatcgttctgccactatgtacatgtgtatgaatgtgttctcttgtgtgtgtgtgtgtgtttgtatgtatgtgtgagatatggttagtgcaaaagttgttgtggtctttgccattaaaagtaatgcaaaaactgcaaatactttttcatcaacttagtagttgttttcagtaggtctcataaatgtcttagaataaatttcttacaatggctgggcacggtggctcaagcctgtaatcctagcactttgggaggctgaggcaggtggatcactcga

SEQ ID NO: 1698 - DNA, 2099 bp, Homo sapiens
  SITE (644): n equals a,t,g, or c
gaattcggcacgagtgaagttgcaagttattttacttagatgtttaagaaaggtgatttctagaaagctagaaacttggggcactaggtttccaatgatgatacaactgctatttctattaaatgtctattctagtcccattgcaacatgcttgatatacataatctcctttattgctccaaacacatctaaaaggcagcattatctttattaccagatgaggaaaatgcttagaaatactttgataattagatgtttgtcttattttatgttcttgtaatagaagtatatttatttaactcttttttaccagttaattctggccttccttgacagtggaatttgaattggcatttggtaggcagatataatacaactggtataagttattgatkgataraakcattccaagaagamaatagaaatatttatgcaattccaaaatgtttttaaaatattaattatgcttaaaatatgtaagggaagagttcttatggcttatagttaaactaaactttttttataattgtatttcttgttttaaatcatgatgcaaaataacaaagagaatattgtgtttaattttttagtattaaatgactaaaagttactgggatttactaataagatttatgattcgcctnctcttaccatgttatagaatgagtagaatgagtgtttatttccaatatggtatactatatgcagcaaaaagaggctacgttagtaatgaataataaagtcagagaaagtcttcatgatgagcaatatttcagttgccaagtctgttgcttttcttaaatccatttatttttactattttgctactgtttccctgtggagggtttaatacttctattttcttccttaaccaactcgatagttaaagattatatggagaaatgtacttaagtgtaaatggaaatgcctggctgtgaaagtctattggcttttcttaaaattaggagaatatttatagtcataaaaaaaacagagatggttgattacaaaggagagtagactatgagcttaagtgagctacttgagaaaactttttgtcactttatcacatgcacatggcacaaagttgagttgtgatgtgctataatttgagaaaggagtgattatagcatctttctcattctcccgcccccagtacctgataactccccccactgaatcacttaggaagctcttggaattgtgtgcctgatgtacggcaaaactgtacctcccaggtcattgtggattcaagtaraagggaraggtgktcaagctgcctaaagacaaaacaggtcatagcaaaggcagagcttaagctagagatctaggcagatagagaagtggtgggggcacttgtggataggttgacagaactggaaccaaaatcttattcttaggtgggaggcaaagtaatttaaaatgatttggcagattgcagcaggatccccaagaaaagtctagatagaaacagtgcacaaaagtctgtttcgctgagcataaggtaagaatggagcaggccttcagatggagtttgagattggggtcttggtccaacaggactaatttccaatgggtcttgtggcttttccaagggcttacagcaaagcttacctcccaggatataaagggacaaaacctctttggactgacaatttctaatctccaaggaaggaggctggatctctgccctccagagaatggtctgggcatggttttggggagtgtttgtgaactrgcwgggyacaaattcctcctcggggtcattgcctccatactctatttttacaaaattctcatttgcgggtccaaacttctctctctctcttaggtcctgacagctagaatcttgacggtatattttttaaagatgctacatttcttaagcctagcaacatcttagttgtataaaaaaatgtacaggctgggcacggtggctcacacttctaatccccgcactttgggaggcagaggcaggcagatcacctgaggtcaggagttcgagaccagcctgaccaatatgatgaaaccccgtctctactaaaaatacaaaaattagctggatgtggtggcaggcacctgtaatcccagctactcga

SEQ ID NO: 1699 - DNA, 953 bp, Homo sapiens
ggcacgagagtgatttaaccccccatgaagatgaggatctggaaatataagtaggatctgaaactggtctgcagctgcatgcacagaaacaccctgtaatgctgcctttgtaataaggaggaatccatactctcaacagtcactccctgactctcctcttcctcttcctcatctttctgtgcatgtagtggatttactacggtttattttcattctcatcagttaggaggaaatagaagaaagagtaagtaactgaggttgaatatgttaacttactgggctgttttcattaagcaaataaacaacaataaaaaaaatctcaggctaaaatgaaccataggttccatttgtgaaatttgatgatacagataaccttaggttttcactactatctctatgtatatttcctaaatagcaatatcagcaaaacttcacaggcattggggtgggtaataatatttctttaaaatactcaggagaagtgaaagtcattcaaaggactttaattgtcatggagtcatccacttcccacttaactttttctgcctcaagtcccctctacgcagactgtctaaggcgtgatttaggtttttggaagcagctggtggcagcataaatctggccagacaaggagggtgctgtggaactggcagtacaccctgagtgcccgaatgtcacatgaaacactctgcaatgaagcaagcagggtctactaggtgccctgatcaatgtgaatatatgtaaggaaaggagaaaatgttggttcgtatatttaatttacagacatacaattcaagtgtggtttcaggcccagcatgggtgatgttagaaaggccttgtgcagtgctcctccaagtggggtctgaggcatctggcctgtggtctcactgctgacctactgcatcaaaacaagggaatgctgtttttcagtgtccctggtgattcttggtata

SEQ ID NO: 1700 - DNA, 1559 bp, Homo sapiens
gaattcggcacgaggaatatcggaagctccctatggcactgtcagtgtcctcatccccatcacccacaccatcatcctcatcttccttgaccttcttcttcttgaagagggagctgcgtttgttgtctgaggccagcttttccattttgtactcagacatcttctccctaagctccatctgcatctccttctccttccggccaagttcctttaggtccacattgtcagcaaagaggctgaagatgggcttgctggtccccctcactttgcttctgcaactttccgcgggtgagctcagtgtggtgttgcaggacagcacagactgcatgtcagagctgggtcttgcctggctctgaggcaacaggcagccacccaaggaggagctgctgtgtccactaagcatggagacttggtcatcccccaggcagctagccgctggtactgccttcatgcttgcaacagacggtgagcgggacaacagcagcatttcattttgcttctgagcaagggtctcactgactacattggcaatccagttctggatactggcaatggaaatggtgtctccaggccccactggcaggttaggcaggggtgtggtggggttggaggttgaacaccccgctatgttgcttgcagcytgagacaggtgggagcggtggctctgggtgctcagtactgacgtcgtgtccccatcagcgctgaytgaggggtctgcagaccagaacgcagacaggggaatgctcccgctggccgtggagctgtccgcctcccagcttgccatagactggctctcctccagcgtctgccggcttctctccagcagctccagcctccgttgtctcttcttagccaaggccgagtcctcccccttgctgagctccaccacctcctccttgttctcactgcccaccttcttctggtgtttcagcttccaggcctggtaggctgtcaggctgacgtcggaggggttcttctcccctactgcctcctctgcaccgggctcaccgctgctgtctcccgctcccaagtctttcttgtgaaatccaaattggattctcttgatcttccatctttccagggcagtgagcttgtccttgttcctgctgcagaagttgtagaaggaactggcctcagagcccacgctgtcctcatcatcctcccgcaccctgctccctgcttctgagctcctgtctgccgcctcctctctcttgctcttggcgtggtacctccgggaagcctccttctcaatctccagcagcctctygttccawgcgtcccaggtgctctccgaggacatcgagtctgcgcggcgcctcctgccgtggtccgggcggttcactccagctgctgcttcaggacccagatgtcgtggctgctcacgctctcccaggcgctgctctcgctcagggtgcgccgccgcctccccaccgaggagccagcgtcgctctcctcctccttctcctcctcccttccccacctccggtacccttctgcttggtacctctcgtttcggctctgccactcctggatgatcctctccacgtcctcgtcctcga

SEQ ID NO: 1701 - DNA, 608 bp, Homo sapiens
atgttgtgtggaattgtgagcggataacaatttcacacaggaaacagctatgaccatgattacgccaagctcgaaattaccctcactaaagggaacaaaagctggagctccaccgcggtggcggccgctctagaactagtggatcccccgggctgcaggaattcggcacgagcagctgcagggaaggaaagcttcccggggagaggagggaagtgtttttcttcccttcctagtgacccccatccacaaggtaggaactgcctctcctggttccatcattggagtcccccccacaagctgccccagcattcaggctcctcccaaggggcctgacaggagctatggagagctgcggccctgatctctttcttcacttctgaatgagtccatttctacccttttgggacccttagagatgtttggaagagtttggaggaggggcactaaggtatgcacaaccagatgcttgcagagtgactgggtcagccccagcttcaaagaggctatatcagtctatccccaaaactgaagtcccttgtagattttttctttctttaaccagtattcacatatttgtccctctagactaccaacccttaggcctcgag

SEQ ID NO: 1702 - DNA, 1157 bp, Homo sapiens
ggcacgaggttcatcctccccctgtgcctgaacacatttctgttctgctcactgaatgacaggcagagaaagggagagaaatccccatagaaagaagagcatacagccaagtttgcgttggctgtgctttctgctctcaatattcttagcctgtcttaacaatcattcttctgggtgggcatacatgcttttctttctcatgaaaaactgggcatctcagagcacggactaaaacccactaccaaggctgtgcctgcatctgactcatcaccctcaaagccctcctcatcctcctttctcattccctcattttcctcactagccttggtagagcactttgcccagcatggtgcttggctcatcattaagcttcctgaaaggacccacatcatcatcacttcctccatgaaggcttcaacaacatcccaggctaagttgctctgtgtttccacccagtgctcccacatcctgttttgcttatggctggcaccttttaaggaaaatctgtttacctatccatcttccacaactctccattcccagcacacaaacactgtcagtcaccagcagccttctctatctttgtgtctccatgcagtagaatcaaagaaagaattggttggattaattcatctatcaccaagggcacacaagggagccacggagaattagaaacaagcagcttcgagtcagacagctctgaatgtaacccctttttttacattttcaggtagaaaatcacttaaacctttagattttcaatcacctcatgtgtgagtgatgtcaatcaaggaaagtgactgagacaagtctcagtcattttaggggtttatttgcctaagttaaggatacccaggctgggcgcggtgggtcatgcctgtaatcccagcactttgggaggctgaggcgggcggatcacctgagatcaggagttccaagccaaccaggtcaacatggtgaaaccccgtttctactaaaactacaaaaattagccaggcatggtggtggacgcctgtaatcccaactacttgggaggctgaggcaggagaatcactggaaccagggaggtggagattgcagtgagccaagatcatgccactgcactccagcctgggcgacagaggaaggctccgtctccaaaaaaaaaaaaaaaaaaa

SEQ ID NO: 1703 - DNA, 742 bp, Homo sapiens
ggcacgagtgtgtaggtcacatttaacaccagtatgaaagttagaagatgaaaatactaacagtaagtatagttacaataattttaatgtgtgcacttaataaaaatacataaataaggacaatatcctttccatttacattttatatatttatgttttttcatgttctatttagtgtcttttttgtttcaacttgaagacctgtatttagcaaattttttttgtggtaggacaggcgtataatctttacctctccatttctgaatgtcacttttgtggagtgaagtactcttggttgacagacttattttatttcagtactgtgaatacatcatccattatttctttcctgcaagatttctgctgacagaatactgatatttttctgcagcttcccgtatatgtgatatttcacttttcttctgctcctttcaaaaatatcagtttgactttcatgttggataattagattataatgtgtctcagcacagatctcaaagtgttcagcttctttggggttatttgagcagcatggatatggatgtttattttcctttctagatttggggaattttatgttattagttatttaaataagattttcttcccgttttccctctctgctccttctagaacttccataatatagatattgtttcacttgatggtgtgccgtaaagcaagtaacctttcttcattcttttttctttttcctctgattagataattcaaataatgtgcc

SEQ ID NO: 1704 - DNA, 303 bp, Homo sapiens
ggcacgagaaaatttccatataaagaagggtctggtgtagaaatatggtgaagggttgcaagaggttgctaaaggttgttaacttgatgtttcatttacaaaataaacactctgtttatacttagtgtattacactttcgtattgcttgccctgggaaatatgccagggttggctgtgactagcccaacttgggttgttaggttcactaacaatccagtcactgcggccagcaggatggaccatgctgcttggttagtactgatctcaggctcatccctggaactgagactgaggtcagcccc

SEQ ID NO: 1705 - DNA, 1162 bp, Homo sapiens
ggcacgagctcccctgtgtttccgaaatggggaaagaaaggccaggcgcagtggctcacgcctggaatcccagcactttttgggaggcggaggtgggcagatcccttgaggtcaggagttcgagaccagcctggccaacatggcgaaaccccgtctctactaaaaatacagaaattagccagccgtggtgtcaggtacctgttgtcctggctactcgggaggctgaggcaggagaatcacttgaacccggaaggcggagattgcagtgagccaagatcatgctgcagtactccagcctgggtgacagagtgagactctgtctcaaaaaaataaggaaaaagaaaaggaaggaaagagcccacctcgctggtttatgagcctcaggccagtaactcaaactacgtttggagactgtggctctgtttctagccacaggggaaaaaaacctatgaacaaacaggcacagcccctgcctccacgaagtgatgacttcatgccgcagacagcgaaccctcacctcccaacagatgcctcagtgactgcgggggaaaagccacgaaacagagggccagatgttgagactgaaccattcagggcctgagctgtctggaaggccggggcaggtccctgaggtggtgagttgggaaagagtggaacattccagaaagcaagagcctcaggtatgagtgctctgagctccaggggttcatcttgtcctctataaaggggggaatgacacagcgcagttgctggggaaaacagtggggttcctcaaagagtcacacacagagttactgtcattaccaaccagcgactccagtcctagggatctaccaaaagaactgaaaacaggcactcggcaaacacttgcacacacgtgcatagcagcatgagtcacggcagccgaaaggcgcaaacaactcgatagccatcaatagatgaatggataaacaaattgtggccgggcacagtggctcacgcctggaatcccagcactttgggaggctgaggtaggaagatagcttgaagccaggagtttgagaccatcttaggcagcaaagtgggatgcccatctgtaaaaaaaaatttttttttaattagctgggcatggtggcacacttgtagtctcggtggctcaggagactgagggaggaggatctct

SEQ ID NO: 1706 - DNA, 759 bp, Homo sapiens
ctcgagttttttttttttttttttttttttttttttttttttgagacggagtcttgctctgttgcccaggctggagtgcagtggtgcaatcttggctcactgcaacctctgcctcccgggttcaagtgtttctcctgcctcaacctccccagtagctgggactacatgcacgtgccatcacgcccagctagtttttgtatttttagtagagacagggttttaccatgttggccaggctggtcttgaactcctgacctcaggtgatccaccctcctcggcctcccaaagtgctgggattacttttttctttatttattttggcttctgcttttcacatgaggggcttttctccaatatctgatgatccttcattgtccattcatcttcacaagtaaggcaccaaaatgctaactggaaatcacaaaatctctgtatgcctaggcaagcttgtgaactaatgaagcatcactgcaggatggggaagctaggtgttccactggagcaggggtccccagagttcagtatctgagatggtttctcttgggctgatcagtttctctgaagatgaagggtgcaacacatatgaaaatgaatcaatttcatcttcagagctacctgatattttcgattcctgatcctttctgaagcctacctgagtcttctgaggttctgtggaataaattagtttgctccttggccctaccctaactccacacacaccgtgcccacatttcagctttctcttgtcctcgtgccgaa

SEQ ID NO: 1707 - DNA, 933 bp, Homo sapiens
cggcacgagctcgtgccgactgtaatggtcccgtcacacttgtctgatgaggatctgttggttgactttgacagtgataaacgaacacagcctatctgggtgttttttgcacttatagtttgggggtttgaagtactggctagaagctggcggggtgtgtgtgtgcaggtgtgcgagtgcatgtgcaacgtgtgcgtgcaagtgtgagtctgcacttgtgtgcaagagaatgtgtgtgtgtgtgtgtttggagatttggacttgaaaattctagctcaggtctttggggtagtgtttgacctgaactctgaaaggcaagggtcccagactttcctgggatgatgggaactgggcaccccaatgagctcggttgtgagtagacggggtgggccaccgaagagaagacagagtgggcctgtagggccagcccgaggtacccacagtggagggtctacaggctgatttgggaggtggtggtttatacctgtagtcaccttctatcttagttaggaattcaccttcacacttccagaaactgccaagaagaatgccgccgctcaggtttatctggtagaataagctgtttgaacaaagatctggaggttgcacaatcctgtgtcattctggatttatcttggggtcgggagtcaacgatacttcttgtgctgtcgtttctccggccgtgtgaagttaccacctcgtgagtggtcataagttagcgtgtctaaatgcactttgaaatcctaggatgaaaaagccaggccctgtcttttttccttgtctaagcaccatccttgcttaggagagacacggctgtggctctcaggctgtggggcaatgttctgcttataatgtttcaagaggttcaaagcgtgcaggccccatgctccgtgagagccttgacctgggtcagcaggggcggctgggcttgac

SEQ ID NO: 1708 - DNA, 655 bp, Homo sapiens
cccccgggctgcaggaattcggcacgagaagatacgacgagattaaaaattttgcctaaggtcacacagctaatggatggtggaagtaggatactaactcagacagtcctgctacacacagatatgcaaataatcctgatttatagttatttggtcagagggatggattgtatattttatgaatgatttcagaccctcttctactccctcttactttctttctgtttatatcactgtcaattaactttccagtagtagaggctcagagatggtaaaactaccactaaatttatagaaagttgtatgaatttctttaagaagtgggaatacttctcctttcctcagttttttcctatttatggtcattgcagtaatttctatcatcctttgcagctttgaaatcacttcttcacatgtaaacagctcaccctggtgttgccatggagatttatatcaatgccatgagccagggcctaatttgcgcattctgctgattaacaggagtatttgctaatccctgccaagctctctcatccactgccatgactaatctcaccggttggcgatgcgtggaattcatgaatgctagaaacccatcatcttaggttatttaacacttcaattctgttcagtaacaacttaattaagtctcgag

SEQ ID NO: 1709 - DNA, 366 bp, Homo sapiens
ggcacgaggtttaacacctcgcagtaagggattcttcacatcccagaagtagctaccctgcatcttaaacagtatgctaggttagattcttgcccgtttgctgttcctgataatgccctttaactcacacaactgagctgttgttagttaggatctacggccacagaaatagtatgtctgaaataaacataaatatgagtaaaatccaggcataccccctaaatcatgcccttcactttcttcctgtttgtaaatcttttgtaagccttcaactttttttctttttaagcttgtagccatttctttttgaatgactcttagcttactgtgtttccaggggttgaggagccatgtatctgtgggata

SEQ ID NO: 1710 - DNA, 621 bp, Homo sapiens
  SITE (616): n equals a,t,g, or c
attcggcacgagggaggaaagagggtggaatctggacagtatgaaggatttgtattgtacctgtaatgtttgatgtctgaagctgggtggtgggcatggctgtttgttattctccatccttttggtatgcctgatacatttcataataattttaaaaaggacaagactactgcagagaaatgcatagagtgagctctgtttgggtttttaaaatgattcctacatctatgcttgcagatgtaagcaccagccctggaaaacattgcaagggattcttagtaggcccaagctttgggaaagggccaagggggctggggagttgattaggaggggatacatgctttttcctgctgccttttgaattttgtaccacacgtagtattacttattaattaaaaaataatctgaactagccaggcgtggtggcacatacctagtctcagttacttggaaggctgaggcaggaggatcacttgagcccaggtggttgcggccagcctgggcaacatagtgagaccctgtctctttagaaaaaacaggccaggcatggtggctcacacctgtaatcccagcactttgggaggctgaggtgggtggatcacctgaggtcgggagntcgag

SEQ ID NO: 1711 - DNA, 1611 bp, Homo sapiens
agtacaattccttttcttgcacagacattttcccaagtcagtacatctgggataatagttctcagagtggctgtatattatattcacatgaagagattttaaaagttataccccatgttcatcgctttatgttcaaaagtgtgtgtgtgtgtgaatgcatatgtctgtgtacacacatatgtagtatttatgcctggcatgtatacaatatgggtccatatatgcaactgagcaggtattttagaacatctgatgaccttgtcatttcaagaactgtggccacagattgagaaataaagcaccctttcagtagtctgagtatttctcaacaaaagtagagacttgcccatccttagtcatttctatggraggagtggcctctcattttatgcttttatagggacgtctattcccagcccatagtttatgagcaacattctstcagcaggcwkgaatagtggctcsctataattaattcccttcttgctcccccacctctgagagtgagaaataaaagggcattaaagggaatgtagttacaacccacaaagggaccacataaaatgtcaccttttggctcaacacattgttcccttcgtgactcctagtcctgaatttccatctcacagggcaggcagagtgtattgtcagctgagacccaagagagacacattggcagtcaatctgcatgatatggtaggggtattagttaaaactttactgaaagttaagatctgtgtcaaaggtttttccttgtcctatgtgcattacatggaagacagaagaaaacaaggaaaagagatgaattgctgttgcaatttaaagtatgggggcagagagttgagtgtgagctgcagaatttctatgtgacaacatagaatagtggtgaagttacttaacttttgtgggcttcagtcctcctgcctccctttgtagcattagcatcataatacgtgtctcccaatgtttcagggaagagtaagtgggtttagatatatgtagtgaataccacagtacctgacatatagtcagttctcagtgctgataatcatataaattgaaagcaattaaaacacccccatttatcttcccatgcataatttataaagcacattcacatcatgcaaattcatcctcacaacactcaacattcaattaagataagcatgcactcttgtttccctttgcacaacttttgcaagttgaatggctggtttggttagattcaatccagtgttctttccattagagcagctgccacctagagaagaggacaatgtttctcccagccattgaacatgctgcatgtctctgttgaggggccaccatcaaaactcaggccctgctgttctactctaggaggacagatggtcttaaggaatatagggaccttctagaccggaatcctcacaccaaacctttagtctatggtaatcactgtttacaaaagtttaatcttgttcccttctttaaaagtttcagagcattggtgtttattgacttttttgtttctttaaaaaagaggacaagccaggcacggtggctcacgcttgtaatcccagcactttgggaggctgaggcgggcagatcaccggaggtcaggagctcgag

SEQ ID NO: 1712 - DNA, 1267 bp, Homo sapiens
tgcaggaattcggcacgagctcactttgaccatgcgatcccttggcctgagatgcgctttctatcttctctgtctgctcaatccctctgccctcccagacccagctggaaggtcacctcccctgtgaagtcttccctgactcccccagcagaattaactgccccctctcttgggcttctggctccactcagtttgtcacaggcctgatgagcaaggatatcttgatgaaggtgataactggccgaaaagcagttggggcgcccaatggcgcagcttcagaagcaccttctgtgtttttggaactgttggcagcatcccaaggtgaaatggtagaagcatatggcatgggagaatggaatggggaaggatagggagtggaggttcacagtccattccaaggctgtatgtcaagatgacaggaaacacatatgcagcttgtctcaaagttgtatcttgagactggggagaaagaaggaaagaaaacaaggttttaaaatgcagtttgaagccaagctgcctgcttacagtcagactgcctggattcaaatggctaatttctaccacttcaactgactagctctgtggaacattccagaatttctctattcttctgtttcctcttttttcccccttaatttacattttttgtgggggggcaggtaagagacaggatatcgctatgttgcccaggcacaccttgaactcctgggcttaaacaatcctcccaccccaggcttccaagtagctgagactacaggcacctgccaccacccccggctggtttcctcatctttgaaacaggaagaaaaacaatagcaaccactgttggagttttaggagaccaataaacactctttctgccccttctgagttcagaactaaggaagaaaagcaggtagagatcaaaatgtcatcatcattgctgacaagagctagactggaggatgtggttgaagtgaaaatactttacccccagtcactaacacagcaactgcagacagcccattaccagggtacagggcggtccaacccagcaccccaccttctcagaaagttatcagtcagagaaatcctcctcctgctctggggaaaaggagaatgaaagctagatagacatgttcctccacacttggccccgctggggaatggaataggaatctcctcctgtccttgaaaatatgagaagcaaaaataagtgattctctcaataccattttatgggctcttgaggttgttatgagattaaggaaaaacacagctaaagtat

SEQ ID NO: 1713 - DNA, 1341 bp, Homo sapiens
  SITE (872): n equals a,t,g, or c
gtttccatttccttgagagatttttgttcatccctttattttgagtctatgtgtgtctttgcttgtragataggtctcttaaagacagcataaaaatagatcttggttctttatccatcttgccactctgttttttgaccagggcatttagctcatttacatttaaggttagcattgttatatgtgaatttratcctgtcatcataatgctagctggttattttgcagacttgtttatgtggttgcctcatagtgtaacttgtctgtgtacttcagtgtgtttttgttgtggctggtaatagttttttctttccatatttagcacttccttcaaaggctcttgcaaagtaggcctggttgtgatgaatttcctcatcatttgcttgtctgaaaagggtcttatttctcattcgcttttgaagtttagtttgsccagatatgaaattaagggttggaaattcatttctttaataatgtcaaatattggcccccagtttcttctggcctgtagggtttctgctgagaggtccactgttagtctgatggaattccctttgtagatgacctgacctttctctctggttgcccttaacattttttctttcattttgaccttggataatctgattattacgtgttttggggttgatcttcttgtttagtatattactggtgttctctgcagtttctgaatttgaatgttggcccacttttctaggttgaggaagttttcctggatgatagcctgaagtatgttttctaacttggttccattctccccatctctttcaggtaccccaatcagtcataggttcaatctctttacataatcccatatttctcagaggttttgctcattcctttttatttgnttttctctatttttgtatgcctgtctcatttcaaatagttttcaagctctgagagtcttttccctgcttgttctattctgctactgatacttgtgattgcattgtgaagttctcgtgttatgtttttcagcttcttctggttagttatgttcctctccaaactggaaaatgctatggttctggcaggcttgtaaaggtgctgtgctgatggtcttagacaagatctggaataattatttggattatcagacagagattctcattctttttctgttactttctctcaaacaaatggagtctctctctctctgtgttcttagctgcctggagttggcagtggagtgacacaagcacccctatggctactgccactagggcggcactacatcagatctgaagacagcacagtgctgggtctcacccatggcctgctgcaaccactcctggctactgcctatatttgctcgag

SEQ ID NO: 1714 - DNA, 372 bp, Homo sapiens
ggcacaggaaaggaagaagatgactgtcccctaaatcaaagcccaccacagaggacctgagcaggtcccactgttgcagactgcctgctctcaccagctactgggcatcgtctgactcagcttgggagggcccaagtgaatggtcatcagattgagcaactgggcaccaacatgtgtttcctgagggcctgctggtggccagctctgtgcttgaccatacagcaggagggactggaaaaggggacaatacagtgcctgtgcttggggagctctgggaacaaaagcccacccattaaatagtataatacccccaggtgtttctggcaggggagatgggaaaagtagccattttgaaaaacagccagctggggg

SEQ ID NO: 1715 - DNA, 745 bp, Homo sapiens
ggcacgaggacacaaaaagcattaaagtattaagtaatggcaactggaactttaacaacccttctgtccttctgtagtctgttgatatagattggatgtgtgtcctctgcagatctcatgttggaatgtgatccccattgttggagctggggcctaatgggaagtattggttcattggggcacatcccacataaatcgcttagtgacatccccttggtgataagtgagttccttctttgagttcatgcggggtctggttgtctaaaagagtatggcacctctccccagctctctcttgctccttctcaccatatatcatggtagttcccatttgccttccaccatgattgtaagtttcctaaggcctcaccaggaacaggtgccagcaccatgcttcctgcatagttgttcactcttattcttcagaatggctactgcaaatattgtccagatgtcaaagctccctactccactctgtgcccctcctacactcaacttgttaactctttgctcccgatgcaaactcacttgtcctttctgtcaccgtggatgtctctctcctcccagtgcagttaccctcctgtgatttggtttccatttcctttcctttcattaggaactttagatcattcatttaaactctcctctgtgtccttaagtttttccactagtcattggtatcgacattttaacatgctcaagtctcctctatttctccctccctccaaaaaaaaaaaaaaaaaaa

SEQ ID NO: 1716 - DNA, 1203 bp, Homo sapiens
ctcgagctgcagtgggctccacccagttcgagcttcccagctgctttgtttacttactcaagcctcggcaatggctggcgcccctcccccagcctcactgctgccttgcagtttgatctcagactgctgtgctagtaatgagcaaggctccgtgggtgtaggaccctccaagccatgtgcaggatataatctcctggtgtgccgtttgctaagaccgttggaaaagctcagtattagggtgggagtgacccgattttccaggtgctgtcacccctttctttgactaggaaaaggaattccctgaccccttgcacttcccaggtgagacaatgcctcgccctgcttcggctcatgctcggtgcgctgcacccactgtcctgcacgcactgtccaacactccccagtgaaatgaacccggtacctcggttggaaatgtagaaatcaccggtcttctgtgtcgctcacgctgggagctgtagactggagctgttcctgtttggccatcttggctccacccccatttgtgtgctatttatggtaacttgtgctgatgactctgcgatgtgtattccaaacatatgtatggaatagttccatttttaaaagtactattcaaacagcattgtcctcactctcaagtttgtcatctgaattaaactttacttaatctagtatgaaaactycttgagctataaaaaagtatgaccttttttgttataaaagctatagtcacatcacaatagggctatataaattaacaaccatatttcagaagcacttaaagcataaacatgagcccttaaatatctaaataactggggtcttttaataattcactgtatcaaaccctaaaaaaatttgattaatcccaagaaatcttcttctgattgagtaaatcaaataaatattttcaccatgaaaaagatcatcctacaatatctatttgtgagaagtttagtgctttagatattagggccactctacttagggaaagatatatttctttttctttttttttcctttttttttatttttttgagacagagtttcactcttttcacccaggctggagtgcagtggcgcaatctcagctcaccacaatctctgacttccagattcaagtgattctcatgcgccagcctcccgagtagctgaggctacaggcatgtgccaccaggcccaactaattttttcttggggccg

SEQ ID NO: 1717 - DNA, 722 bp, Homo sapiens
  SITE (598): n equals a,t,g, or c
gaatttctggagtttcaggagctttatcctaaggtggctgtgataacctggattgttgtgtaaattgcacatttggggcttggcaagtggcagatgggagttctggctgttttattaccagtaactgggacatgggcttgggttcgaggaggccacgtggctcctgacacagccttaaggatctgaggtggcccctgccctgggcacctggggtgggaagggaggtgcagggaacagggagacttatttttcactgtgatcttttcgaaccatttgaatgtattataccttgtgtgttttattcaaaaatgggtagatttgttaaacaaaacctaaaaaaaatatgagcaggagtgacagaaaacagagaccactgagtctgagtccaggttggcccctcccggtgtaaccttgatgcaacattgagcaggcctgagctggggtgacctcactgacagctaggagaggaatgagactctcctctgggtcactcggtggtaggggtgagctggggtggcctcactgaccgctaggagaggaatgagactctcctccgggtcgcttggtgtaggggttcagtgggaatgggtttggggcntctgacatatctggctcaggaagccagggtaaatttcagccttaaaggagaaaggctcgtgtcagcccccacagtctgcaggggctgtccctcctgggctcctctccacccctggtgatgtgac

SEQ ID NO: 1718 - DNA, 252 bp, Homo sapiens
ggcacgagtttgagccacatgaaagtaaagctgccttttgtgtctgtgtcactctgtgtgtgtgactgtgtaaggggtagcacacttacatggaacaggttactgcgtgtgggagaaggctcaggaaggtattcatatttatacagacggaaagctgggtggggttgcggacacactcccatagagaaggtggtgtgagcttgtctggcaggccgtgaataactttcatatggctcaaaaaaaaaaaaaaaa

SEQ ID NO: 1719 - DNA, 1195 bp, Homo sapiens
ggcacgagcgaccactcacaggtgccagggctctgacatctcgccaggcatagctaaaggttatactcatctatccccttctgcttctgttacttttggtgtgtggaacaagacccatgggagctggtgcctttggctacttggccttgccttgtctggtttgcttgacatatctgttacctaccttatctagaaaccattctcagatgggatgataaattaagagaacttacactcacagaaactccaaaacaattccaactgggcttttcttcatgttgaatcataatatactgtaatgatttactaatgaaataccattttgtttatcaaattaaatgagcaaatttaaaatactgatagccaagtgtggtggctcatgcctgtaatccccagcactttgtgaaggtgaggcaggaggatcacttgagcccaggagttcgagaccagcctgggtgacatagtgagacaccatctctacaaaaaacataaaattagccaggtgtggtagcatgcaactacagtcccagctactcaggagactgaggtaggaggaccacttaagcctgggagatggaggctgcagtgaggtgtgatcatgccactgcactccagcccagtgaaagagcaagaccctgtctcacaaaaataaaataaaataattgatattaccctttatacatggttgttgaaatagggtggtgcccttttggaaaatcacttgacagtatatccagaaatgctgatatgttttcacacaaaaactttgttttactttcagaaatttatcctaaatcttggccagacgcagtggctcatgtctgtaatcccagaactttgggaggctgaggcaggcgaatctcttgaagccaggagttccagacaaatttagcccatgtggcaaaaacctgtctctactacaaatacaaaaattagccgggcatggtggtacatgcctgtaatctcagccactcgggaggctgaggcatgagaatcgcttgaacctgggaggcagaggtttcagtgagccaagatcacaccactgtacttcagactgggtgacagagtgagactctgtctcaaaaaaaaaaaatcttaaatctagaaaactgtagatgtgccaggcatggtggatcacgcctgtaatcccagcactttgggaagctgaggtgagtggatcatttgaggtcaggag

SEQ ID NO: 1720 - DNA, 1347 bp, Homo sapiens
ggcacgagaaattttcaggatgccagcttcttagaaagcaggctctttcccagtgggtttcttacaatgaaaacaaccaaaatataacatagagctcattaaccttgccagccactgtgctaaattatttgtatttattttattaataataattatttctttcatcttaaaaataacctttaacttattaagaatgcatgcttattggatattctttagaaaatatagttcaacaaattcagccataatttcacccccagagagtgtcattcccaacgctctggtttaggatggctttggaagctggagccctatacattgggtggatattaggccaggcttttttttttttttttttttcagaagtttcccttccaaaatgtgggaaggtctagtagtttgcttggagagaatcttttctgttttcttctctctcaagcgcttgagtataagacctagttattgcctgatttgaaaaactgtatttgattaaaaagccctcaaaacgtggtcagttcagatgcaactgtgggaaagaaaaatgatatttttctatttctgagaagcatgagttgagggctcaacacacggtgaatgcccaggagccgatgttaaacaactgaaaagatcaattgaaaagaaggatccccaaacacaatttcccctgacttaatatttcaactaatgaagtcaaccctgactgagcacaggttacatgccaggcacagggagggcgctggaggctgctgcatggcatctacctgtgtgtgtgtgtgttgggaacacatatgagttcatgtgcagcggtgtgtgatgtgtgtgtctgagtatgtgtgccagtgtgacttgtgtgtgcgaatgtgtgttcatgtggttgaatgtatgtgtgtgtgcaagtgtgtgaggtgattgtatgagtgtgttttcacgcatgtgggtgtgtgactgtgagtgggtatgtgtgtgtgtgtgtgtaggaggagaggaggagatgcaaagggaaatagacactgctatgggagcccagggggcttgccagggagagtgcacgagacctgcacatagcaccctcttcctttgatttgcaaagccctctggacctcccttcctgcctcttttcctcctctattgctctaaattctgaaaccagaattgcttggggttcctcatacaacctcttgacaatcccacccttccaaaggaggataaactgactttcaaagccagtatccccaatctcaagtcctggtctctcaactggacttggggcaaaatggttacagagcatggtaggcagccttcaagatggctgtctctgaaattcaggctcttgtgggattccttccc

SEQ ID NO: 1721 - DNA, 794 bp, Homo sapiens
ggcacgagaaaagtttcagttctggggatgattttgttcctattcttgataccaagcgataaaatcaggctgctaagagaaaatgaaaaggaaatagccagctagtgtcattgaatcatatcccgaggcagtgagtttcttccagcacattttggcctcagtcctgaggctggaccttaactagtgaactgcaaactcactcaattatgcagtctgcttggtgcgatggaagtgaaaatgtcctagagagttgggtgctagtatgcattttgatagtctcctagcctgtgacccaggacagattccttgcatgcataggagtttgtcaccatgcaaaatctggctgttgttcttctgagaacatgggggagctggactgtcaacaatgagccatatcaggctgaaactgggaaactgttctgctccttcagagtcaagacaagccagaatgagtgtcaaatttccttcctctgtgcttcctcagatgtggtcagattcatagccttcagtctattctaattggtagctagcctggtgtggacttttgaccacccaccaatcaaccaactcccaccctcaccatttactgcacgagtaaagccacgcttcctaggaactaccattggtagagatgttactgagtcataggccctgagataggaatgatctataaaggccatccacgccagttcttgaacccttctacaacagtccagactcatctttgcccaatctctcctctgacaatgaaagccttaggaccaaaaaaaaaaaaaaaaaaaaaaaaaaaaaaa

SEQ ID NO: 1722 - DNA, 1184 bp, Homo sapiens
  SITE (467): n equals a,t,g, or c
ggcacgagcagaggctgattctctgtaatcctaccctccccttctccccatcagggcccttcttagcactctgggtggttgctccaaccatgcacctggaagcttgggcttgggttacaatgctctgtttatgtgtttgtctcccctgattgcctgccagtgattcttccttctcatatctcagcacttaacatagttcttgawatatattaggtgataaaaattgtctcttcttttagcactggagccatgagatacccctgagaagtggtgagcttgtggcgtgaagagctgggtgacctcctcttccttttggtggcctgagccagagatgtcacttcctcacctgctcttttctgctttcatgtctcaagctgcctgggggcttctttttttaggtctcttacactcgactaatctgcgatgggcctagaacccacaatggggaaaggacagactcttcaatncgcaggttgggaaacaaaatattcacctgcagaagaattaaattggagccttgtctcacatcttatataaaaatcaactgaaaatggattaaggactttaacataagatgtgaaactagaagaaaacataggggaaaagcttcttgacattggtctgggcaatgattttttttttttttaatatatgatcccaaagctcaagaaaaaaaaataggtgaatggggccaggcacggtggctcatgcctgtaatcccagcactttgggagaccaaggcgggcagatcacttgaggtcaggagttcaagaccagcctggccaacatggtgaaacctcgtctctactaaaaatacaaaaactagccaggcatggtggtgggcacctgcaatcccagctccttgggagcctgaggcagaagaatcacttgaacctgggaggcagaggtggcagtgagccaagatcgtaccactgcactcctgcctgggcaacagagtgagcttcgtctcaaataaataaataaataaataaataaaacaaaaatacaaaaattagccaggcatggtagtgcatgactgtaatcccagctattcggtaggctgaggtgggaggatcaactgagcccaggaggcagaggttgcagtgagccaagatcaagctattgtattccagcctgggtgacagagtgagacactgtctcaaaaaaaaaaaaaaaaactcgag

SEQ ID NO: 1723 - DNA, 450 bp, Homo sapiens
ggcacgagacacaactgggatccaagtgtatgcccttggacacgttgcttaacctctctgtgcatcagttgggtgataatatctactcctggcacattttcagcgttggctgagttacatgtacagtgcttaggccacctgggggagagtaagagtgggatacgtgaggatgtggagtctgttgcatttctgtctgctgctggcatccttcttgtcttgttttgagttgctcgcctctgtctgctccctagggcgtagatttgaggaatattcctggttcttcccaggcagcaggggctcaggctgtgctggagtcagctaggctaaggggctggtctggcatccgcgttgtcctgtcacctccttggtgttttctccaggcctggatctgtgctgtgtgggcacctgtattcctccctcctgccctcactgattctccatacctttctt

SEQ ID NO: 1724 - DNA, 1375 bp, Homo sapiens
  SITE (825): n equals a,t,g, or c
  SITE (1346): n equals a,t,g, or c
gaattcggcacgagcaaccattagacattgaagtgatgaatcgttatccgtgctgcacttagaccgaggctatccagtagtttatttatggtggcagtgtatctcaccaaaacactatgctttccagcttccctttcagcgacccatgttctttcattgcttctggtcagtgaaatctaagcaagtattttttgggtgagtcttccaggaaagtgtttaggggtgtggttaatttttgttctgccaggaaaatgagtgggatagctggaatcatgatagtcatggcatctctgttaatgtttttggtgcctttgaacagaataggaagaatcccccatctttgcagatgagttagaaaatttcctcctctgggtagaaggaatccctcagaatacacagcccccactcacttcttggtcaggtgtcttcacagtaaataaactacacaactgtatggggtggcctggacagccatattggactatgaagcaggaaaggaagccatgctctaaagatagcaaacccaaggagaaaagcagcctggtccttgctgaccatggatgtgccatatcagccctgcattgactacttccagacttcctttatgtgagagaaaaataacatttattttgttactgttatttctgatttattttactagcagctaattgcttgtwaagttaagactacatgatatgatttgagaattgctatcattaattaattaagcaattgttccttgtgaattctgtatcagaaattctatgatgtactagagataaagacagaatttgcaatctaggatgtgaaagacagatgtgtacncatacaggtaattatagcataatgtcatatgcttgttcagtttgcatgctggatagagacatctaggcaaaaggttagtggggactgtgctttgatagactgcatgcmcccagarggaaacatatcctaattcatctccacaaacggggtacctctttttaaaaatgcttcaaccaataataatgctttattatcatttagttcagtgattaccaaacttattttagcagccattagccttctttgaaagaataataatacagaaacacaacttattagttcagatgttttggagagatctaactcagattagatctaaaagagaatttgctggttaatttaaccacacttactgtaagagagttgggcacagcctgttaagggagtacatagcagggtttttagaaaaagcttcacagaggaagtgatgcttgaggtgaatcttgaaggatgattttaagaaaaggacaaaatgggaaacagcatactatgctgaggaaagcggcacgagcggmacgacngggggcccgtacccaatagccctttggtg

SEQ ID NO: 1725 - DNA, 328 bp, Homo sapiens
ggcacgagtaattttctcacttttgatagaggcatgggtacagagaagtatttttttttagtttaagtaaacaacagaacaagcattcatatgagacaactgacacaaacctgagggagacactagggagtggaggggactgtggtgcactagagaccgtgtatcccttcttaaggggaaccgtcccttctcagctcagctgactgttgccttggaggaaggcggagctggtatttctggatcttcctatttttcaaaggaagttaaacatctggtgttttatgtgaaatctttccattttctaatattacctgtttggtcgctgtgc

SEQ ID NO: 1726 - DNA, 649 bp, Homo sapiens
  SITE (567): n equals a,t,g, or c
  SITE (588): n equals a,t,g, or c
ggcacgagctgcccccaacaccagtctgatgggattgtcctgaggttggactccgttattggaattctaagccccttgggtggttttwatgtgtagccagggtcaagaaccctgcctgatagagtcatttggggcacacctcagcacagggcccagtacataggaagcccggggatgttagctggtgtgatggtggctgctggtgtcggctgatgtacagctttgtgtgagaggacagcttggggccggaatcctcccccatggctcctctttgccagggaccctgtgcgagccccatgctgacgtccctacccgaattctcctggaagttcctcctgtagcctcctgggtccccaggtggctccctctgacctcactgatgatgcaggtgcccaggtgtgccgtttctgacgcagggcagggccagggcttatgcagtcgggtaatgggctggaggcgggccttagggtggaagtcagtgtttctgtcccctgytgcagcaagagcaggataggacatcaggcccccccccccccaattccccagggaaagaaaacccaaccaatnccaaacccagctcccactttntcaaccacagttgcagagggccctgctgccttctgtgaaatgatggggctggacggctcag

SEQ ID NO: 1727 - DNA, 1521 bp, Homo sapiens
ggcacgagctccacttgaatttgcttagggacctcttcctccatttgactaaactcccagtgccgtgcaatggggtcacttcttgtctttccacggtcatcctatgcactccttcacctcatcggagtctgattccttatctcatgctcagccttgtggcgggcacgtgacaagcatcacctcctgaatttctcatggcaccggcgcaaggtacaggctcttgacaaccctgtgttatgtgtcaggaaactgaaattgaaatgaattatccatggctaaatgcattatccatggctaccagcagggaaatggaaaatatttgaaccccagaactgttgatcgagaattctttcaagttttatatttggcctcttctccttaatttagatattcagtcctatttccctgatgcctacaatgtgccaaagtcgcttatacttctttgcctttcgagttgctgttttcttgtctcaaaacatcctactcttgagttctttgtgcggttaatattttgtcatcctttagttctcagctgaagtgtcatattctcaggtaggaattttctacccacttttccataagcagaatatccttagtttctgtctgctttcacagagtgcttactgcctatttttaaatttactacactctataattatgttactgatctggttactgtcacctgatataattatttaatgtgcctggcttagtgtatgtagttgtgcagtaaatattcattgaatgaataaacgttaaaggttatgaaactgtgacgtaaaaatcttatgaataaaaaatggaagatgggaaaagtcagaaacagcttcattacatgtgtaaaacacaaaccaattatgtccaaagaaaagcaaatattatttccacagaattaataatttaatattatgtgaagtctgggtcattgaatacttgtaaattggcaattgattctcgatatattcctttaaagttataatcttcttgaagtttaagggaagaaaggtgctatgagagggcacaatggatgttgaataataaatttttaaaaacactttattcttagaagtttcactttggtttatcttccttagttaaatttcctttgtagcaaatgtgtgtacccttgatcacactgaagaaaatttggatgttgacagcacatggaagcattgttttcagatatcttcaacttagcaacttttggatgtcaggctccaaaaacatcacaggagggaaaataccctgactttattgtttgatgaaaatttgtggattgtgcaattattttgggtttgtatgatttgcttttatttactttatatattacatacagtataaaatgtacactttatctactttttataagtcacaattttatgggttttgctttacttatagcgttttcctcaagcaattcttcagatactgagcatcagaaaccaagtatttggaaactgagaaatgtgagctgaacagctgagtgaatcagacagggccctaatgaaaaaaaaaaaaaaa

SEQ ID NO: 1728 - DNA, 653 bp, Homo sapiens
gacaaaatgattatgcctttatgtgttgtgtgtatcgtactaaacccagtgctgtgcatagaggaaattttacagtctatagtgttacataagtactggggccttgcataaagtagatatctggtaattatttgttgactactccatgtctagtcaaatggcactttaattttatgttttggaacagttcagtattaaggattagtaataggaaaaagacttaacattttaattctgtgaatttaagtcattgtcttctgaagatggagtactttaaaagctccaaggagttatctggaaaaaaaatgtaagcagctttccatcaaaagacattatggttaaggtttgtactgtaggcctggtgtggtggctcacgcctgtaatcccagcacattgggagactgagtcgggtggatcacgaggtcaggagatcgagaccatcctggacaacatggtgaaaccccgtctctactaaaaataacagaaatttgttgaatgtggtggtgtgtgcctgtggtctcagctactcaggaggctgaggcaggagaattgcttgaatccaggaggtggaggctgcagtgagccaagatggcgctactgcactctagcctgggcgacagagtgagactctgtcccaaaaaaaaaaaaaaaaa

SEQ ID NO: 1729 - DNA, 687 bp, Homo sapiens
  SITE (664): n equals a,t,g, or c
ggcacgagagccgaggcctgaattgtgcaaagagtcaaacaggaatgcaatcattcaaaataaaacagtgtagaagtacatttgaatgaaacattatgggaataacaccgaaaaaatacaaatattttcttgagtctcatgtctttggctcgtgacctgcggcatcagctggccaaagaggtcaatcactggcatgtcaatcacgcaggcctctggccatggtaacagcagtctgtcagccagtcctcactgctcctgtctttgctctcctgctgccagctgtggcccgaagcccgtctgtcggagcagccttggagccagggaaaaggaaccgtagggtgaagagaggctgtggggtgccatttatgtagaaactgggcgcctgacttggctcttttcccaagctgtccacctaaaaaatgctatgtcgaatatcaccaatgatcagaaataacagggcagacttcgactctaaactaaagcttgcagaaagtttgatgtatgtgtgtgactatgctatggatataaagcctgttatcattttgaaaagggggaactttgtaaggtaagtaactttccaaataagtgattaaaatgttgataagcttttgacacatgtggaataattttttgatagatagttggcctgaatttcccttatttntcttgggaaaaacaaagcggatt

SEQ ID NO: 1730 - DNA, 548 bp, Homo sapiens
ggcacgagcggcacgagggcgtggtcctaagcagcacaggatccccctcggggacattcgcgggccatcctcctgctccggttctccctggggacgctccacgcctcaccgcagttgtagggcacagagacaggcctcaccaaagacgaggccagctggctggtcagcatgggaggagggcgcccaggcctgggcccggaggagcagccctcctcccacgctgtgggccctcgctgtggacccgggatcctgtccctggtgagctcatggactccacaagtgacactccatttcccagatggagcctgaggctaagaagcttggttcttgttctcatccagggcttgagcccagtgctgagccgagtctgaccctctgtccgtgggtgcaccggctgagtgcagctgtggccccaggctctgccgcagctccctggagagcaagccgcacccctggttgctgccccggctcccagcaaccctggagatctcttgttgtcacagccacttgggccttggacgacccacaaatgagagctaagcagttgc

SEQ ID NO: 1731 - DNA, 872 bp, Homo sapiens
  SITE (694): n equals a,t,g, or c
ggcacgaggggaaaaggtgagaggagaagcaaagaagtggaacaaagacttccaaattaaagagaccacttaagaaaaattacatcaatgtttatactacttataatgtacctcatttgggaaggaaaggctgttagctgctacttgttaccacctatcaaagcctctgtggcaacagtattgacatttaatccttggaagttctgaagtttttacaaacttggtggtgaggttgagttgatttgttttgcctcaataagaaatgttgatatatggtggctggtaagatggccgaatacgaacagctccggtctgcagctccgagcgggatcaacgcagaaggcgggtgatttctgcattgggtacccggctcatctcactggaactggttggacagtgagtgcagcccatgaagggtgagctgaagcaaggtggggtgttgcctcacccgggaagtgcaggggattggagaactccctctcctagccaagggaagccacgagagactgtgctgtgaggaatggtgctctccagcccagatactacgcttttcccaccatctttgcaacccacagaccaggagattgccttgggtgcctacaccaccagggccctgggattcaagcacaaaactgggtggccatttgggcagacaccaaactagctgcaggagtgtttcttcatactccagtgncacctggaactccaacaacacagaaccattcactcccctggaaagggggcagaagccagggagccaagtggtctagcccagcagatcccacccccacggagcccagcaagccaagatccactggcttgaaattgtcgctgccagcacagcagtctgaggtcaacctgggacactcgag

SEQ ID NO: 1732 - DNA, 1782 bp, Homo sapiens
ggcacgagcggcacgagcacatattgatcataggccatctgtaagcctcttcattatttgatcatcatgaatcgtcgagtctgtgttctcatgctgttggtggcctggattggaggctttcttcactcattggttcaatttctctttatttatcagctccctttctgtggacccaatgtcattgacaacttcctgtgtgatttgtatcccttattgaaacttgcttgcaccaatacctatgtcactgggctttctatgatagctaatggtggagcgatttgtactgtcaccttcttccctctcctgctttcctatggggtcatattaccctctcttaagactcagagtttggaagggaaatgcaaagctttctacacctgtgcatcccacatcactgtgatcactttattctttgtcccctgcatcttcctgtttgcaaggcccaactccacctttcccattgataaatccatgactgtggttttaacttgtataactccaatgctgaaaccactaatctatgccctgaggaatgcagaaatgaaaagtgccatgaggaaactttggagtgaaaaagtaagcttagctggaaaagggctgtatccctcatgagaatatgactttcattctttcacagaagcaaggaataatttcactatcctatcagattacatttctgttatcattcgcctttagttatttagcttacttattctgaagcaattatatacattaatatttatgtaagtacaatatgttaagcccattacagaccaagataattgcataggtttaacagtgtatagtgtttttttaatcatactgtgttaagattctttagtagtaacgatatttagttttatttcaagctgtttttaattttaaaaatcatttatttttcttttgtatttagtttaaattgacaataatttagtatatttatggagtacaatgtgatgttcctcgtgccgaattcggcacgagctcagagccattgggtagcttgcaaaggcttgcaggtgccattaaaaggcagagccaggacgtaaactcagagtggagaggcttatctctctccactccctgatcgtctcatccccgaaccctagactagagggagctttataggctgatgcagaagttcccaaacttgtcggcacactgggagcaccaagggagctcccaagagcactcatgcctgtatccaaccctagagatggtgaattaatgggtacagggtatgaccttagctttggaaattttcagattcccaggtgatcctaatttgagacaagcttgggaaatactggtaaagtcataaagaacaagttctccgaagcccacagacctaagttcaaatcccagattctacacttcctagctgtgtgaccttgggcaaaatgcttgatcactctctgccttggtttctccatagcatctactccacagggatgttgtgaagattaaagaataaattataaagcacttagaagtgtttgccattattggtttcttaaaacagcaataaaccaactaacaaaacagggacccctggcttctgtgcctgggtgtccaggaggaagaacatgctgaaaaataccaccaatatagagagaccaccaatcagaacttgggctgggaggagttaacggaatcttcagccatcagagctggaaaggggccttagacagcatctctttcctcaccaggtgcaggttgtatgggtaataactccaaagaagctaaatgacttgtccaaagccacacagcaataatacactg

SEQ ID NO: 1733 - DNA, 702 bp, Homo sapiens
ggcacagtcacaccgctaaattatgaaagaaataattatcaacactttctaattacctaacaaagtaatttgggattcaccgtggggctggcgggatggggaaccaacatccacttacagccagggtggtgtacgccacaccgcgagggactggctgtattggtagtagtggcgatggggtgggggctcttgtgcacttttttgtacctagcaccccagaagacagaaggagcagcggcagatcttgcctccactagccctgccccctaggcctggtggcgcgcgctttggccactggaggtgaggaagatcctgggtggcaacgagagacgtctacacatagataagggagcctaccacaggcctgggtttgctgcgggtttcggtgtcccccagggactcctaaactctggaagtcgcgctagacctcaggaggccggaaaatgaccacctggcgtcggtggctccagcagatctgagcccctaggccccctgggctccacgctgagccgcgctctcggggcgagtgagcccggggctctccgcgcatggggagtggagaagggagggggaggaggaggaaggctgggagggaaagaggatgtgtgtgttgggggagggaaggtgcagccgtctttcctgggaggagaagcgcgggttcctggctctccacgcgcactgctttaatcagacccgtgcagc

SEQ ID NO: 1734 - DNA, 917 bp, Homo sapiens
  SITE (610): n equals a,t,g, or c
gtctatacagagattatattttgtagaaggataatccatgtctcactgccctctcaaatcaactcctcaagctcttatgcaacacatacacacacacacatttaccaggtgtgactaaagtagataggttgatcatttacatgtaaaaataaacatttagtcacctcccacactaacaggcccatgctgaacctttgtatcactttgctctttttatcagtgaccttgaccaatatccactcaaaccactcctcctactccaactacttgctgtgatgggagcaacacacacacacacacacacacacacacatacacacgcacataccacatacccacccatacacccacagtcccttggcagtaaagtaactaggatgacccagaagacccatccccccactgagaagtgtagaagccatgagtttcaccttttttgaaacatctgctgatttacatttgctaagatagttatgtattagctagccacctaacagtgaaaataatgacatagaaggaaaggggagaataaggcaactttattccttttccatccagtccttccttcttcgcctgttggtagaatgtgtttgtgtcaataagtgaaatnaaaacagttgagtacaagccaggtgcggtgctcacgcctgttaatcccagcactttggaaggccgaggcaggtggatcacttgaggtcaggtgttcgaggccagcctggccaacatggtgaaaccctcatctctactaaaaataccaaaattagctgagtgtggtgcatgcacctgtagtcccagatattaagaggtgaggcaggagaaccgcttgaacccaggaggcagaggttaccgtgagccgagattgtgccactgcatcttgcctgggcaatggagcaagactccatctcaaaaaaaaaaaa

SEQ ID NO: 1735 - DNA, 1260 bp, Homo sapiens
ggcacgagggagggcattctcagcacctctgtgaaatgcccctgaaaatgcatccagaagatgcatcccctactgttttatttggtgaagttattccttgaggccagagataccacctgcattattatgtcctgcccgacgcctggcatccaggaggctctcaaaatcacttgcagttgacataggtgaatatcagcatgtgcgccttgtgttaaatgcgctggacacaagaaccagacagagcagttctatcttaagggatattcaagaggtgcctcttacctgtggggtcagaggacaggtcttaggattgtgaggtcaacccttgtctaaggtttcactgggaaattagggtcgggtggacttctcctgggccctcagtcctcagggtcaatctcatgagcatcagctcttctgcctcctccctcttgaaagtgagagatgagatggtaggggaggcatccatgagcacttggaggagaaacaggtactggggctcctgctcacagcatcataggaattcctctgtatggcccaggtgcttgggatgtcaattctgacctaagagagtgttccaaacctttgtgtctcaaatgtggtccaaggacccatagcatctgcatcacgtgggagctcactagaaattcagaatctcaggtctcatgccaaacccagtgaatcagagtctgtatcttaagatccccaggggatttgagtgcaccctaaagttgagaagcactgctcgaaattgggtcctagtagatatttctcctccatcctaccctccatatgtggtcttgccttatgccctcaagggccctggcacctgttgccctccgacaagcctggggggccgccttgaaggtacatatctcattgagacaggagtgtgcctcacagaggctccctagtagtcctcaaccccttccatgcctctcctgttagggatccgctgtgggctgggcactgtgcaggcccttgcagtgagatgactcagctccaggtcctgcctgcagggcccaaccccggcttggggtctactggaagagacaggccacctacctccctgaccactgggtgatataaaatgtgattagacaagaaccaagaggccagaagttctgggaggcacaatgccttttagctggagcagtcaggagagcgtcacaggaggtagcatctgtgccaggccctgaagcccaggtaagactggttacatgtatgtggggaaggacaaggcaaagcggcaggaaattacat

SEQ ID NO: 1736 - DNA, 859 bp, Homo sapiens
gattgattagtttaactggccaatacttgttgagtggcttacaagactatagtagttaaaagcatgagttttgttttatcacttaaatcctggcaaggacttattaaccattcgactctgggcagggttacttaatatctctgcctcacaacattttccgtatctctaaaatggggttgttcaacaagaaatatactcaagtttaacatggcaacaatgttcaccaaaatcactaccagtatcgtctttggtctgtctctggcattgcctatttcaacacgggcatgatcaatgtgcatgatcaatgacaatgtgatagcaagggtctccatcatatcaagacattgttacaatgtcagtaatacaaagcagtttggaatttattgttaataacataatattcacttccaaaaacaggtaagcaatttagatctaatctagggtgaaaaaacctacttatgggctttatacattgaagatgcatcccttagttgaatattatgacagaaaaatgttatcaatgctgacattaaaaactgttattatgtgccaattattaggaaattttaaataatttaacaggataagattaatagttaaaccgaacactaagaaagagagtattagctacttgacgaagaacattgtatattttttgagactatgaatttttataaaatgtcaaataatacaaagcaaaatactactaaaatgagatattataattctcatctttatggaactgcttagtttcatactcataacatatataaaataataattaagaattacagaggccaagcatggtggctcatgcctttaatcccaagcactctgagaggctgaggagggcagattg

SEQ ID NO: 1737 - DNA, 1516 bp, Homo sapiens
  SITE (1025): n equals a,t,g, or c
  SITE (1144): n equals a,t,g, or c
gaattcggcacgagaaagaatgaactgtttatgaaagaaaccttttgaaagacagaatatttttgcctgtgggccaaagctgaggcaggaaaacaaagggctctttcaaaggcttagaatatgatggaggatggattctgactttccaactacaaaaataatgatgcttttagcatcaatacctgcattactccagggagttgtaaatatactttacagacacaggctgggcctttccaactttttacctcagtgctctttgaactccttaaaggggagtaatgttggccccaatttgcacactgagaaactgaggcagaagaaatctaagcaatttgtcccatgccaccagataacttataagtgaagtcaagaatagaacaaactgaaactgaatgcttccatgacacaggagcatctgccatctggaatagttccttctttttctctagttgatctctttcttttctgcttttatctttcattttctgattcattaactcttagctcttgtcaatgaattgaggccagtgtgagtgttgacatgtccatcagaaagtctgtgttggtccaggtgacaaagaatctacagcttgtatcagccagcctgtgcaggttgttgcagttcctttgaacaatattactagcaaaactcatcttgaaaacaatattctttcatcctaacctattttgtwcttgcagaaacactactgtaaagtacagatgctccttgacttacaatacagttatatcctgacgaaccatcataagttgaaaatatcctagttagaaatatattttatgaacctaacctattgaacatcataacttagcctcacctaccttgaatgtgctgagaacatctatattagcctataattgaraaaattaactaacacaaagcctawtttattatatggtgttgaatatttcatgtaatttattgaatactgtatagaaagtgaaaaacaaaatagttgcatgggtactcaaagtatggttgctactgaatgcgtattgctttngcatcgtcatgaagttgagaaagtctacgttggaatctacagcttgtgtaaaccagcttgtgcagcttgttgctgttcctttgaacaatargatattrgcaraacttatcttgaaaacnagataaaccatcacaaattgggtattgtgtgtatgaaattttacatttgtacatttaaaaaatatccggtgtttggctttttaaaaaaataaatggtacctaaatagttcttaatttccccttatgggtagtctcctagctgttaaatgtacatttatttactcattcatttttttatttgacagctatttgttttgaatttacttttggcacagcactgggctttgtaatgaatactgtacaacagatcaaaatcttatagaagattttaataaagattttataaagattttaataaagattaagtctttaagatttaaaaaaattttaatttctttttttttttttttttttttttttagctagtctcga

SEQ ID NO: 1738 - DNA, 508 bp, Homo sapiens
  SITE (255): n equals a,t,g, or c
  SITE (473): n equals a,t,g, or c
  SITE (502): n equals a,t,g, or c
agctggcatgaaatatgttttctccagtttgctacatagtcctctcttctgatgtttatcttttttttttgactaatatttgtattggtaagaggtgctttggaatttgcacacatgargaaataaagagcttttttcctctacatttctaatattcagctgctctcttacctttcttgtccaggtattttgacttttaaattctctaggtggtttctctttctctttctctttctttcttcctttctttctttnctttctttctctttctttcttctttcttttctttctttcctttctttccctctctctctctttctttctttccttccttccttctctctttctttctttcttgaccaagtctcactcttttgcccaggctgaagtgcagtagtgtgatctcagctcactgcaacctccatctcctgggttcaagcgattctcctgcctcaggctctcgaggggggggnccggtacccaattcgcccttaataatgantcggaa

SEQ ID NO: 1739 - DNA, 311 bp, Homo sapiens
ggcacgagggctcccacagccctcctgatgaagtcattgctgctcgccatagccttccagaaacttcttggctccccccaccccattctccaacctcacctctttgcatccctccatccctcgcccctcatagtccagggatcctgaacacctgtgcttccccaaacctctcccgcttccaggcctctgcacacgcagctccctctgcttctccagcccttcagaaatgggccagtgacagagctctgtgcttcccacaccgtcgcctcttccggggttcagaggattcaaggccccacttcccagtctcc

SEQ ID NO: 1740 - DNA, 1338 bp, Homo sapiens
gattcggcacgagctgggttccaggttcccagggctggctgtgagctactcaagggcagggctgtatctcgtttcctgccatgcctttgtgcctagcacagtgccaagcacacggcaggtatctgaacagtgtgggaagagaaaaggtggaggggagatggttgggggtagactgtgagagtggaggtggctcaacgctcccacccccaacctcacacacagcacccttagcccaggcactgatcccaggagtctaagaagctgattagaactgcccatggctgcagctaacctcggaactatgccccaccacctgctgtcrtctccctgcccccactcctacttccctctctcctccctccccaggggtccggggcagcctccccctcccccaccccatggtgagaaatcccaaagactcctgggcctttctctgctgcccggctttcccgcctcccctttttctttctcttccttctgctttgcctcacattcaatctctccctcccccagcctggtgaatccaaactgaaaaaaaaaaaaaaaaaaaaaggcccacacaacagcttcaacagtgaaaaataaccaatttaaggagtaatcgctgctgtaatgattgtctaagccctgagtcactgcagaaaatcggactgaagctctgggactcccaggctccctgagagtgtcatatgggtttttgtttttgtttttttaaatatccaggacctcagtgtctccatctgtaaaatggaaggaatattatcagcccaaaggaactgattgttaatctcctgattttccctggggctgggaatcagaggttaaggtggtccacacagttggcttgggaatcaccacgggacacattcttctaccacaggacccatgggagaaatgtggtgcctggcaggtgctgagagactcacagcttcgagggtctctgggaaaggtttctagagattgtggtgtttaactgagctgggaaggatgaatgggtgaatgagagctatgggaagtgatggagtgatggaaagtcagctctggaagagactagacacctcatcttgccctatgctctcattttacagatgaagaaactgaggcctgaagggcttcaggaactgctcaaagtcattagtggcagagcccaaattagtggcagagcccacattagaaaacaggtgccttgactcctgctccagtgctctttctttctttctttctttttttagacggaatcttgctctgctgcccaggctggagtgcagtggcatgatctcagctcactgcagtctctgcctcmtgggttcaagtgattctcctgcctcagcctctcga

SEQ ID NO: 1741 - DNA, 1736 bp, Homo sapiens
  SITE (369): n equals a,t,g, or c
  SITE (605): n equals a,t,g, or c
gaattcggcacgaggaggccccacaatgtcccccaactgccacttgctggagaccagaccctcagcctccctgcttctgctgggcatccctctgctcaggggagcatcttgaggctatacaggtctcaggtgcagctggcagcaaagagacataggaggaggtggttgaacccaccctgcaatgtccaaggtccaggttaaaccctgagagtgggtgagtgtgtctggtcctgtgactcagtttccctacctgtaaaacagagcttcaacgagatgaacgatagtcctgagcataacagtccacaggggcccacgagccgcttctgcgtcccaagccctcgtttctgcatccwgtctycatctgctcanctctgaatgaacccatggtcccctggaggactakgtgaagaaataccctaaacacctccccaggcatcgagctcatgcctccagcacaaggcctggggctgtaacgcagggagctgggctccagcttgaatgctgctcttyctttctttctttttttttaaaaggggtgaaatccacataacacaaagtgaaccactttaaagtgaacactttcatggcgtgtggtacattcacanattcatggatgctcgtctcctatacctgagctatatcctgcctgtcacaattccataggaagtaaaaccagccactttctgtaaatgggatcttaagcagaactctaacactgtgcacaraaagtgtgactgtgctgggttcgaggaaracagggtctggtctgtgtccccagccgaatctcatgacaaattgtaattcccarcgtgaagggarggamctggtgggaartgatgggatcatggggaargattttcccctcgctgttctcatgatagggagtgcgttctcgtgagatctggtggtttaaaattgtgtagtgcttcccctcctttctctgtctctctcccgctcgaccgtgtgagggccttgcccactcccccttcacctgcgtcatgattgtaagtttcctgaggcctccccagccacgcytcctgcaaagcctgtgaactttgagccaattaaacctcttttctttataaactacgcagtctcaactaaagaaaggcagttctttatagcaatgtgagaarggactaatacggagaagggccacctgtcctttcaaaggccccgcccaggaccctttgaaaccagagcgtccaggtgccctctcggatgttttctcatctcgggagtcctgtggttttaacgttcttttacgatcacacctctagagagtgctgattccctggataccacaggacctccctgaggtgtccaggacagagcaagcttagatattaggcagaggttctaggagctgtgcacccctgcacccctggaccagagagtctgggtgaggaagtgggggcgggatgtggggcctgatctctgggctgctgaccacagaaagggctcacaccgggaagtggacttgggcctgtccagggcagttccggggcagaaatgggagctggagatgtttgtggctgttcccgtgaggatgctccagccccaggaggccgtcggggagaggccggtgctgtgtggaaccacacatgtgtgagccagtcaggagactgctgtgtcagtcaggaaaggccaacacagtgcactgtcctcacactgggaggaccggcttcccaccccactccagggctttgtggtaagcctgacgcaccccactcgta

SEQ ID NO: 1742 - DNA, 522 bp, Homo sapiens
  SITE (436): n equals a,t,g, or c
tgtaattggaaatatcaactcatgttgaatgtgtttgctgtacctgtttatgttttattgattattttctgggagaggagggctaaaaaatacactgcagagaatagacaatttatgctataaatataattgcaaatgccatgaattaaaactgctgctggatagttcaaaacaatggtgttttgagaacctgaccaaaggcagtctttccaagaatcagtcccgtattcatcaagtgcactcatagagaggcagggctccgttcttaattcctccctaaatatctgattcagacagagaaaatgtgtctcatcttccttccccattctcagttcctatcccttgtcaacgcaaacacaatttatgcaaatattctttctttgtttctttcttctttctttctttccttctttttttttttttgatggagtctcantctgtcgcccaggctggagtgcagtggcgcagtctcggctcactgcaacctccacctcctgggttcaacctctcctgcctcagcct

SEQ ID NO: 1743 - DNA, 591 bp, Homo sapiens
ggcacgagaaagaactattattactcccgttttacagatgaagagacagaggcacagagaggtcaagcaagcggcccaaggtcacagggctaagacagaacagagccaaggtctgaggccaggcaaccggactccagcattctaaacctccatgcagtcctgcctctctctcttcagctcatacccaggtaagcaggccaagctcaaaaatagcagccaacgccattttcaaactcatgctttatgaatcttaaaatacttacttgtttcctagtttcttacacctttccatcatctcggtcagcagagcctattatgttaaaaataataataattaaaaaatcaggttggaggagctaaagtaacatttctaagagatttccaaagtcgaactctaaaatgaatgtagccacatgtccattaagataattctcagtgtctggtagggatggggaggcttggggagaaaaaaattcactttcattgcatttagtgtaataaatagaaggagggggctgggtacagtggctcgcacctataattctagcattttggtagaccgaggcaggtggatcacttgaggtcaagagc

SEQ ID NO: 1744 - DNA, 610 bp, Homo sapiens
ggcacgagggaggaaagagggtggaatctggacagtatgaaggatttgtattgtacctgtaatgtttgatgtctgaagctgggtggtgggcatggctgtttgttattctccatccttttggtatgcctgatacatttcataataattttaaaaaggacaagactactgcagagaaatgcatagagtgagctctgtttgggtttttaaaatgattcctacatctatgcttgcagatgtaagcaccagccctggaaaacattgcaagggattcttagtaggcccaagctttgggaaagggccaagggggctggggagttgattaggaggggatacatgctttttcctgctgccttttgaattttgtaccacacgtagtattacttattaattaaaaaataatctgaactagccaggcgtggtggcacatacctagtctcagttacttggaaggctgaggcaggaggatcacttgagcccaggtggttgcggccagcctgggcaacatagtgagaccctgtctctttagaaaaaacaggccaggcatggtggctcacacctgtaatcccagcactttgggaggctgaggtgggtggatcacctgaggtcggga

SEQ ID NO: 1745 - DNA, 695 bp, Homo sapiens
  SITE (2): n equals a,t,g, or c
  SITE (25): n equals a,t,g, or c
tngccgcccgctctagaactagtgnacccccgggctgcaggaattcggcacgagcccacctcagcctccctagtagttgggattacaggtgctcaccaccacactcatctaatttttgtatttttagttggccatgttggccaggcttctcttgaactcctgaccctcaaatgttctgcccaccttggcctctcaaagtgctgggattacaggtgtgagccaccgcaccaggcctaaaattaaatggattccggttgcaggtctttggctcaggctgttttccctgatgtttctgcaggtcagttacttatggactgatgtttctgcaggtcagttacttatgtggttgtgcagatggccaaccacagtggccggttacttttctcagggcacctgccttctagaaatgtatcctctctcctctcccttttcctctttctgtcagagaatagcaggggttgtggaggaaagctgaattctaaattagtcatttcgataattaataaggctagctagaggtttgatgagaaaaaaattgctgcttttttttgtaagtgtaatgtggttagatataaagtatccaaaatttagacagatctcaaaatccaaaattttatttttccctcaaagccatgcttaagtttactcagaataaccacagcatttttctgaggctctgcaaataccttctcgag

SEQ ID NO: 1746 - DNA, 568 bp, Homo sapiens
gcacatagtgattttctcctgtgctttgtctccagggacattggctgctgtcttctgacccaccctgtgtggctttggcgtctcctgtgacctaccagtatgggtcttggcctcatcctgcctctttgtctttctggcccaccacccacagcttgaatctcaggctccaacagttgcctgacccccagattctgatgacagcctacctacttgttcttcaggccctcaccagactcactgcccagacacaccacacaggagaacatgaaagggtgaatgaatctttcatcatttgatgaccaagttggcattcttttacattccagccaccagaggaaggtgtattttaacacaattgccctcacatcctccttaacaggatttacataagtttattaacacatatgtttctacaaaatcaagttttgagaaccatttttatacactgatctgggacattttggggatatgaaattaactttagcacacacagcaagaagaaaaccgaacaacaaattctacaaacaccaaatttgctgtgaaatttacatttcagattctcaagaaa

SEQ ID NO: 1747 - DNA, 468 bp, Homo sapiens
ggcacgagaggccctggggtggcggggagaggaacagggagagcatgagacagacccacagggctgaggccaaccctgcttttatttcacaagagcttctcgatggctgacaggagctcgggtttcaggatggagtccggctcggcccccgcggccttgatgtcctccagcacagccatgtcccacgagaaggtcaggagggcagagggcacctgcggtaggggtaggccgtcactctgagaccgagagtcggcccttgccgcggcagggaactcagcgggcaacctgggcgcggggatgccccggcctggaagccatctcagctggtggaggctgtggctcgcacccaggcctcctgccctgctcctccgggactccaggacctaagcctaaacctactgcactagtaacgcacgtcaccgctcccatttgatggggaaactgaggcgtggagtagttatgaacttg

SEQ ID NO: 1748 - DNA, 1138 bp, Homo sapiens
ggcacgagcgagtattgagttcattaatggttattatcatcgtgtttaatcagtaagtgattttaactttcttcattatcccctcctcttgtgtaactgtggataagtagttcccatggattgcttcctctgtcttcttagcgagaaatatcggtggctatgagatcatagctcaacagcttcaattctgtgctcttcctctgagcaatttttcttcttttcagactttttccttttcttttcccttccctttttttcatgttcttcctctgcaataagaaagaatttagaaaaaggaatgtaaatacaccatttggaaaaagtagaaattaacttcggttataagaagacttgggtgctcactaatgtaacttttcctgttggctaggaaagggattacacctagcgaaaggagacagagcaaggatgagaggacatttgcccactgagaagagactagtgaacactcgtttcttcctaggtaatgttttggttcagtatcgcaaaggctaatgacatcttttgtaaggtgtgaactgcctctgaactaagaggcattaagatgatgagcagaaagagcactaagattgatgttaaaattaatggcacgtgagaaacatgtcacatataaagacagagaaagctgtagagggctgggtgctcaagacaacttgtgatagattttgggaggccactgtccacagactgggatccataagccttaggggcattgtcacttggtctggtaacccatctcagtctgttctggggtccctggacctactgtgtgagatatcaacataccatttcttaggcactagttaatatttcctgaaataaatatgttaaacagtccaggtgcaatggatcatgcctgtaattccagcactttgggaggctgaggtgggcagattacttgaacccaggagttcaaaaccagcccggccaacagggcgaaatcccatctctactaaaaattaaaaaattagtcaggcatggtggcgcgtctgtaataccagctactcagggggctgaggcaggataattgcttgaaactgggaggtggagattgcagagagctgagatagcaccactgtactccagcctcgacaaagagagactttgtcaaaaaaaaaaa

SEQ ID NO: 1749 - DNA, 898 bp, Homo sapiens
ggcacgagttgccctttagacttcctggcctgatggactgttccaagatgcagtcattctcctatggtctttctggagatgtcttctctagactgagcagccaatgtgttgctatgaagctctggctagctgggtaatgcacttccttgtatttgctcttcctcgttccttgtctcatgtctccttttccctgggattctaccctacactgaagtaatagcacacaaatttttgtctcaagttctgttgtctagggaagccaggctaagacatggttcaatgggtgtccttagaaagcagacctccaaaagagaactttgggtctccaccgatggtggcaaactgggtggcccggattcctggcatgcagtgatagtacaattgccaatatgttatgtggtataggcagaaggcaaggtattggcatatcaagtggctgtgtacttgatcagtacagagggaacgataatcataaggattgtgttacatggtggctgcctttgatggcttggaagatttgcaaaaaggcataacagactcaggaaagctaattgcccacttaaaatatgctgtgaaagtcagagggcctctatggtagccttccaaatcctcttatctactgcagctgcagggcaaatgatggaggaagaaaatcatgttcagggtttcatggtatagggttgcaaacctacaaaggagaaaaaattcacagccttaaaatgtctcctgtgtcaatgtgaaggctttgatagggaaagagtaggaacctgaaacctgcaaggtggacatttgagtggacaaatctaataatctgaatgtccaaatttccctgcctctctggagattatgcagtctcctcagttggagactatgcagtatatcactcgatgtactataa

SEQ ID NO: 1750 - DNA, 764 bp, Homo sapiens
ggcacgaggtcctaaggtgagaaggagggccactagcataaaaacaacttgaacagaacttgcttcacaagccaataaattctaataacaaaaggcaaaggaaaaagttccctatagaagctaaggattttccaaagcctaatgctcattttttatatccttctttgtatggtcaaaggttgattcttcctttaccagacacaaaaaagggcttaattaaaaatttgaaatcaaattttagagatataaactataaataaatacatttgcctttcaaatttttagaacattatcctagttaattcaaatttttttatttgagatgaaaggcgatttaagctaattttcattggatcatttattattattattattttgcagtgtattagttaactactgttatataacaaattaccccaaaacttaatggctcacagcatcaaaaatatattagctcatagtttttgtgggttaggaatctgggtgctgtatgtctagtgctcagggtccttcacaagattgccatcaagttgtcgactggggatgtagtcatctgaaggctcacgtgagtgagtatcaaattccaagctcactcactttgttcaagtttttgacatctgctggctggagaccacttgtttgccttgtgggcctctccacagagtagtttacaacatggcaacagcctctctagttagtatgagcaagccccagaagcatatttgccatattctaattattagatacaaatcaataggctcgag

SEQ ID NO: 1751 - DNA, 417 bp, Homo sapiens
  SITE (386): n equals a,t,g, or c
ggcacgagggaaacttacccaggtttctataaactagactgcaatctgcaccagtatctaccagcgctaggacctgctgtacattagtggggaaccagtggattgccaactccgcatgtggcctccctccactcccacctccttcaccccctgctgccccaagttgggcacctcggccatttccctaatcaaacaagaaaggctccatatctccacccaactgcaaatagtccttgagctccagcgcctgggcaggattagattgaacaacactgttttgccccctcttggtcattttccagaatttttgctctggggacaattgactccacagagccaagggcattccattgggttgcctgtyaatttctctcgagggggggccngtaaccaattggcctatagtgaatcgtatta

SEQ ID NO: 1752 - DNA, 817 bp, Homo sapiens
  SITE (4): n equals a,t,g, or c
  SITE (7): n equals a,t,g, or c
  SITE (600): n equals a,t,g, or c
  SITE (683): n equals a,t,g, or c
  SITE (685): n equals a,t,g, or c
  SITE (728): n equals a,t,g, or c
  SITE (811): n equals a,t,g, or c
  SITE (814): n equals a,t,g, or c
atantgnatcactcattggaacattagctggagctccaccgcggtggcggccgctctagaactagtggatcccccgggctgcaggaattcggcacgagctcgtgccgaattcggcacgagaaattcatgggagtgggattattaaatagaataatatgaacaattgtatggcttatgtttgccttattgtattcccaaagagctgtaacattttatagcatcaccacttgggcaggggtattacctgttgttgctaatttagtaagtagaagagagagatcaaagtttctctaatttgtgtttgtgtaatttatctgtatactttcttcatttatataaataaatgtcttcactttgggaggctgaggcgggcagatcacctgaggtcaggagttcgagacaagcctggccaacatggtaaaaccccgtccctactaaaaatacaaaaattagttggatgtggtggctcacatctgtagtcccagctactagggaggctgaggcactagaatcacttgaacccgggaggcggaggttgcggtgagctgagttcacagcctgggcgacaagagttaaactccatctcaaaaaaaaaaaaanaaaaaaactcgagggggggcccggtacccaattcgccctatagtgagtcgtattacaattcactggccgcgttttacaacgtngngactgggaaaaccctggcgtacccaacttaatcgccttgcagnacatcccctttcgccagctggcgtaatagcgaaaaggcccggaccgatcggcctttccaacagtgccaacctgaatggcgaanggnaaa

SEQ ID NO: 1753 - DNA, 1653 bp, Homo sapiens
  SITE (1111): n equals a,t,g, or c
  SITE (1613): n equals a,t,g, or c
  SITE (1625): n equals a,t,g, or c
  SITE (1631): n equals a,t,g, or c
  SITE (1637): n equals a,t,g, or c
  SITE (1651): n equals a,t,g, or c
gcaaccttgcagagtcagaatcctgatcagcagttttgaccagcacatcaagagtggctttacctcccaggcattgatccagcattagtcaagctacaagacactgatgtagaaaaccataatgtcagtttactaatgtagaataagaaataaaatctcagaagacctgagctctcctgtcagcatgacttgcacttgtacttttcctttttgtagagaagctaaattataatcagaaagttgttttggtgagcttggaatcagaaaataggagtttaagtcatctgttcaacatgcagctttcctcagctgtgatagctttttcctgctgtccagtcttcatgtggagcctggtcaatagcaccagaattctaagtctgctggccaaggtgctgcctyctgcagagagagaaagcccatcaaagttgacttcagtgactcccccttcactcacccctcatcttycacgggcaaccaactycctttttgattgacacatcatttctttacatacattaatgccttccatattaccacagagagtttggtagactggaaatcattttatttctttgatctacttcatctttctctgcattgagcctttgcgtactaatttatagctattttctcacaggatagtctatttccattatatctatattttctagtggtcctttgcgtttgcctcttttccagactgtatagggcatggtgccaggcacagtttatttgttttattctatatgctgatagtatcatcttttccatctttagatgttttatctcattcagagtgagaggggcacttggtcagtcctttttgcatctcaatagttgatcctcttttgattaaaaaatatttaatttctaataatgtgtgttagagtgaaaataacaggaattattaggcccagtcaagactaacagttcttgactcatagttccaaatcacagttccaagatttccttaacctttctgatcctcacttccctcccaaaaaagtaagaatggctataattacctacctcatggaaattataaggcttcagcaagattaaatgtactcatttatttaacatgcatagtaagaactataaatgttaattnattcttacttacattargatactgacttatgaaacagagattaaacacattctgcaaaaggactggtattgacaggctttgattctaatagctcaaaagataggccatggcttgctagagaaaatgaaaggatactcaaggctcattagattaaaaggctgctaatgttctctaagctgtaagtagatttttgcccacatttatgaaggttgatttctaatcagattagaaatggcataggctggtggcgtcatctcagagctgccacagcattctcaggagactcagccatatcatgttgggttgctctaagaacacacagagacctttatgctttttcacaaaagcatactctttccctggagtgtgtaactctatgtgttgacctttagtgggataagttcttacaatggagctattctgggtacaaaacatcactactctgtgagattttggaagataacactgtttgctgattttacaagcccgctcgggggggggnccggaacccggngcggtncccgtncctttccccccccncg

SEQ ID NO: 1754 - DNA, 713 bp, Homo sapiens
tgcaggaattcggcacgaggagactcttaacccccgcaaaattatccaggttaaaaacatacgtgagcttcagaaagggtgaacatagccatggctgagaatcgttgtggattatcatgataggaaattgacatgcttatgggtgttctgtcctttggggttgatgtcagggagccaagtggttgcactatttctgctgtgtgtccgaatttctaaagtaatatccgtgtattgtttggagagcggacttttttgctttactcctacttttacagaaaagaattttttttctcaagcaacaaaacatttggtctctggtgtcaaagaggactttattatattagaattataaagctttagttaggaataagtgttggacattattaaatcaatttactgcaggctgggcatggtggctcacgcctgtaatcccagccctttgggaggccaagactagtagtctccaattccattccatcacttgaggccatgagttcaagaccagtctggccattgtggtgaaactccgtctctactaaagacataaaaattagcatggtggcctgcacctataatcccagctactccggaggctgaggcaggagaatcacttgaatccatgaggcagaggctgcaatgagccaagatcctgccactgcactctagcctaggcgacagcgccagactttgtctcaaaaaaaaaaaaaaaaaac

SEQ ID NO: 1755 - DNA, 318 bp, Homo sapiens
ggcacgaggtgccccacccttcactctctccccgcataactctcttccgcatgtatatgtgtatccatgtctgtctgtctgcttcttaccatctctcctgaatctgcctatgactttctttctacccattcctacaaatgcttgcagtcttctgttttctaagtcccaacagcttattgtttttcattttctggagcagggtctacaggtttccaccaaacagaagatctcgccctgggatctttttgaggggttgaagccgtcagcaccactctcttggggctggtttggaacagtccgagtggaccggcgagtggc

SEQ ID NO: 1756 - DNA, 1860 bp, Homo sapiens
gtaaatactgaaatgtcaaagtgaaatctcctaactacatctcactatagccacagatttccaacattacttcatttttgttatactttggatgactttttacccagactcctttgtcccattttttaaaaggacagacacggtacattgagcttaattttaatgttctctctaaaatgctaataattatggctcaattattacagtggttttcttgttggagttttctccctttagctgctctaaattgtgagtggtatagagtcacagagcttacttgattattcacccagtccactgctgatgctacgtgtttcttcaggacctgtcctttagaatacttcccagaggcaagcacatggttgcctatattaaagccacctgtatatcacttgctaagtcctctttgtcaacacttgccctcattgtgactacagaatcactttttctagtttttaaaattgttatcgtaagactgtgcttggaaatattcccagggattagtatgatgattttgttggggtgtttggagatacatttgccaatgctgtacatgtaaaatttccatgacaacttataaaataaatactttgatctctttatcagccatcaatgttaacatataaaatcagctgaattaaagttaagactatgtaaacagatgactagaaccycttcttaagtaaaaatatgtggtggtycccttaattacktgycattggaaatttgtaatycctttcaattttctgaacatatgcacaattttactattctaaaaaaataactattcataactactcacttattttctcctttcacgcacttctaatttttggaagaagtgatgggcatttgttccctataactcttgccatctatatccacctggatccgtagcaatttgggtcttatctgaactactacgatgaactgcactcaaaattacatttgatgtgatacacacagtaactcaattctttctttgctttcatcttttgcaatcatctacctccctatgcagtctggacaaatactgtcaaattcctaacagcatcatcattagcactgttgaaatccttccatcatttagtagatgctaagcctgtgttgtccttcattgscctgagatgctatgcagtttatctgcttgcacacttcagatgcaaaacatagatgggaaaagtaaggaagcatactgatttgcattcctacatatttgtatgctttactgtttctcctgatgcttctgcttccaattgccatcttcaccttcgtcatctctagcttcctactttactctcctcagtcactgttcattcttagcctctgatttctatcacttcttttgctgtccaatttgtgcttmatmwatttctttcctcaaatacctctccagcatcattatgtcrcaaaattatttgccctgagaatctcttgctcttcccctgctttgtgctgcagggagactgattcttatctcactgtgtcagctgcattccagccagagtccacctatgagtggctctggtaagagattggaaggccgaagattctggtagttttcttgtcagtggctgtctcttctcctacctactgctcctacaagaaaggcctgcaaaggtttacactcctgctatgtgacatctgagcttctggtaaatctcattctccccttgtccctctgtctgggagtggaatgtttcctgacatcgctagtctgtgtgtggcttcactgttgatttgactgctttcacttttctgtcatcagtataaccaaaaccctgcagaaaactgcctctgttgtaaatacttaaggtggtttttgttcctggttggatcctaaagaacacaaaatcattc

SEQ ID NO: 1757 - DNA, 1120 bp, Homo sapiens
gggctgcaggaattcggcacgaggcagcagagagagcctgggttggagccatgaggctgcccctgcgtcactctgcctccttggaagcttctgtgtctcgggttcttcatacgcccagtggcagggatggaccaggcaccccttgcaatccttctggacaaatgtgccactgtcctatgaaaataaaaggacaccactcaagctccaggaggcagaaccttaactcaaatctgagccaataaacaatgtcactctagcaccaaagtctatttcaaaatgcaaactatttgaaatatcttatttttggtaaatgctttattttggaaatgggtttttgttgttgtttccctgaagagagttcagatcagcaaagcaagtagctttggagaagacacctttagacgaggactcctgtgaatcagcaggacagcgtagagggacattaggtgagccacagggtggagcaggatgggagggcagaggcttctgcttcagaattgaagccgaaggaaagtaatgctgtgggtgttactggagacaaaaggaaccaaacaagaaaaatctggagaggcaaatgttgatgtcttaatagatttgggagtcacactctttaaaaatgggtcccaaagcaaagctctcaaaacttcattaaaagaaaagtcttacatttgacaagtgacctggacagaggagctaccaggacattggcccccttgctgtgcacctgcactgtgcatcacagctcacgtcgtgtttgttacactttgtcacctcacattttattataaaggtcattcccgtgttaaaaagagagcgcggtatgacagcgcctagtgaattgtagtgtctttagggaggaacaaaaatggacataaatgaatacaaagaaaagattacctgaaactgggagcaaatcaaagtaaaaatgtagggatagggtgttgctttcttttaaaaagataatgctgtcaggattaaagtgagaagaatttaattttcatttcagcctgaacactagttttactttcagaaaggttcttggtgccaagctgtgacacttttgcctttgtgggtatacacacttggtacccttgcttagcactgtggaagaggaagtctc

SEQ ID NO: 1758 - DNA, 1068 bp, Homo sapiens
  SITE (1060): n equals a,t,g, or c
gctttgaccggacagacagatacttagatagctggcaaaacattatttctaggtatgtttgtgaatatttttccagaaaagtttaatatttaaatcagtaaactcagtagacaaaacctaccctggacaacgcgagtgagcctcgtccaatcccttgaggccccagaagaataaaaaaagaggaagggtgcatttactctctcttcagttggaacatctatgctctcctgcctcagacattggacatggaatctcctggttctcaggcctttggcctccatggttacaccagcaccccacctggttcgcaggccatcagtctcagactaaattacagcactgggtttcctatttctccactgctgacggcatgccttggggctttgggcttctataattatatgagccagttcccataaacaatcacttctcatatatctatatatacctattggttctgtttttctgaagaccctaatacagccccatagcactatatttttattttttctaaaacatttaaacagcctatttttttagagtcatttatgtaggtatccaattctctcatgaacgcctcaaggccagaaattcaatccattttawttttgccattgccgcagaggaggcacactgtagctagtcaataagtggttgtggaaggaattgagactgatagatctataaacccactttctgtggtacatgcagtctatattcaatattccgtgcagcttactccacaagtgagaggagggtctaagcttttgagcatagggatggttttagaaaataattacatttaaaaagcaaaatggagacctgttgagaataaataaagtcttgtttcttatagttgtgaatcttttatatcaagacttcacctgaaaaactgctagattgtgcttcaaagcactgtaagttctagccctggttctataatgttatctaagatatttatcatcattgagttctctggactcaatgttcttatccgaaaattgaaggagtcagatataatcatttttaaaatgttttccaaaccaacatcctaaagtcnactctcga

SEQ ID NO: 1759 - DNA, 1272 bp, Homo sapiens
  SITE (1209): n equals a,t,g, or c
ggaactttaaaaactcctcagagaatgagagaaaactttaccgcgaaggtgtggctggccattcctttcctcgcgttggggtttctctgtgtcagcgagcctcggtacactgatttccgatcaaaagaatcatcatctttacctttggggaaaacaggaagagggatggtgctttatcaatcacatacttagcccaaacaagtgccttggcctcctcagaaatttaaaaggtagaaaaaaatggacatatccccttttaagaagcttccacatcacatatttttyaaaaagtatttacatttcagctgtcatgcaaatcaacagttttgccaacttctttctcctttgctctggcactggcattaacattcttcctcactgtggccctggaaatcctcacactaatgaagcagcagaaaggcccatcacactgcactggtgtgtggtcttcgcatttccttgactttcttttcttttttgttctttcttttttttttttttgagacaaagtcttgctctgtcacccaggctggagtgctgtggcgcaatcttggcttaactgcaacctctgcctcgggttcaagtgattcttctgcctcagcctcccaagtagctgggactacaggttcacaccaccatgcctggctaawttwtgtattttttagtagagatggggtttcaccatgttggccaggctggtctcgaactcctgacttcaagtgatccgcccgccttggcctcctgaaatgctggaattataggtgtgagccaccatgcctggcttccttgcctttcctttgtgagacacggcaacagcccaaggggtctcagatgctgaccctcagcagagggcacctcctggggccatggctgtgtagctgggggcatctggcctcacatcctagttgagtgttggtgtccaggtggctggtgcaggcacccgcccttcttcacttttgcatgtcttctgtggcctgcctgactggagccagttgtcagggctcctgagagctgactgtgggcacctcttcctgaccccacgctcggtgacatcagctgggagcttgcgatcagccagggtgggagcatttacgccacagaacctggcacatgctacaggccaggactttgtccttttccttttctgggagttggctcagcagcgtgctcctgttgtgctgttcccctctctgcagggtcatgtggccntgcctgccggccctccgtccccgctccaggactaacctctgtggagggaatcacctaactcga

SEQ ID NO: 1760 - DNA, 536 bp, Homo sapiens
tgcaggaattcggcacgaggtaactctgagccagtggcccccaaggtggcagaacaggtgtcagccacatctagaaggaggcctagggacctgcagggtgccacccttggtgaggcggctgtgggccacccttggtgaggcggctgtgggctgtgggtgaggcagccccttggtgaggggctgggaggagtgggcttctctcggcctggctgggagtccaggtgccagggtcactaagacaggcctggcatgcgggtgtggaggctggcatggtttgcttgggcatgggtggggcatgggacaagctgcacaggtgtgcagagcactctccacatagtcactccctcttaggaaaagactccttcctccacttgagagggcatcaggccagcagggaccagacgttcgcctaatccagaggctgtcccccaccagataagggcgtagccaggcatgctgtttaccatccgtcctcaccaaggactctgtggccataaaaagagcagggcttcaccagctcgagggggggcccggta

SEQ ID NO: 1761 - DNA, 393 bp, Homo sapiens
aattcggcacgagctcacctgtccactagcagctggacgggaaaatggcaaggggtcatttcctgtactgtaccgtgaggcagtgattagctacgtgtggctcgtccaactagagatgtgctgtgagtgtaagatgcacactggatttctaaaactttgtgcaaagaaaagggaaatatctaattagtaatttcatatggattctgtgttgaaatgacaatattttaggtttttgagctaagtaaaaatacattatgaaaattagtttcaccttttttattctacttcttaaaaatgtgcttgctgctagaaaatttaaaatgatagatgtggcccatattatgtttctgtgtgatagactgctctggatcaagagtcggcaaactatggccc

SEQ ID NO: 1762 - DNA, 688 bp, Homo sapiens
ggcacgagcagggagaatgagactgagagacaggagggcaggagaaggtcagagacaacttttgcttctgaggctgctgctgaggacttcattttggggcgttgttttctgagccccaacagaaggaaggaagcctctccctccaggggtcagtcctgggcctcaagggcaccctcgaagcaggcagctcagctcacagagctcccctcggccatgtcctccacctgcccttcctttgtccagcacctcacctgcacacacctgtctggagagtccccaaggttggagagctgctgagtcagctgggccgagcacacagcgcaacacttccttgtgcctcctaaccaggatgggcgacaccagcccattttatggatgggacaagaagaagctgggctgacaagcccaacatagtggagccagcaacaggcttttactctcctctctgtctctttgtctctctcctccaccgcacctccatccgctccattctcctctctgcacatcagcttcccagacaatattcttggtttctgtggctcccaaactgaagcttccccacagtggctgcaactatccagacctggggccacacttgggcctccaggcaggggatctagtgatcactttctggtcatgtcatcaggccaacttggctgagctctgccctccttatctctcctctccc

SEQ ID NO: 1763 - DNA, 1430 bp, Homo sapiens
gcagcctccagagtaaagtgaaggcgcaaagcctcatgcaaacatcgaggaatgccttcattgtttcgaggtctctcttcctggcctcccaagcccactccctgccccaagtgccacccttccctggcacctgatccctgaggacgttgggtcctggggtgggggcctctgggctcttcctctgggtcccaggagccccctccccactctgtggccccagctccagacttggcaaggcaagccggagtgaggtttctccactccctcccaagtgctgtgctggcggctcccgaaataaaaatcaaatgtgggcttggcaaagggagcggggtgggagaagcagcggcagcagggctggggcttcattctttccattgtaacttcacctcctaacctctggcattttaattatgtctcctacccccctcactctgcctgggccagggggtgagctcaccctttcctctagcctgggagggggcagctgctgcctggacccccagtccccggcctgctcgggggaatctgggtggcggccatgctgggggtgtcggcctcaggctccctccagcttctccagtctcagaggggcctggagaggggcccagcccccagacagccagccgacacctcaagttccatgtgtgaatcattagtcttcacacccactgctccatttagtggtggccactgtcctaaggcaaggcacggcaggctcaccagcccattctatggatgacttagccatcatcgtctgcagggccaagcctgggcccaggcctatcgctcttggttctgcactctttccaaacccaggaagacgggcaagaacagctcaggcctgataatttgccttatctcttcgagtgtccgtttttttccaatggtaagtgatggaaagcattattttgatactaaaacatacaaggacatagcatggggtaggaagtaaaatgcctgtgaaagttcaaggtagaaaacaaatcctcaaggaagatctcgtggggctctctgcaggcgggccccagggagtagcatcctcctccttggcatggctgtggactggagtgagatgcagtcatatgtgtttgtagccagtttgtgcagacccaaggctgctgtggaagatgccagtgggtgctgggtgctgggtgctggcaggcagccttggcccaccccaggatgcagaggccttcttccctccaaggcccacagtgggagtcctgccgactctctccgtctcctggggagggaaacctccacaggacaagcagcctgtgtgggggtgggggctgcctccacggacagtgcaggcacagggcaaccttgactgtgagcccagggccagcacccaaccaccccaactgaggcttcctctccatcctctgggaggtcccccgccacactgccttagaggcccagcccctcga

SEQ ID NO: 1764 - DNA, 1803 bp, Homo sapiens
  SITE (18): n equals a,t,g, or c
  SITE (24): n equals a,t,g, or c
  SITE (46): n equals a,t,g, or c
  SITE (106): n equals a,t,g, or c
  SITE (1788): n equals a,t,g, or c
caccctgggcgcccaatncgcaanccgcttttccccggcgcgttgnccgattcattaatgcagttggcacgacaggtttcccgactgaaagcggcagtgagcgcancgcaattaatgtgagttagctcactcattaggcaccccaggctttacactttatgcttccgggctcgtatgttgtgtgaattgtgagcggataccaatttcacacaggaaccagctatgaccatgattacgccaagctctaatacgactcactatagggaaagctggtacgcctgcaggtaccggtccggaattcccgggtcgacccacgcgtccgcttccatacatggaaagtgtctttgaagaagtatttaaactgctggagtgccctcacctgaatgtgcggaaggcagcccatgaggctctgggtcagttttgctgtgcactgcacaaggcctgtcaaagctgcccctcggaacccaacactgctgctttgcaggctgccctggcccgagtcgtgccatcctacatgcaggcagtgaacagggagcgggaacgccaggtggtgatggccgtgctggaggccctgacaggggtgctccgcagctgtgggaccctcacactgaagccccctgggcgcctcgctgagctctgtggcgtgctcaaggctgtgctgcagaggaagacagcctgtcaggatactgacgaggaggaggaagaggaagatgatgatcaggctgaatacgacgccatgttgctggagcacgctggagaggccatccctgccctggcagccgcggctgggggagactcctttgccccattctttgccggtttcctgccattattggtgtgcaagacaaaacagggctgcacagtggcagagaagtcctttgcagtggggaccttggcagagactattcagggcctgggtgctgcctcagcccagtttgtgtctcggctgctccctgtgctgttgagcaccgcccaagaggcagaccccgaggtgcgaagcaatgccatcttcgggatgggcgtgctggcagagcatgggggccaccctgcccaggaacacttccccaagctgctggggctcctttttcccctcctggcgcgggagcgacatgatcgtgtccgtgacaacatctgtggggcacttgcccgcctgttgatggccagtcccaccaggaaaccagagccccaggtgctggctgccctactgcatgccctgccactgaaggaggacttggaggagtgggtcaccattgggcgcctcttcagcttcctgtaccagagcagccctgaccaggttatagatgtggctcccgagcttctgcgtatctgcagcctcattctggctgacaacaagatcccaccagacaccaaggccgcactgttgctgctcctgacgttcctggccaaacagcacaccgacagctttcaagcagctctgggctcactgcctgttgacaaggctcaggagctccaggctgtactgggcctctcctagactgcaggctgcagccagtccagagagaatagagcctgcccaggccttaagaccacctctcagcccagttcagttctgccttaccaaagattctgagactcatacccatttggagccagccccacttgctgccttacagggctgtccctgaggctggatctgttacaaatgagtcatgacatcatactgtaataaaagcagcttgttttctgcttgaacaataaaaaaaaaaaaaaagcggccggtctagaggatccaagcttacgtacgcgtgcatgcacgcatagctcttntataggggacctaaa

SEQ ID NO: 1765 - DNA, 1149 bp, Homo sapiens
tcgacccacgcgtccgcccacgcgtccggatggctgaagagtaaatcctttctacctctggctgaaggagtggtgcagtcaatgacttggccctttttctacagcacatttagagtttgggctctggctccctcagtaagtgctttattaactcagtgtgtcaaaatgaaaacagagccctccttccccagtagctcagtgccacagaccttcagccccacacagctgtagctatccttaccctgagtccatctaccttaaatctgtacctctgacacccagccagtctgtcataatcattatcccagttataaccttgaccaaaggggaagagagacacttgggggatatctaggggataggagtgctagaaactatttatttatttttgagacagagtctcactctgtcacccaggctggagtgcagtggcatgatcttggctcactgcaaactctgccttttgggttcaagcgactctcgtgcctcagcctcctgagtagctaggattacaggtgtgtgccaccatgcccgtctcatttttatatttttagtagagatggggttttgccatattggccaggctggtctcgaactcctggcctcatgtgatcagcccaccttggcctcccaaagtgctgggatttcaggcgtgagccaccacacccggccaaaactgtttattcttgagaagttccatcttcatttctgccacagttggaacttcccgaggaaggaaggaggcctgaggttttgcacaatctgtttcagagcctgtttagactcaaacctatgcttcccttggcagcagaatacacttaacctaaagcagtatttggagttgagaaaaacctggtggggtaagtgaatatgtactgtttggtagggtaggtagagaagctgtgctttgaccctgtgattccatctttttctaccttctatgatggtgatgaagctagatacccctagggaagaaagaaggactgggtttagcaaatgatttggtaattaaagtttatttgaacacaaaaaaaaaaaaaaaaaaaaaaaaaaaaaaaaaaaaaaaaaaaaaaaaaaaaaaaaaaaaaaaaaaaaaaaaaaaaaaaaaaaaaaaaaaaaaaaaaaaaaagggcggccgctctagaggat

SEQ ID NO: 1766 - DNA, 2753 bp, Homo sapiens
ccacgcgtccggtacacactcttgtttggagagagtgtgttgaatgatgcagtggccatagtccttacatattctatatccatttacagtcccaaggagaatccaaatgcatttgatgccgcagcattcttccagtctgtggggaatttcctgggaatcttcgctggctcatttgcaatggggtctgcgtatgccatcatcacagcactgttgaccaaatttaccaagctgtgtgagttcccgatgctggaaaccggcctgtttttcctgctttcttggagtgccttcctgtctgccgaggctgccggcctaacagggatagttgctgttctcttctgtggagtcacacaagcacattatacctacaacaatctgtcttcggattccaaaataagaactaaacagttgtttgaatttatgaactttttggcggagaacgtcatcttctgttacatgggcctggcactgttcacgttccagaatcatatctttaatgctctttttatacttggagcctttctagcaatttttgttgccagagcctgcaacatatatcccctctccttcctcctgaatctaggccgaaaacagaagatcccctggaactttcagcacatgatgatgttttcaggtttgcgaggagcgatcgcatttgccttagctattcggaacacagaatctcagcccaaacaaatgatgtttaccactacgctgctcctcgtgttcttcactgtctgggtatttggaggaggaacaacccccatgttgacttggcttcagatcagagttggcgtggacctggatgaaaatctgaaggaggacccctcctcacaacaccaggaagcaaataacttggataaaaacatgacgaaagcagagagtgctcggctcttcagaatgtggtatagctttgaccacaagtatctgaaaccaattttaacccactctggtcctccgctgactacaacattacctgaatggtgtggtccgatttccaggctgcttaccagtcctcaagcctatggggaacagctaaaagaggatgatgtggaatgcattgtaaaccaggatgaactagccataaattaccaggagcaagcctcctcaccctgcagtcctcctgcaaggctaggtctggaccagaaagcttcaccccagacgccaggcaaggaaaacatttatgagggagacctcggcctgggaggctatgaactcaagcttgagcaaactttgggtcaatcccagttgaattaattggcatgaagagtacagatgtaatcacaagtaatgcaagactcactgaggaatacaagccaagctgatgaggcagtacaggggagaggctggaaaacatattaagagcataaattggagagaatcaaagccttgtcacatggatcctctggtgcctgaagaaatgagattttattatccctctctattatgcaaatgaatttagttttttgacagcagccattctgattactggattggctggggtggggatgggggtatcaggagtctagctgctggaggatgggacagctgtgctgggtcttcagggcatttctgctgcgaatgcggctctccaggcccttcacttctattctggattttattccctccattaaggagagtttaaaaataaaagaaagcttctgagagtaaacattttgctcctaagctgaagggaatgcacagctatttagtaagtgataagtttcttattttgaggacttgactcccatttgctctcagtgaccccagggcagagcccagagaagtgttccgtacccactgctgatggtttcccagagcccacactgagttgaagaacctattgttcttcttggcatccttcttatgctacttctcccatcgctcaaaggggttgcctatggctgggtgtgccctgccctaaatgcagcaccactttcaagcttagtaggaccattccaagaaaaccaggtttcttctccccataccacgttgtgcctgaagaacaagccttcccgtccttgcctgcatgtgagtcacttcttggctgtgcagcaggtccccccctccccgcgatatgctggagggtaggattctgcagcctgtgttgctctctacctggcagcagactgtgcaggagccccaacctgtcctcaattccagcattcacagctgatgagcagtgcaggagcagggcgagaggaacagagccaatgatgtgtgggttacactgaggagccaaggacagggcctcaggtctcccccttacaaggcgtggctcatggcctgcattccagagaccaacatgatagcttttaattcagctgcatgacctgtgccttttaagccataaagatacctcaagcctagcacctcttgaaatccagatgttcatattagactaaaaaaaataggctccaggcctaggtgcccaggctatgatgagtctgcttttgaaggaggtagggaatgacatcttccttggacccaaagcttaaaagtaatgtatgctttgctgaccactgtttgttaggccttaaacaacattcactgtggtggtatcaggcacactgctatgtgcatcaattatttttttgctttccaaacagaatctctggggcacaagttttacactcaagctaagtataactttgtcatttcaggtaaatatgacaagtggtggagcatgaagttttctaatttgacttaatcctaataaatttttgttacaaagtaaaaaaaaaaaaaaaaaaaaa

SEQ ID NO: 1767 - DNA, 1247 bp, Homo sapiens
ccacgcgtccgcctgtgctgagtcagagctggaacgggagacgcaggagccccgcagccgcgggaggtgcagatttggggctgccaggtggcgccaggtccccttggccagcccccagcgcccctttcttctgtccccagggcctcggcttcacaggatggggctgccagtgtcctgggcccctcctgccctctgggttctagggtgctgcgccctgctcctctcgctgtgggcgctgtgcacagcctgccgcaggccgaggacgctgtagcccccaggaagagggcgcggaggcagcgggcgaggctgcagggcagtgcgacggcggcggaagcgcaagtcggacaccagactgcacgagctgcaccggggcccgcgcagcagcagggccctgcggcctgccagcatggatctcctgcgcccacactggctggaggtgtccagggacatcaccggaccgcaggcagccccctctgccttcccacaccaggagctgccccgggctctgccggcagctgcagccaccgcagggtgcgctggcctcgaggccacctattccaacgtggggctggcggcccttcccggggtcagcctggcggccagccctgtggtggccgagtatgcccgcgtccagaagcgcaaagggacccatcgcagtccccaagagccacagcaggggaagactgaggtgaccccggccgctcaggtggacgtcctgtactccagggtctgcaagcctaaaaggagggacccaggacccaccacagacccgctggaccccaagggccagggagcgattctggccctggcgggtgacctggcctaccagaccctcccgctcagggccctggatgtggacagcggccccctggaaaacgtgtatgagagcatccgggagctgggggaccctgctggcaggagcagcacgtgcggggctgggacgccccctgcttccagctgccccagcctagggaggggctggagacccctccctgcctccctgccctgaacactcaaggacctgtgctccttcctccagagtgaggcccgtcccccgccccgccccgcctcacagctgacagcgccagtcccaggtccccgggccgccagcccgtgaggtccgtgaggtcctggccgctctgacagccgcggcctccccgggctccagagaaggcccgcgtctaaataaagcgccagcgcaggatgaaagcggcaaaaaaaaaaaaaaaaaaaaaaaaaaaaaaaaa

SEQ ID NO: 1768 - DNA, 1154 bp, Homo sapiens
cccacgcgtccgggggatcgcagccaaagggcggacgccaaaaacaatccattgatacacttggtgacattaattgagaaaaaaacaatatggtctggccatggaggcatggtatccgtaacatcccccaaaggagctaaagaagaaatccacaatttaccatgagcatttctcgtctgaagattgccaagcgattcctccaggacattcctcaagatcaatttctgtacatccaccttgtcctgggagggacatcaatgggtttccatgtcctttggcttctggttgagttcactcagtggagaaccctggcaagaggcaggaaaaggggaggaagcagcctgaccggtttgaatttcaccttctgttcaccttggatgagagcagtaatcatcacgatcccagggaacagccaaaggaagagaaaaggcaaaagatttggacaagactcatgaagactaacagctcttggataattgagagaagcagctgcgtgaacagttttgatgcaatcatgaagcagggcccagtgcctgtggcatctgcctttttctggaccaatccatatttccttgtggttttctaaggtgcagagagggcacattgggaactttgcttggggtctttttcacatcttagagggaaggtccctcaacatctgcattggcggagtgtgatcctcatgtccctctgaatgatctggacttgaggtaaccagccccttccaggaagctgtcccatgagtgaagcctcagcagcagcctctgtcagtccctcccccacagaacctttggcttccatttgaccagccttgacatccagtgtccaaacaccgataaaattgattccactaagcgtgggaaagtcctggagcatcgattgtttcctcctctgcacccccgataccctggcattagcactctcccagaatgtaccttgcttgtttgattggaggaggtcaaagccctgatgaagaatgagtggaattccacaggattggagcagtcttgataaatgacagcaggggatggtgtggggaggggaaaggatcagaggaagtgtggataaatgaatggcttaaaaaataatccacctttgcctcccccttttctaccagtctgtctagtgcttcagggtgaaaaaaaaaaaaaaaa

SEQ ID NO: 1769 - DNA, 4024 bp, Homo sapiens
ccacgcgtccgaaagcctcttgcccatcaatggtttgctctctggagacaaagtcaagccagtcctcatgaactcaaagctgcctcttgatgtcctgggcagggtctgggacctcagtgacattgacaaggatgggcacttggatcgagatgagttcgctgtggccatgcacttggtgtaccgagccctggagaaggagcccgtgccctccgccctgcccccgtccctcatcccaccctccaagagaaagaagactgtgttccctggcgccgtccccgtcctgcctgccagccccccaccaaaagacagcctccgctccacgccgtcccacggcagcgtcagcagcctcaacagcacagggagcctgtcccccaagcacagcctcaagcaaacacagccaacagtgaactgggtggtgcccgtgcagacaagatgcgatttgatgagatattcctgaagaccgacctggacctggatggctacgtgagtgccaggaggtgaaggagatcttcatgcactcgggcctcacccagaaccttctagcacacatatgggccctggccgatacgaggcaaacggggaagttaagcaaagaccaattcgcgttagctatgtatttcattcagcagaaggtcagtaaaggcatcgaccctcctcaagtcctctcgccggacatggtcccgccttcggagagaggcacgcccggcccggacagttcaggctctctcggctccggggagtttactggcgtgaaggagcttgatgacatcagtcaagagattgcccagttacaaagagagaaatattcactggaacaagacattcgagaaaaggaagaggcaatcagacagaaaaccagcgaggtgcaggaattacaaaatgacctagaccgggaaacaagcagtttgcaggagctcgaggctcagaaacaggatgctcaagaccgcctggacgagatggaccagcagaaggccaagctccgagacatgctgagcgacgtccggcagaagtgccaggatgagactcagatgatctcatcactgaaaacgcaaatccaatctcaggaatctgacttaaagtcccaggaagacgatctgaaccgagccaagtcggagctgaaccgattgcagcaggaggaaacccagctggagcagagcattcaggctgggcgagtccagctggaaaccatcatcaagtccctgaagtcaacgcaagacgaaatcaaccaggcaaggagcaaactttcccagctgcatgaaagccgccaggaggcccacaggagcctggagcagtatgaccaggtgctcgatggagcccatggtgccagcctgaccgacctggccaacctgagcgaaggcgtctccctggcagagaggggcagttttggagccatggatgatcctttcaaaaataaagccttgttatttagcaacaacacgcaagagttgcatccggatcctttccagacagaagaccccttcaaatctgacccatttaaaggagctgaccccttcaaaggcgacccgttccagaatgacccctttgcagaacagagacaacttaacagatccatttggaggggaccctttcaaagaaagtgacccattccgtggctctgccactgacgacttcttcaagaaacagacaaagaatgacccatttacctcggatccattcacgaaaaacccttccttaccttcgaagctcgacccctttgaatccagtgatcccttttcatcctccagtgtctcctcaaaaggatcagatccctttggaaccttagatcccttcggaagtgggtccttcaatagtgctgaaggctttgccgacttcagccagatgtccaaggtaaagcccctccacggagcccccgcgcctctgctagtgtctttgtgcctcttgtcatggtgtgggctgccaggcgtaattgttcatgtcacgtatgtatctccccggcacctttccaacacaaggtcaggtctggaaagcatccatggctgtgatccaatgcactgcagtcccgtggggtgagccctgacccttcccagtggcataggtgccctgggctcccctggctcccactggtgtctgacgaccatcaggtctcagacggtgaagtcattgccatggccgagtagaaacttgagaaggcgttgggcacaggcgtctcgagagggccatgggcagcaggcctgcaggtcgaggcgtccagggaaagtgggccagcgagtgttcagagtcgcccatgtgacagaactctcaaggggtgttgaaaagtgagggccggcctccttgaataaatgcagacagatccacaggtgaggagtgaactgttgaaggaggacagcagcgaggctggttaccagactggacccgttggtgtccggccctcaccacacggtgacctgaactcactgtggctctggtcccagacagctgtagggcttctccagacgctggcagtgtggttggagctcatctttaaggtagcatagagaattcaacagggaacatccagaatggacaagtcaaaaaacaacaatagaagccccttacgactgaggtgccttccggaagaaactgctggaaagttggaaatgggggctgtggtgagtgggaaggacagggctgcggcaccattgtgcttccttgtgagttgtatgtttccctgtttgagtgaggagcatttttctttggcaggaatgaaggaaagcagatgaggtgtgtcccgtccctgacacctgcgtccactctgtcccttctcggcagcccccaggcaggggcagatgggctctgtcttcgggggctgcaggggcctgctttcctcacgagttccacctgcagaggcccaggcattatccacgctgcgggaagaggcagtagccacaagcagaacacagcccccctcctggagcccatggcccaggtggtaaggggtggccggtgtggggggtcccctggagcagctgggcccagtccctgtgagcgctgctgtcagcctgaaggtggtaagggagggagccccgggagtacctggaagacgcgtgccccaggcatgaggccccctcggggccccaccggccccatgcccaggtgccccaggtgccagtgtgactgggcagtctcccttggctgccccgtgttcactcagctggtggagcagatgagtctctgagcatcttggggttggcagcggtcgcaacttgtgatcacagaacacagattccgagaagcacttgagattctgttcaggttttcaaagacgcgtgtgtgcgtgccctggcggcgcagcagatcccacttctgaccgaggcagggtgtgtgtttacacagatgagcctgggcagagggagcccagaggccctggcatggcgcccccctccttccagcacacggagaaggcctccatccctcatatgccacgctgtgacacggtttgggactggcagaagatttagggcccagtgcacaggctcctgggcaggcgggaaaccatctcccgaaagcagaaaacgttggcacacggtggcagcagtccctcaggcgtcctggtcgtttctggttgtcgcaagtggactcctcttcctttgggaggctggatctgtcttcctcctctcactgtgagcagagggagggagagctagcagagcctgagctagggccgggatctaatgaccgccctctgcctgtccttgggccctgaaaccaggggctcttcacacacatgcagctgtgatttcagagccggtctcacttcctattggcggtgccgggccaggacagagttggacagagctgtggaaaatgggtctccaatactatcttgttttgattccagcgttccatcagctgccttcatgacacttgtacagccgcattctgagctcaaccctgaccttgcagctctgtttttcctttttggttacctatctgtttttcaagaacaacattgtggatataaataaaatgctaagggaaaaaaaaaaaaaaaaaaaaaaaaaaaaaaaaaaaaaaaaaaaaaaaa

SEQ ID NO: 1770 - DNA, 2287 bp, Homo sapiens
tggacgaggtggaattgctggatctggagagcgtagcgcctggcgggacgaggacgactacacctggttatacattggctcttcaaagacgttcacctcatcagagaaatccctgactcctttgcagtggtgtagacatgtcctagataacccaactcctgagatggaagcagcgagacgttccctgtgctttagactggagcaaggttacacttccaggggctccccactcagtccccagtcatctatcgacagtgagctgagtacttcagaattggaggatgattctatctccatgggatataaattacaggacctcactgatgttcagatcatggctcgtctgcaagaagaaagtctcaggcaagattatgcttctacttcagcatctgtatcaagacatagttccagtgtgtcattgagttcaggaaaaaaagggacatgtagtgatcaagaatatgaccaatacagtctggaggatgaagaggaatttgatcatttgccaccacctcagcctcgtcttccaagatgttcccctttccaaagaggaattccccattcacagactttctccagcattcgggagtgtaggaggagccccagttcccagtattttccttcaaataattaccagcagcaacagtattattcacctcaagcccaaactccagatcagcaaccaaataggaccaatggagataagctccgaagaagtatgcctaacctagcccggatgccaagtacaactgccattagtagcaacattagttctccggtcaccgtgcgaaatagtcagagttttgactcaagcttgcatggagctggaaatggaatttcaagaatacaatcttgtattccatcaccgggacagcttcaacacagggtccacagcgtggggcatttcccagtgtctatccgacagcctcttaaagccacagcctatgtgagtccaaccgttcaaggcagcagtaacatgcctttatcaaacggcttacagctgtattccaacacaggaatccccacaccgaacaaagctgcagcttctgggataatgggtcgcagtgcactcccaagaccttcgttggcaataaatgggagtaacctgcctcgaagcaaaattgcacaacctgttagaagttttcttcagcctccaaagcctctgtcttcactcagcactctgagggatggaaattggagagatggttgctactaatgcagttttatgtacccttgaaaaatgggaaagaagtaaaaatgagggttgtgttacctagctggctgggtagcagtggatgttgggatattctttcccttttgtgttttaatatatttactgcattgtttctcaatggaccagtcaccagagactaattattgcacttaaatatttgcctgagatactgcaacattctcaaacccatggttgcagtattgtgacacttagatctaggaagtttttgtagaactgctctgtacctgaatactttttgagagaattaagatgtatcaataatgctttgccatatgagttttttaaagtaacttgttcaatttactcacgtgttctaaacatctttccattacatgttctgtattttaatacattgcatattgacaactaggttctataatgtatgctttgaaatttacttttttatagtttacaggaattttattttttgtgcctatttctttttacacctatgtgaaccactatggaacaacttaaattttgtgccataaaaatatttttgtggtaaggtactatttttttagctctagggatatatcagcaaaaacacatcatgcaatttgagacacataattttgtgttgaatgagcacaacataatttgaagcattgcaaggagatarccagacagcagaattaaatggtcctgtctttttcatttttaatttattgtcatacatgggtttcatatttataacggcatcatgagctcattgcacttaatacctgcaatgtttgctactgtaccacaattgattttcaatactttattacgaaggatgaaactgtaatgttttattaacaatgcttctggaaatgaatgcattttaaagcaaataaatctttttgatagaccttttacaaaatccatttgcactaatgaatgctttcttatggcatataacttaatatttgttactgtgtacactgctgttttggaatgttcagaaataaagactctatttcagcaaaaaaaaaaaaaaaaaaaaaaaaaaaaaaaaaaaaaaaaaaaaaaaaaaaaaaaaagggcggccgc

SEQ ID NO: 1771 - DNA, 755 bp, Homo sapiens
ggcacgaggcgtcacattgcttaggaagcctgctgtgtttatcactgggtggctgtcagggctgagatggagagggccagggcctggcgaggtggagcagtcggcccaggtgtcccagcaattgttgctggaacagggtctggaacccacaggagaggcctgaaggacccagggccctctggctggatgcgtttgcctatcaggacccagaattacttacagacctgtttagggctaggcttggcctctttcttgagctcatctggaggggtgtggcaacactcattcttcatccttattctccctggctgtgggcaacactggtcctcagtgtcaccagatggtcctcctctgtgcccatgacccctcagcagccaaggctggccctgccagataatgtgtgtgcccatgatcacacccaggggcacaggccacatacgtttccctgaaaccttgggctccagcctccatcccgtccatgtgggagggaacttgggtcccagcagtgtgtctttcagcaccaagtcatgtttaaaagaccagagagacaagcattttgccaagatcttccagggaagatgcatgtgtgacacattaacattcaaatcaggccagcgcggtgctcatgcctgtcatcccagcactttgggaggccgaggcgggaggatcacttgagcccaggacttggagaccagtcttggcaacacagtgagaccccatctctacaaaaagttaaaaaaaaaaaaaaaaaaaaa

SEQ ID NO: 1772 - DNA, 522 bp, Homo sapiens
caccagccccaacccgctttgggggagcttagccccctgcgtcacccactccctgcacttctgctgcaatcaaggtggttctggtgcgggggtggggtggggggtgaggccttgtggccaatgggggaccccccaagagccagcttggacaatgctcttcttgccccttagttactggctggctgtggcttcagtggtgtgtaagcaggtggaatactcacccaccaagctctggggtaccccgagggcctgacaagaggatggggtgggggtggcatcctccaaagaccagcctccacccccactccagcctcagcggggccccagcgatgttttcttgttgtacaagaaccaggtccgagtgttgcctcctcttccttccggaagccaaactgctcctttattttttagagctgctgattgtgaatctcagagtcttaagagagaagccaaatatattcctcttgtaaatgaagaaataaacctatttaaatcacaaaaaaaaaaaaaaaaaaaaaaaaa

SEQ ID NO: 1773 - DNA, 787 bp, Homo sapiens
ggcacgaggtgagatggactttctcagaatatgaggactgcatgcttggcacactttaaatgtgtgtttcatttttaaagaggattaaagccctcatatggttcttttcctttaaaaaattattgaaggcagcacaaattggtaatacaaaaaaatatggacatgaaagctaatacctaaatagattaagcagttaacagcagtacagacaaaacttaatgaacccataaaatagaatgtggcaattcacattgaaatgatggaagttctggatgaaatacacagaaaacataggcaaggaaaatagtcaaaggttttcaaaactggaagtggaaacaaagatctcagccagactgttaagaaagtgtatagagtgcctctcagcataatgttcaaagatagacatccacttgtcaatgtcttaatcacagagtaaaaatttattttagaaaaataaaacgacaactttactcagatgttatagaaaagatgccaggtgcggtggctcacgcctgtaatcccagctctttaggaggccgaggaggatggatcacgaggtcaggaggtcaagaccagcctggccaagatggtgaaaccctgtctctactagaaataaaaaaattagctgggcgtggtggcacatgcctgtagtcccagctactcgggaggctgaggcaggagaattgcttgaacctgggaggcgtaggttgcagtgaactgagatcacgccactgcactgcagcctggcgacagagcgagactccatctcaaaaaaaaaaaaaaaaaa

SEQ ID NO: 1774 - DNA, 1241 bp, Homo sapiens
ggcacgagattttgcccacatgaattattatttctttttcaaagttacaactttggactttgctatctttcaggttttgctcgtaatctgtcagaaggcaataatgctaattacacagagtacgttgccaccagatggtatcggtccccagaactcttacttgggtgagttaccgtcccaaaatagaatgacatttccacatctgctgattctattgtcatttgctttgagttcatctatggaaaataagaacttcagttaattaaatgtgtcagttacatattgcagtataacaaactacctaaaacttaatggtatgaaacaagcacctttttgtttgctcagaattctgggtgtgggggaatcaccagtttgagttcagctggatggttcttctactggtctctcttggagtcactcacgaagttatagtcagctggtaggtcttctgggagctggttagtttaggggtctcagctggatcagaccatctctgatccctggaaacttatcctccagtaagctattccaagtttctaagtgtgatagttggagaattctgtgctattaagagggtaagccccaaagcaacagcagctttcaagcctttttttgtatggcttttgcctcgttggccaaagcatgttacatgaccacccctgattcatggtatggagaaataaattccatctcttgatggggcaagtggcagagccatattataaaatggtatatgtatggaaatggaagaaattaattgtagccatctttgctaataaacttccacattaagaatgtgaatatccacacagtttgacattctggcttatctatttgttcatttattaattcttcaagtacttatcaagtatctcttatgtccaaccactttgccaggcacatagagtaaatattgaaccagactgagcacagtggctcacgcctgtaatcccagcactttgggaggccaaagccagcagatcgcttgagctcaggagttcaagaccagcccgggcaacatggtgaaaccccgtctctacaaaaaaatacaaaaattagccaggcatggtgatacctgcctgtagtcccatctacttgggaggctaaggcaggagagtcacttgagtccaggaggcagaggtcgcagtgggctgatatcccaccactgcactccaacctgggcgtcagagcaagactccatcacacacacacaaaaaaaccccaaaaaaaaaaaaaaaaaa

SEQ ID NO: 1775 - DNA, 1093 bp, Homo sapiens
  SITE (553): n equals a,t,g, or c
gaattcggcacgaggcaacttctgccatgtggactcaaatgattcatctcagcctcccaaactgctgggattacagtcataagccaccacacccaaaacctagatcttggttttagattagatatatgtagaacaaagctcccacgtaccctctaggagggaagatattaccagaattatgatgaggtcccaagatctcacaggctttgctgtgtgctggggacagytcatyatcctactaattcttgactctcagccttaggccaaggagaattatgtatcttttataaaagatatgtaaactacttgagrtagtttcaagtgaaacaatcggctgtttgtgaaataaagaagaaaatttgtgaaataaggaagatttgtgctgcagagttctttagggatacgggctgcagctgcccaggtgatgagcttgaagaacctaggcccggctggcagagtggagaggagctgggagagacagctgcttttacgactctttcatgttctagcagatgccagatgcgaggcttctccttacagggaagggttatgnttgatttatcatacatttctggagtttttgkttagtttttgktaaatgcaaagctctgkgctggacattgtgagaaacaggaagttgaacgcccataaggagtttagaatagaagtggaagaagtcagtaggtgcccaaatgctatttgaggtttgaatagagaatgggtagaggggagtgtcaagggtaggctaagtttggagttacctaacctcaaagttccaaactgggagactggtgttataattgggagctactgcttttacagtcccctcctaagtgccgtgtgttcccgggacattgggaagcaggagaaaatgggtggtgaaagccaggtggcttctaagatccatgtcagttctaacacttttgacatctacgaatgattcagcatggttgtctctgaagcatgctgcaaatcacctctcgtagcctgcaagtacctgtaggggctaagctttgtagatgccacaggtgctcttagaaagcaaggaaagaaagaagagagagaagaaaaaaaaaaaaaaaaaaaaactcga

SEQ ID NO: 1776 - DNA, 553 bp, Homo sapiens
ggcacgagggaatgtggagctcttcatcgccacctcccagaagtttgtccaggagacagagctgagccagcgcatcagggactgggaggacacagtgcagcctctgctccaggagcaggagcagcatgtgccctttgacatccacacctatggggaccagctggtctcacggttcccccagctcaatgagtggtgtccctttgcggactggtggctggccagccggccttcgaggtgtgtcgttccatgctggcctccctgcagctggccaatgactacacagtggagataacccagcagcccgggctggagatggccgtggacaccatgtccctgagactgctcacgcaccagcgagcgcacaagcgcttccagacctacgctgccccctccatggcccagccctgagtggggagcaccgaggcaggggtgggggaatgtgtactgaggagccgtgcgtctgctcctggctggcccggcctaataaagcagtgttgccatctcaaaaaaaaaaaaaaaaaaaaaaaaaaaaaaaaaaaaaaaaaaaaaaaaa

SEQ ID NO: 1777 - DNA, 1503 bp, Homo sapiens
ggcacgagcactgttaccgagatccctgataccattaatgatctacaaggttcaactaaggttttgcaagcagtgcagtggctggtttcccactgcccccattcccttgacctctgctgccagactctcattcagtacgtcgaagagggattggccatgagtttagtggccgctttttccatgacagaagagagaggcgtctgggcggtcttgcttctcaggagcctggcgccatcattgagctgtttaacagtgtgctgcagttcctggcttctgtggtgtcctctgaacagctgtgtgacctgtcctggcctgtcactgagtttgctgaggcagggggcagccggctgcttcctcacctgcactggaatgccccagagcacctggcctggctgaagcaggctgtgctcgggttccagcttccgcagatggaccttccacccctgggggccccctggctccccgtgtgctccatggttgtccagtacgcctcccagatccccagctcacgccagacacagcctgtcctccagtcccaggtggagaacctgctccacagaacctactgtaggtggaagagcaagagtccctccccagtccatggggcaggcccctcggtcatggagatcccatgggatgatcttatcgccttgtgtatcaaccacaagctgagagactggacgcccccccggcttcctgttacatcagaggcgctgagtgaagatggtcagatatgtgtgtatttttttaaaaacgatttgaaaaaatatgatgttcctttgtcgtgggaacaagccaggttgcagacgcagaaggagctacagctgagagagggacgtttggcaataaagccttttcatccttctgcaaacaattttcccataccattgcttcacatgcaccgtaactggaagaggagcacagagtgtgctcaagaggggaggattcccagcacagaggatctgatgcgaggagcttctgctgaggagctcttggcgcagtgtttgtcgagcagtctgctgctggagaaagaagagaacaagaggtttgaagatcagcttcagcaatggttgcctggaagactcaggagcatttacggatttaacttcccttcccctctatcttcctcagactctagtgtctctttctcacactattgaacctgtgatgaaaacatctgtaactactagcccacagagtgacatgatgagggagcaactgcagctgtcagaggcgacaggaacgtgtctaggcgaacgactaaagcacctggaaaggctgatccggagttcaagggaagaggaagttgcctctgagctccatctctctgcgctgctagacatggtggacatttgagcagcctgacctgtggggagggggtctctcccgaagagtttctgtttttactcaaaataatgttattctcagatgcttgatgcactgttggaaatgtgattaatttaatcatgcagataaaccatttaaaaaaaaaaaaaaaaaaaa

SEQ ID NO: 1778 - DNA, 605 bp, Homo sapiens
tttgagctttggatatgttttatttaatgtggtggcaattcatccaaggggtgatgttctcccagcatttggacacacagggaaacttcctcttctggggagactcagctccttcaggctggcggtgagcgagggcgccgactggcccagggcctggctgcgcatgcgcacgaggttggacgtctctgcagaggccggccaggcctgtcccgccaccgggtttggaagaaggtacctcccagtcagggctcctcccaggctccctcgccttagctgtcttccatcctcactcagctgtcttttatacttcagtgattttccagggccagaagccacatctgggttgctgcatttccgaaacggcatgggtggaggggataatatgtggtcaagccttcactgctaccttgatcttttgaaaacagccttccatctatcacctgtgaaaaccagtttcatctctgtgtatcacaccatctctaggcttcacacttcatgactcaaactcttgaagaacctgacaagcgtttccaaagttcttcaaatgcttctgcagtcattatttgaccctcaaattaacaattctctgcggcaaacaagcggca

SEQ ID NO: 1779 - DNA, 1156 bp, Homo sapiens
ggcacgagtgatgctctaattaaggccattggtacagaaccagattcagacgtcctctcagaaataatgcattcttttgcaaagtgcattgaagtaatgggagatggatgccttaataatgaacactttgaagaactgggaggtatattgaaagcaaagcttgaagaacattttaaaaatcaagaattacgacaagttaaaagacaagatgaagactatgatgaacaggtcgaagagtcactacaagatgaggatgataatgatgtttatattctgaccaaagtgtcagatattttacactcaatattcagtagctacaaagaaaaggtgttaccatggtttgaacagctgcttccattaattgtcaacctcatttgtccacatagaccatgggccagacagacaatgggggttatgcatctttgatgatgtcatagaacactgtagtccagcctcatttaaatacgcagaatatttcttaagaccaatgctccaatatgtatgtgacaacagcccagaagtcaggcaagcagctgcatatggcctgggagtcatggcacagtacggtggagataattatcgccctttttgtacagaagcacttcccctgctggtaagagttattcagtctgcggattctaagaccaaagaaaatgtcaatgctacagataactgcatctcagcagtagggaaaatcatgaagttcaagcctgactgtgtaaacgttgaagaggtccttccacactggttgtcttggcttccactacatgaagataaagaagaagctgttcagactttcaattatctgtgtgacctgattgaaagtaatcatccaattgttcttggcccaaacaataccaatctgcccaaaatatttagtataattgcggaaggagaaatgcacgaggcaattaaacatgaagatccttgtgccaaacgtctggccaatgtcgttcgccaagtacagacttctggaggactgtggactgagtgcatagcacagctcagtcctgagcagcaggccgccattcaggagctcctgaactctgcgtgaagggccttaatgtcacccaccagaaaactaactccaaataaacgcttaccctttcctttaaaaaaaaaaaaaaaaaaaaaaaaaaaaaaaaaaaaaaaaaaa

SEQ ID NO: 1780 - DNA, 1357 bp, Homo sapiens
ggcacgagtagacacccagggatccacctggcataaaaatgcaccctcacttcttttgcttgaaaatatttacgaaggtgattcttcttcaagttttttatactggatttatatgtgggcaatgccggtaaagtgtgcttttcttcttccaaaaagtamcattttgagatgatcaaatggaagtggcctattctatgctcttataagcctgggagaattctgtttttctgttgttataattgacttattggggtttgaaggtgctaagcatgggaaaacttatgttcctgaataagatattaaatttcttagctttggttctttttagaagatacagttaaactgcagggaagtgatttttcaaattatgccatataaggtgattttagtggtctttaaaacacatgtggtagattttaaatgcctcaaataatctagacttgtgattctcagtttgsctgtacagagagtcacctggggagagtggggtggtagtgcttttaaaaatgcagatgctggagtccccttagaccaattaaatcagaatatccagagatatgaccagaatatctgtacttttaaaacgcctcagatgatcctaatgtgcagccagtgttgagcttctgatgtatgaacaaaaatataaaaacctttcacaagttgcccccagttcatcgtccattcaatactgtatagaacagagacaagccctggccaaattgcagagtcatgtgcaaaataaatgaatgttgttgtttcaagccaccgagtttagaggtggtttgttatgcaacagtacataactgataggctaactctgaaatgtcttaaatctgttaccatctctccattcccccaggacaggctcttgttacctttgttgactggatccacccaccttggcctcccaaagtgctgagattacagacgtgagccatggtgcccggcattttaaattttttttttttaattaattgccaacactttaaacactggagagttcatataaaaatctggatgtctagcacctcttgagaactcggcatatgtggccacagtgggtccacaatttctgcacagcagcaaatgaggagacgcagtgcatgtggcactctccaggtggccaccctcagccactcacatgcatattcgtttctgtggcccactgctgaagaaaggccactgcggggcatggtgccatgtacctgtggtcccagctacttgggaggctgaggtgggaggatcgcttgaacctgggaggccaaagttaaagtgggccatgatcgtatcaccgcactgcagcctgggtgacagagaccctgtttccagaaaaaaaaaaaaaaaaaaaaaactcgag

SEQ ID NO: 1781 - DNA, 739 bp, Homo sapiens
gaattcggcacgaggggagtaaggcggactgaaggaggagcttgatggaagcgtgcgagaaggggcgtaactgatttggaaaccagaggaaaggcgctgttttcaccgaattagaatcgcgggaaaatagagaagagtttgtttgaaggtctcgcgagatcgagacgcgcggcctcctcagcctctttcctcccgctgccatgcaccctgcagccttcccgcttcctgtggttgtggccgctgtgctgtggggagcggccccgacccgggggctcattcgagcgacctcggaccacaatgccagcatggactttgcagaccttccagctctgtttggggctaccttgagccaggagggcctccaggggttccttgtggaggctcacccagacaatgcctgcagccccattgccccaccacccccagccccggtcaatgggtcagtctttattgcgctgcttcgaagattcgactgcaactttgacctcaaggtcctaaatgcccagaaggctggatatggtgccgctgtagtacacaatgtgaattccaatgaacttctgaacatggttttgtaacctaccaaaatggataggctgttgaacattccacattcaaaagttttgtagggtggtgggaaatgggggatcttcaatgtttattttaaaataaaataaaataagttcttgacttttaaaaaaaaaaaaaaaaaaaaaaaaaaaaaaaaaaaaaaaaactcgaa

SEQ ID NO: 1782 - DNA, 991 bp, Homo sapiens
  SITE (979): n equals a,t,g, or c
  SITE (990): n equals a,t,g, or c
  SITE (991): n equals a,t,g, or c
ggtgatctgcttgcttcttttaccacaggtgatttttaagtaacttgggtttaatttacagagatgaaacatgacagtctgagtaaaatacccagtgatgtagaagtgtgcctgtttattatgtagatacagacatccagcaaaaacaggagaatcacatgctttaaagaacactttctcttaggtttccttgagatatgttcctccagtgcaagcaagataatggtttacagaatttgctttacacaaaacttgtcaagaactcatctgttaaaagcaaggaataactagtttatattttccaataatgttcaaggttttctccttaatatgtttgaaattattgattttggcatttttctaagcaatttatgtaattttatttgaagaaaatgttttgtataatgtttttcccagcctaaacagggagagtcctaacagtgttgtgcttgtatgattctgagactttatttgcgtaagtgatactactatactttatttttgacccatgcctttttaagctgtttcatattgaaaggtggaatattgtaaaaattttgtcaaagatgtactgtagtgctatttgaagtacctgtaacaaaacagttggccctctgtatccatgtactctgcatctgtggattaaaccaattgcagatcaaaaatattagaaaaaatatgtcattttatgtaagggacttgagtatacttggatttttggtatctgtgggttggggggacggtccaggaaccaataccccatggataccaagggacaactgtacttatttacctttattgtcattgcaagcttcttatggaaatttataggaatgaaaatatacatgttaagaagattaaacattagatagtagatggtttgttgcatgctagaactgttagtattgttgaatcaattactttggtttcatgaaaaaataaacgataaatatctttaaaaaaaaaaaaaaaaaaaaantcgaggggggnn

SEQ ID NO: 1783 - DNA, 3287 bp, Homo sapiens
  SITE (1412): n equals a,t,g, or c
  SITE (3169): n equals a,t,g, or c
  SITE (3246): n equals a,t,g, or c
  SITE (3273): n equals a,t,g, or c
atagtcttttctatttttcatctgtcatcagtgggagggtgtaagccattgctttcagaacagaatcggcagtgtcgctcacagtctttctactaaaccagttgcatcttacagagcagcgtggatgagtgctaagaaccggctgtgtgaccttcagcaaggactttctcaccacaaaaatagagttgcccaaagtcaggcagaggtgataatgtgtaaaagtgactggctccaggcagacttgtagtgaacattgtttttcttccttcctgctagaaatgagtataattttagacttatgtttaggttatgaagagcaaattgaaaagagcacagggtttccagaccaggagtctggagtggcatttatgagagcctgccctgaaatggcactcagtgttgtcctaaggtcgcatggcctctgtgggccatggtgggcttcagtgggcctcagggctctcagtcataaaatgggaatgtctaccctaaccacctctcaaggccattttgagaacagatggccaatttacataaaagcatactatagatgtaaagtaacgtcatacggcttcatcatcaacccctacatctatatgctttaactgttttagagtacattgatctcatagaatgttattgcctcaaaaatatccgtttattttcccagaaattaagaaaggccatgaaatagaaaagaaatcgcttgaagatttactttctgagaagcaggaatcgctagagaagcaaatcaatgatctgaagagtgaaaatgatgctttaaatgaaaaattgaaatcagaagaacaaaaaaraaragcaagagaaaaagcaaatttgaaaaatcctcagatcatgtatctagaacaggagttagaaagcctgaaagctgtgttagagatcaagaatgagaaactgcatcaacaggacatcaagttaatgaaaatggagaaactggtggacaacaacacagcattggttgacamattgaagcgtttccagcaggagaatgaagaattgamagctcggatggacaagcacatggcaatctcaaggcagctttccacggagcaggctgttctgcaagagtcgctggagaaggagtcgaaagtcaacaagcgactctctatggaaaacgaggagcttctgtggaaactgcacaatggggacctgtgtagccccaagagatcccccacatcctccgccatccctttgcagtcaccaaggaattcgggctccttccctagccccagcatttcacccagatgacacgtccccaaagtccacagactctctgaaagcattttgatgcaggtctgcaggactgaccccaaggaggaacgtgggcacaagaggtatatcagcacacgtgtgatcaccgtaggtaactggagcgtcaccaccggcggaatcgnagcttctgagactggaagtctggaggaagacttttgcctccgtccaaaagattcctccaaaaaaagatttaaaaaaagatttcggcatcgacacggacgttgttgcacaaagcacttaaagaacgagagcatcttgttcattgcctttttcacctaagcataaggggaaaaactctcagggccctattaagatttataacctttgtaatgttcttcaccacagacaccttcttgtgagttttcagtctgactgtgggggtggggggtgtgaatgaaatggatgtcacagagtgtcatgtgtctgatgcagcctcctctgctgtgtattaaatgtcaaaatctgaatatatctggatatgtactaatcaaataataatcaatcaatcagcatatacatttcagccaaagccatagaagaaaaagcaatagttgcttgaattatgatcatctaccaccaactctgctcagccctgtaacagggtagggagagggtataacaggaagagctttgacttgtccctgtctatacattctctgtatcttttgggggtaacttcttggcagtttttcagtgttcagccatgtcagttgaaactagatttttctgtagattttttacttacccatgtgagcctaacactatcctgtaattcattttctcaggctatgtgtaaatgtagaaccctaatttttctataaaaaaacaaactaactaactgtgtaaagaaagaaaaagggaagtaccaatgggtttttccaccttatttttacctttgatctacccttgcagatttaacctgtcttcttccctcccattattctcattttccttttacctttctccaccatccagagccacaaaagcaaaccttctacctcctacctacttttctctgggacaaggataaaggaatatgattttccagagccccagagccagctcatcttccaggtgctgaaaccactttccaaataaactaaagcctggatttgatattacaaattttgggaaatcttagaataaagaacgagaacaaggaagtcattggctagtataattaagaaaggtaggattcagtgcttaccgatgatgcagtacttgatagaagaaaacagtctgggaggatagcgctcatttttcagttaccctttaaggagtccctttgtctttgggaaagtagcagaatggtccgcttctttcccatgagtggaaaatgtggcttgtccaactctcctccaggttgcatttcagtttctttccaaaacttattacctcccctaatcctgagactttggaaaaggtggaaggaagaactgttgctttatctccccctccctgcatgtgtcaacattgtgatgtcagtatttactaatctacattcagtggctgtacaaataacagctgtagtaagaagagattcaggatgctagaggtgaatatttgggtcatttacatgtacactacatagcaagttgatactcatgttgcatgttcttttaaattagtgattttgtgtcttaagtctttaacttccaatacttcatcatgtatgtaaccttccatgtttgcttctgataaatggaaatgtaggttcactgccacttcatgagatatctctgctcacgcttccaagttgttctcaatgacattagccaaagttgggtttgccattcatcccctagggcatgggtaaatcttgtgttgttccctgctgtcctccgtattacgtgaccggcaaataaatctcataggcagnttaattataaaacmtctttgggagggtggggaggaggacaggaggggaagktggggggaamcaaattaggggattcnttaagggatttttgttttaaacccaangttttcctgtaggg

SEQ ID NO: 1784 - DNA, 2621 bp, Homo sapiens
  SITE (2102): n equals a,t,g, or c
tgatgtgttggctgctgccacctggggaagtgtctgggcgtgtgtggacaggtgtgaggggctggggctggggtaggggcaggatgaaatgcaggcctgtgtgggtgtgaggggtgtgtacccgcccggctccatgtgggtgcctgctgtggcggtgctggcgtgttctctgcagccaaggccatggggcgtgaggactccctgggtccccgctctgacccttgctcctgcagggctgatctatgactcggtcatgctgaagcaccagtgctcctgcggtgacaacagcaggcacccggagcacgccggccgcatccagagcatctggtcccggctgcargarcgggggctccggagccagtgtgagtgtctccgaggccggaaggcctccctggaagagctgcagtcggtccactctgagcggcacgtgctcctctacggcaccaacccgctcagccgcctcaaactggacaacgggaagctggcagrkggacactgacaccatctggaatgagcttcattcctccaatgcagcccgctgggccgctggcagtgtcactgacctcgccttcaaagtggcttctcgtgagctaaagaatggtttcgctgtggtgcggcccccaggacaccatgcagatcattcaacagccatgggsttctgcttcttcaactcagtggycatcgyctgccggcagctgcaacagcagagcaaggycagcaagatcctcattgtagactgggacgtgcaccatggcaacggcacccagcaaaccttytaccaagaccccagtgtgctctacatctccctgcatcgccatgacgacggcaacttcttcccggggagtggggctgtggatgaggtaggggctggcagcggtgagggcttcawtgtcaatgtggcctgggctggaggtctggacccccccatgggggatcctgagtacctggctgctttcaggatagtcgtratgcccatcgcccgaragttctctccagacctagtcctggtgtctgctggatttgatgctgctgagggtcacccggccccactgggtggctaccatgtttctgccaaatgttttggatacatgacgcagcaactgatgaacctggcaggaggcgcagtggtgctggccttggagggtggccatgacctcacagccatctgtgacgcctctgaggcctgtgtggctgctcttctgggtaacagggtggatcccctttcagaagaaggctggaaacagaaacccaacctcaatgccatccgctctctggaggccgtgatccgggtgcacagtaaatactggggctgcatgcagcgcctggcctcctgtccagactcctgggtgcctagagtgccaggggctgacaaagaagaagtggaggcagtgaccgcactggcgtccctctctgtgggcatcctggctgaagataggccctcggagcagctggtggaggaggaagaacctatgaatctctaaggctctggaaccatctgcccgcccaccatgcccttgggacctggttctcttctaacccctggcaatagcccccattcctgggtctttagagatcctgtgggcaagtagttggaaccagagaacagcctgcctgctttgacagttatcccagggagcgtgagaaaatccctgggtctagaatgggaactggagaggaccctgagaggagacgggctgggcggcgacccccacagggctctcgagaacagattctcccctccagtatgggccctggctgtggcccccattcctcaggactgcacagaggaggactggctccggctccgtcgggctcacccttaaccactattcctggctctgcaaaccccagactttgcacacagccycaggctccacacagaaatgtgaacttggcctcagacaggctggcccttcctaggctctaggggctaggggggagtggggagccaagaggtcccatattcctgagtgcaggggtagtccctctcacctgcttcctcagacgactctggaagcttccctctaccaccgggcactgagacgaagctccctgacagccgagactggcagccctccatctggtccgtaccctcgccagangcccccctacatcaacctcctggcgatgccctggtggagcagatgggtgctctgggagtcctgtgcttcctgatccaatggtgccaaacccttcatctcccccagaagcgcagcatacccctgggacccctcggccactgcccactcggggagccttctctgtttctggggcctcccccaccatagctctgattcccaccccacataggartagcctgactgagggggaaggggtgggagagaagatacagacatggaggaggggaggctgctctggcaaagtcttcaaggcttttgggggtccaggcctggggtcaagaaggaaaatgtgtgtgagcatgtgtgtgagtgaggcgtgtgtgtgagcgtgtgtgtgagtgaggcgtgtgtgtgtgtctttcctaggacccaccataccctgtgtatgtatgcatgtttttgtaaaaaggaagaaaatggaaaaaaatctgaacaataaatgttttatttgctttaaaaaaaaaaaaaaaaaaaattact

SEQ ID NO: 1785 - DNA, 745 bp, Homo sapiens
  SITE (18): n equals a,t,g, or c
ggattacctgagatgatncctgtagggactccagcataccatctgtgtttgcwatagttattatattacttctaaagtcagaattaaagacctcaaggcgtgagcaccgcacctggccctcaccaaattcttaataatggctacctctagagaatgagaaacaaaaacaaaaactgtaatgtgttcattggtagtagctctttacctaattccaccctttcatactgatcagcttcttcctggttcatctccattgttatcagtagtcaagtcagtcaccaacttctggagatccttcaacttgtaggacaatatccaatatttactgttaaatccatgtccctttaaaacttgccctctagccaatcttcataagctcttcttgggagctgctttctctgcctcagccacaatttctgtgcccatctccctggaacttaagccagtgaactcaccaggactgtatcacaccatattctttcaaaacaggctcacctctgtgcctggaaaacagcccatctttttttctatgtgtattagtagaaaaaaaggtgaaatgactgtgatcatgaataatccccacctctcagtggcttaaaataacaaaggctcctttctcactcacagttgggcacgtctgtccatttgcaggtgggttgggaagctccattctgtatcaccctcgctcaaggacctggactgaaggatttctgctttcaagaaaaaaaaaaaaaaaaaactcgag

SEQ ID NO: 1786 - DNA, 931 bp, Homo sapiens
ggcacgagcttaaaagccatgtagttaagtcatataaattccaaaatgtatcagtttcttctgtgtaggtaagtgactagtaatagaaactaaattattaatatgtactagtgggacatagggaagatgtaagtaattaccatggtgcctgtgtacaggtctccattgttttggggcaatgaatatcgaatgctttctcattcttttcctcttttcccaccaaattgtgatttgtcactcctctccacttctttttgttctgcattttttgttgattgtttagagctggtgaacagcaactatatttaaaaaaaattgaggccaatttggtaaagaaatgagaatctgaattccagtttgctataatttaagctatttattaaatataaagaagtggtatttaaaattctcaggtattgggaaatcttacggtatgttttaaaggracagtttcttaaagtcctaatcattgaattagggagacatagagtctcaaatataagtgtcatttgtatgtattttcttcaacgataatgtttggcatttggatttgattttattaacttaaagtttttaggcagtatgttaaactggctcaatgcttcgtactagttcttttacacaacttgccattattgagttattttctgttgcagaaaaggcaatctctttcacctctggatgactcaaatcaggaaatataagcaaaagaagataaacaattctttctgtgtctttacttctcagtctttcccaatctggctgaggcacataaagcagacttgaggaaattctttacttaggacactatcttaacctgctcagggtatttagaattttttgaaataagcagtcatgtacttctataagtgctaaggaaagtaaattagtgtattattaaatattagatcttaaaaaaaaaaaaaaaaaa

SEQ ID NO: 1787 - DNA, 635 bp, Homo sapiens
ggcacgagcataattatcaaaaccatgaaaaacaacattggtaggatactataaagtactaatcttattttggatttgacgaatttttacatgtttttttcttttttagtttgtactctaagaagttgtattacatgtacagattcgtgtaaccactgcaaccacataaaactaatgaacacaaagtccctcatgctacctttttatgcttacactccatccaaacctaactctgccaaccacttttctcctatcagtataatttcatcatttcatgaatatgataaaaataaaattgtttttgtaaatggtttttataaattttatataaataagttatatgaatttttattgatagagagtatgtaagcttttggcatttttgtcactcagcaaattactcctaaggtttatatgagttgatgaatagttgttttattatttttttttaccaccatgtatctaaccagatgaaagttgtttatatttgagagtagtatacatatttgatgtagtagtttatccattcacctatgagatatatttgcactgttttcctggttttaagtgctataaataaagatgctgtgaaatctaaaaaaaaaaaaaaaaaaaaaaaaaaaaaaaaaaaaaaa

SEQ ID NO: 1788 - DNA, 1187 bp, Homo sapiens
ggcacgaggaatttttcaatgccgtcattttcagttagatgattttgcactttgagattaaaatgccatgtctatttgattagtcttatttttttatttttacaggcttatcagtctcactgttggctgtcattgtgacaaagtcaaataaacccccaaggacgacacacagtatggatcacatattgtttgacattaagcttttgccagaaaatgttgcatgtgttttacctcgacttgctaaaatcgattagcagaaaggcatggctaataatgttggtggtgaaaataaataaataagtaaacaaaatgaagattgcctgctctctctgtgcctagcctcaaagcgttcatcatacatcatacctttaagattgctatattttgggttattttcttgacaggagaaaaagatctaaagatcttttattttcatcttttttggttttcttggcatgactaagaagcttaaatgttgataaaatatgactagttttgaatttacaccaagaacttctcaataaaagaaaatcatgaatgctccacaatttcaacataccacaagagaagttaatttcttaacattgtgttctatgattatttgtaagaccttcaccaagttctgatatcttttaaagacatagttcaaaattgcttttgaaaatctgtattcttgaaaatatccttgttgtgtattaggtttttaaataccagctaaaggattacctcactgagtcatcagtaccctcctattcagctccccaagatgatgtgtttttgcttaccctaagagaggttttcttcttatttttagataattcaagtgcttagataaattatgttttctttaagtgtttatggtaaactcttttaaagaaaatttaatatgttatagctgaatctttttggtaactttaaatctttatcatagactctgtacatatgttcaaattagctgcttgcctgatgtgtgtatcatcggtgggatgacagaacaaacatatttatgatcatgaataatgtgctttgtaaaaagatttcaagttattaggaagcatactctgttttttaatcatgtataatattccatgatacttttatagaacaattctggcttcaggaaagtctagaagcaatatttcttcaaataaaaggtgtttaaactttaaaaaaaaaaaaaaaaaaaa

SEQ ID NO: 1789 - DNA, 921 bp, Homo sapiens
ggcagaggtaactatttgtggcaagccaggtcgaggtcactctctttgagggcatttactcactgcctagtgccccctttccactggggcagacccagagacaaaccctagcagcttacttagctctcatgaactaagggctgtcccttagttctcccaaagtaacccacaatgcaaccctgatgggctgcatcttccaaaattgaaaggcctttgtctatcattccatgaaacaaaaaaagattatcttactttttaacatggcttaaccttaatacccactggatttcagagaacagtggccactgcatggttctcatgcttacagtacgatcctgtagctagatttgttttgtaagaaggaagaagaatgagatgaaataccctatgtataatgttttatgttgctttggaaaagtacaacaatgtagaaaaaggtgaaatcatgataaagtaagaaattaaaaactgtttggactgatttacaagaaaaagatgatgctatgatggttcagttaaaggaacctatgactcacccccctccactttatgggggagctgcagcagcactactggcgcctctccagagtccccaccaccaaaaagtcacaaatccggggcaacaggtatgatctctacttcttataacccaacaggggactccatttaggcagggtgtcacttcttatacccaacagggaactccatttagccggggagtcactctggttctgagaggcagtttccccataacaactgcttacaggaggtgttgctgccacaggccagcctataggatttatcttggtttattctctgttctccacttccaacctacttaattagaaaaataatatgcctatttattgagaagatctaaagtttatggaaggaacaggattgaaaaaaaaaaaaaaaaaa

SEQ ID NO: 1790 - DNA, 960 bp, Homo sapiens
tttttttttttttttaaaactacaattttgaacatttaatgaatgacaaagacataacatcctctgaaaaatctgcaagtaaatcaatcatttttaaacaatrgctaccatatatttgtatcttctccttgggaaaaactttggaaaaaaaaacacgcacataagtatcataactgagggttgtggacaagttacttctattttaccaatttttatattgacataaagtagcacagactagttatttcatttaaaaaaacacactgacaaatcttttctctattacacttataagacttttcacttatatgcttataccaatatagaaacacataacttgagattctagccaatttttattttctcgaaactgtttatcacctgtgtattatctcagtttttccattttcctgcctgcttcttgatgtctgcatttgggccaattattgtttctcagcatcaccagcatgtggacaaaaaataagatgaaaactaaagtcagttcatctggtaattgaagttttgttagaaggactgataggagataatgcaagtaatgtctatagtgaaattatatgattattgatgaatctcaattattactaccactttccccacagataactgagttttgtgtgcatatgtgtgttttcctatggaatggaacataaaggraaattttaaagatatacaaacacatgttcaagtgtataatacatatgtacttttagtttcattttgataaaattaatgagatacaaattttatcatcaatttcagaggtctttgtatctagttctttatcaacgaaaataatcacaatatattgggcactgagtgaatttgtcagctatggattcgtttctgaaaaagtatttctacagtattcctacactactctgaagaccctacagtatgccatttttattattaaaaatagaattacagttgaggagagac

SEQ ID NO: 1791 - DNA, 869 bp, Homo sapiens
ggcacgaggataaatgagcatttaggaggccagccccataaacatctagccatatagaccccttaacattaaatgagttgctctcaaactgaatgtctagactttaacagaaaagagatacttaacctcagggaaaccatctatctgtccaaattatccaataattgagtttcctaagcagaaaattcaatgcctaacttcaagtttttctttcacctttgcattcactgggaatttttaatggaagccatcttcacctttacggtattaaatggtaaaatatagattttcctacaatgcatattaagtactgtaaaaatttctcttgtatgggtattagcctttaatttgtgcaaacagtagatactaaaaaagaatactaaatgaggaaactccaaagaagcattttctaaaacatgttcaatggaacaccagctccttgagatgttcaaaggatattcctcagatagggtatacattgatcaataagtttatgaaatttgggccaaacaaaattaaacaggtttactgacagaaccagcctgtcagagcctttaaaatgcaaacccaccttgtgaatctctatggtaagacataatattcggtgtttaccatgcatacttaatcataaagctgtcttttcttggaacatcttacagggcttgtgtccccagtacaaactttagaaaatgtagccttaatacccttcacattactccaatctaccactctaatggcttgtctactcttcttcatacatgactagcaaatggtggtgtttatgctttaaaagaacacagatctaaaaaaaaaaaaaaaaaaaaaaaaaaaaaaaaaaaaaaaaaaaaaaaaaaaaaaaaaaaaaaaaa

SEQ ID NO: 1792 - DNA, 799 bp, Homo sapiens
  SITE (19): n equals a,t,g, or c
  SITE (22): n equals a,t,g, or c
  SITE (45): n equals a,t,g, or c
ggggggggaaaggaaaggnaanaactccccttactattgggaacnaaagctggagctccaccgcggtggcggccgctctagaactagtggatcccccgggctgcaggaattcggcacgagggaatttcacacaaaccccactgtcggccaggctggacccacagtaccatgtggcttgcatgctagtgggggcccctccagatgaggtgggttctttcttttctttggtgcctggcccatttcagcctgtggtgctccctgcttgatccctgtcgccatctgagtgtgggatctcagccatcggtttccttagttttcttgtcagttgctcagactttcctctttggggcgttagaacacctcagccctagattttcttgccaggactgtgtagtccagttgggtggagcaaagcacttatgcctcaaatgctcagggcctggttaccatctcactggctgataacctctatctgaaggccactgtttccctgaccttccctccctcgcccacacacccacttccttccactgtgaaagcggagtaaggctttaattgcacaggttcatcatttcttgtttggaagtcttcagatttttagttttataccttagctttctgcagaattctccgttgaatcaatgccctgggaaccccatggacagaagcaccttttaatgaagtccttccaaaactcgttcctcagtgcattgctctgttggaaacagtgctgtggggtgttggggtgtatagtatatwttaacatattttaacttaaaaaaaaaaaaaaaaaactcga

SEQ ID NO: 1793 - DNA, 1804 bp, Homo sapiens
gatatcaagcttatcgataccgtcgacctcgtgccgagatttgattttttagcctcctctagagccaatcaggcagttaagagtaataaaggaaaagggtttggtcacaaaccctaccattatctggagattacttcctgctgcactcctgtcttgccatgcacgtcttgccccctcacttttgctcagcctagcagtctacttcactttattgccttgtaagtgtcaggcctcctgggcgctctggaaaagacagggagccaggccctctcacccctactggtaacaggtcattgctgggtgcacccgagggaggtgatttgcatcatggtcatgctgcatgggctccactgggatgctgttaaacaccagaggagccaacctatcagaatcccagcagcaaaggaaaactcagattttagaggctttttacaataaagtagcgtaactctaggtcatgattgatttcaaatgcctgccatgaatgatttgtaagtaattatgtaggatccatcaaagcagtattgtaggcttttgaattgtcccagtggatccgggaccccattcactgtctctcttgatcgtgttaatgatgcaatcagagttcaagacaggccccatgaagtctgactgcactgggatggagaaatgaatttcttcccactgaaggaaactctttctcattcgcagccaagacgggagtgccactgttcctctcttcactcctgagatactgcttcttggaaacgggtgtccacttcctcttctaagtacctttttctctttctcctaaaggtgggactatctcctagtgtttaaatttgccagttactcgcccatgtatgtcaagcatagaaaaggaaatgttttaccttatctcctgtatgtatgatagaacttaaaagaaatgggcatttgttttcatagccccagcagagaaaatcctcttcatagattaaatgtgctgctgtggacagagggaaaaaaaaaccctctacatattgaaaggcaccaaatgtaatatctgacactgttaagatgcccaaaagagcaaagttgtagtggagatgcagggtcatttccccatgccatccacagtgtttgttagtgagtccacggctgacttgcagtgataaagaaaagcatggagctgtgtctgcagacaatggtggctgcatctgtaagtggcttcagaggcagcagccctggggaaattgatgggtgtggcagtggacctgtgaagagggagaatctagccttcagcctgtccagtgttaaccactagagaaactgagctttatatccttttttaatgcctgtgaattttagcatattgaaacattagagcaaatactcaggggatttttcattaaacatccctcagataatttagctatatatcattagaaagggaaagctatcatttttattttaaaactaaacaaggccatcttataaactgtcaccaaagtcttcccttttttattgcatgtgtgccttgaatttcataaaacattaattcacaatgggggtcagaatgtactcttgttgaaacacttcttgtaccattttatgttcatattatgtttgagagggtaaaaatgtatgagcagcttaactgaagtagaactattcatgatgcttttcacacattgtggcataagatgtaaagtttgtaattaatgttaatttctgtgcattttaatattcttttataattattaatgttaatttctgtgcattttaatattcttttataattatgagcattttaataaattcatttttacaaacaaaaaaaaaa

SEQ ID NO: 1794 - DNA, 831 bp, Homo sapiens
ggcacgagctcttgttcagattgcttgcggtttgaaaaagaggtgtgctagctttgcttagtttatttcttatttttggtatacatatacatatatataatattagaatgtgtgtactggaaatgctatgataggtattttgtgttaatccaaatgcaatgatagtttcttgtatgaatgtgcaagaggcctgtgaccgaatgctacgtttttatggtagtktaagattataaaagtagaaatgcaacaattcccagtttttggataggttctaaatttctgagatttgattcatggcagatattctctgttgttgttgttttagatgggctcattacataacgagttaattgtcactagtaggagactgtgaaggaattttgttatactttcaaaaatgttactgtgatgaaaaatcatctattttcagaaaatatttatgaattaatttactatagaattatctctctaattatcataattgggttacaatttaagctccccttttaaatgttatattttaaaatgttattactctataaaagaaaattgcttgctatatttacaccttctttcctaggaaagctttcatccttaaattgttgtattcctaccctctgaagacatttaaaataagcttttgtgcctgcagcagagcctgcagaagctaatacaagggacactggtcttttgacaaaataaacttgtgtaaattttgatactgtattaaaactatttttttaaagttctgcataaaattgagtattaagtatatgtgttcatcttagcaatggtaataaattatttaatctcaaaaaaaaaaaaaaaaaa

SEQ ID NO: 1795 - DNA, 407 bp, Homo sapiens
cggcacgaggtaatcagtaggcagaaatggttggaatttcctggtcccagtttcagatcatatctgtctttccccagactcctaacttcctgttgggacatcccttggtctggcctttccctccagagaagcccccagacccacccgcagccttgatttactgatgcctaatcttattttagtctttcacaccagtttttaacaactcgactgtatagatcttctggaaattttacccaaaaatgttagatgtgccatcccctcacaggggaaagtggtggggtggtgggggttaatgtgttgaaaatctatgtatcttgtattttatttgagtcagctgtgttttcacaacaactctgagagttaacatcatttctactttataaattaaaaaaaaaaaaaaaaaa

SEQ ID NO: 1796 - DNA, 1255 bp, Homo sapiens
  SITE (15): n equals a,t,g, or c
  SITE (20): n equals a,t,g, or c
tttccaaggaatttngggcnccaacccgtaatggctgtacctcttatacacacaagtatgaaaaatacccagcatgtcacccacgtgcagaaagtccttggaaaagttagatgttttggatgagtttgtgggtttcttttattattatgcttcataatttatacacaggttaccatttcagagtactcaaaggagatacaagctataaggaaaaagatgcttgttttcattttctaaaaaaaaaaaaaaagtgattgaaatgagatcttgaaatctgtactcaagtgatttcattaggtgaagcaagaaatgagaattgatttgaactgatgtgaattggctggaaagggattcttagatcagctaagtgaactttctggttttccggatgtggttggagcagctttgccgattacccactggttaacagcagagtcacagctagaatgtagctctcttgaacttccatgctgtgtatctgaagaggaaggtgctccttaaggaagcagagaggcttctcgggaaaggggaggggatccttgttgctcctgaggctttgacaagcccttattaatttgcattttaaaggcaggcatgcctgggtggcggaggaagtctgctgtttggaggagaggtgttgctcatttagatcacgatgcatccactttagtggccctagaaggtgtctgggtgcagccaaagaagtcatagttccctaccacatgtcgatgtagtcagcagacagcaagcacttgctgtgctcctgtgaaattgactctgtaccctgagtcgggggacacgagggtggtgctgaaatgtcagctcaccaggcagagctgtgctggtgtgtgcagcaggtaggctgggcttatgcaggtgcaggcgtagcctggggaactcagggaggtgaaggacagaagcggaggattcccaccctccaagcctcactgggagctgttgtgtaggatgtatttttgtatccagatttgagtcattgggtaggaaagctaaatttcttctagaatttagctggatttgaatttttatatttaaattcttgaattccctgctgactcttacggcaaattaattgaaattgkgaatttttctctggttactactttaaatatatcccattgttttatcattatttttcagaaattctctatttttgatttgtatttcaccctttcattaaatagttgtttaacagaaagctttttagcttacagaaaaaaaaaaaaaaaaaactcga

SEQ ID NO: 1797 - DNA, 1768 bp, Homo sapiens
ggcacgagtttctttaaagctttgtgatttttattaatgttattgttttgtcccaaaggaccagtgcttatatttattcattctaatgtgtttttgtttaaaatctattaatatatggtttcatcttcattctaatacttggataggctttattttgtttctcctagctttttggatacagaattaacttatttacatttattcttagcaggctataggctttcttataagcattgctttagctctctcatatgttgtgatgttcagtattctgttatgattttctagagttctgcaacttcgttttgttttatagttttgactcggtttgttttcaggaggcagtttttgcttattattaatttttatttattgcagatgattagacagtgtgataaatttatttctcctatcaaaaatgtattgagatttttgtttgcaccctgttatgtatcagctaaaaagtttcatggggtcttgaagtatattattaattttcagtgtatagaattcaacatttatcaattagatctatcttattaattatgtgatttagatcatcttttttctcttaagtctgctttctaaaagcatacagctggttccttttatttgtggtagttatgtcgtataaaatcacttccagcacagaattagcaaatggtgaatcattgctcctaggggaaatacaaaattagctttctatgagccactgataacgtttttgtcagctgatcaatacgtaatctttttaatgtgtttctgtttaaagatactgtatttaacatttgattcattagcattgaactcatagccagtagcactttaacttatacttgaattaagtttatctaatatacattttttctccaaaagtcatattgcagcctttttgcatgtaggaatgaacactaaacatgttgaaggggtcattgaaaacaccacattaccaaagcaaaagtacaaaaatgcagaaaatgcaataaatatgtagtcatgtgccacatacaacattttgatcgatgtcagactgcatatccagtggtggtcccatgagattataataccatatttttactatatcttttctattaagatatgcttagatacccaaatacatagctatggtgttataattgcctgcagtattcagtacagtaacatgttgtacaggtttgtagccaaggagcaataggctatctcctatagtctgggtttgtagtagactgtaccatttagctttgtgtaagtacacactatgatgtttgcacatatgaatcactgatgacactttctcatgaggcatccatcattagcaatgcatgactatcacagaaggacactttaagtacacaagtggaaacagaaggcagagtggctcattgttcagcctcagctgggaatgtgtgtgtcaggcaattcaaaatatttaccactctgcgtctccataaatgatgccaaaagtatcgtgagtgttgatttttagggtcacagaaagcctgctctggctgaagatttaaataagatctaaagatttataataccccaaatatccaaatttcaacaaaatgtccctcatgaccagaaaagaatcaggaaaatctcaactgaaatgaaaaatgaacatcaatagacaccaggagaatacagatgtgaattgtctgacaattattttaaagtagccatcacaagaaggctgagcaattataaacatacttgaaacaaatgaaaaaaacagaaagtcccagcaaaaaaaaaaaaaaaaaaa

SEQ ID NO: 1798 - DNA, 826 bp, Homo sapiens
ggcacgagctcgtgccgaattcggcacgagagaaaacacctaaagctgttttgagaggtttgtcattagaagatgacattttcagaccaagcacatggtttgtttcttaatgaactaagataacgagggaaaacttagtgacttcttaaatgtcacatccttctgctggtcaatctgaaagaagaatggattcttcagcagcagttttgggggtattgctcaaaaccttactacttctgtggagctgcctgctttttcccagccagctagttaagcctcctagtggcgctactgtgttctgcaacctgcagtgggcatggagagagagggccagccctgccttgcatgcctgctcctgagggctttgttctggggtccctagggaagcacatttctctggctcttctagagggtgactcgcaactttaggcctctgcgtctggtcttcctcctgatggatgtcgacctaggcttggtcatttgttccttcccaggtgtttatggggtttcctcattgttccctgatataattcagtttaagagttggtgacagaagcagatgccctatattcatgggatgttccatctcacttcatgacttactggaatcctaatttttaaaattttcacagtggaattaagacataatggatgactctagccagacatgctgacacatgcctgtggtccagctgcttcagaggctgaggcaagaggatcatgaacccaggaggtcaaggctgcagtgagctgtgatggcgccactgcatcccagcctgggtgatagagtgagacactgcctcaaaaaaaaaaaaaaaaaaaaaaa

SEQ ID NO: 1799 - DNA, 2243 bp, Homo sapiens
  SITE (19): n equals a,t,g, or c
ggagttccaagcccacggncccggtcgcggcctcgccgccctcccgcgccccgcgccgggagcgggcctagagcgctcgcctcgcccctccgcgagcagggctctggcgcccgcccctgtccgcaccgctggcagcctgaagagagtcgctggccgtggtcgccgctaggtaggatatatctgcatcttgaaaggaagataaaacaaaagccttctttggaatagatggatttttgtcactttctgtgtgaactaaagtgattcaatgtctcttttggattgcttctgcacttcaagaacacaagttgaatcactcagacctgaaaaacagtctgaaaccagtatccatcaatacttggttgatgagccaaccctttcctggtcacgtccatccactagagccagtgaagtactatgttccaccaacgtttctcactatgagctccaagtagaaataggaagaggatttgacaacttgacttctgtccatcttgcacggcatactcccacrggaacactggtaactataaaaattacaaatctggaaaactgcaatgaagaacgcctgaaagctttacagaaagccgtgattctatcccactttttccggcatcccaatattacaacttattggacagttttcactgttggcagctggctttgggttatttctccatttatggcctatggttcagcaagtcaactcttgaggacctattttcctgaaggaatgagtgaaactttaataagaaacattctctttggagccgtgagagggttgaactatctgcaccaaaatggctgtattcacaggagtattaaagccagccatatcctcatttctggtgatggcctagtgaccctctctggcctktcccatctgcatagtttggttaagcatggacagaggcatagggctgtgtatgatttcccacagttcagcacatcagtgcagccgtggctgagtccagaactactgagacaggatttacatgggtataatgtgaagtcagatatttacagtgttgggattacagcatgtgaattagccagtgggcaggtgcctttccaggacatgcatagaactcagatgctgttacagaaactgaaaggtcctccttatagcccattggatatcagtattttccctcaatcagaatccagaatgaaaaattcccagtcaggtgtagactctgggattggagaaagtgtgcttgtctccagtggaactcacacagtaaatagtgaccgattacacacaccatcctcaaaaactttctctcctgccttctttagcttggtacagctctgtttgcaacaagatcctgagaaaaggccatcagcaagcagtttattgtcccatgttttcttcaaacagatgaaagaagaaagccaggattcaatactttcactgttgcctcctgcttataacaagccatcaatatcattgcctccagtgttaccttggactgagccagaatgtgattttcctgatgaaaaagactcatactgggaattctagggctgccaaatcattttatgtcctatatacttgacactttctccttgctgctttttcttctgtatttctaggtacaaataccagaattatacttgaaaatacagttggtgcactggagaatctattatttaaaaccactctgttcaaaggggcaccagtttgtagtccctctgtttcgcacagagtactatgacaaggaaacatcagaattactaatctagctagtgtcatttattctggaatttttttctaagctgtgactaactctttttatctctcaatataatttttgagccagttaatttttttcagtattttgctgtcccttgggaatgggccctcagaggacagtgcttccaagtacatcttctcccagattctctggcctttttaatgagctattgttaaaccaacaggctagtttatcttacatcagacccttttctggtagagggaaaatgtttgtgctttccctttttcttctgttaatacttatggtaacacctaactgagcctcactcacattaaatgattcacttgaaatatatacagaaattgtaatttgcttttttttaaaaaagggggctaaagtaacactttcctacttatgtaaattatagatcctaaattcacgcaccccgtgggagctcaataaagatttactgaattgaaaaaaaaaaaaaaaaaactcgaggtcgacggtatcgataagcttgatatc

SEQ ID NO: 1800 - DNA, 968 bp, Homo sapiens
  SITE (953): n equals a,t,g, or c
  SITE (954): n equals a,t,g, or c
  SITE (963): n equals a,t,g, or c
  SITE (964): n equals a,t,g, or c
  SITE (967): n equals a,t,g, or c
ggcacgagccatgtgaccccaggtgagtctctgcttctctctgaacaggtacccttctctcagccagcttgagggttaaagtggatgctgggtgcacagcaggccttgcagggtatccagtgccccacctggcccccgtggaggggaactgctctgagttttgcaggaaggatgatccgatgctgctggagattcctttccatggaaatggccgctccccaggtcccagaggaaatgaaggcctgggtgcgtcctggctgtggcacctcacctcctgggcctccacctcttgctctcaggacccttgtggggatgagagaggggcgtggaagggccttaggcccagcactgcatgagtaggatctgcctttgggtctgatgccttcagatcagatgtgcctaggttcttccttttctgttcaccccgtgggcctggcagacctcgagagtttttggggcctagactgggaggctcagtggtgcaacggttgggatgcagggtcactgtaagtcagacaagcggcctgcagctcaagcctcagtgtcctcactgtggarggcggctcactcctcagctgacgtctgacaargacggagttagagaacctcctgtgtgctgagctctggccaggagcttccaccttcctctccctgagtcctggaaggtggtctcagtgatccctattttgcagatgaggccactgaagccggggaagggcaatgacttacccaaaatcatgcagaggcagcagcaggattagaaccagctcatcttcccaacctgcctgggcaatgtaatgagactccaacagaagaagaggacagcggcaaactgccttttcagaccctaaagcaagtgtaatattggctgcctttgttctgaaaaaaaaaaaaaaaaaactcgagggggggcccggwacccaattcgccctatagtgagtcgtatacaatanntcctttttnnccnt

SEQ ID NO: 1801 - DNA, 1532 bp, Homo sapiens
ggcacgagaccgtacatagatgtccaggtcaagttcttccttgtagttttggaaagaaatgacaaaagcaaatgacctctgagcaaatttttttttttcctgctccaatgggcttgcttttatggctcaggtgcttagctggtgtgctaaggagacatggctgctgttgggcatagctctcagatcatctctctcctgcccacagccaaactggtgggctccatgctgaactgaatgacctgaatactcgacctcaaatgactaaatgccacatagagctaatgtacacttttgttgggtgtgagtggaggatagttgagtaggcatgtggcacacagaggattgagaggcagctattatactctatttcccagggcctctggattaagtagaggtgggttaggattgacatgttgagggtgatgtggtattcttaattttgcactgagtaacagaaggtcttcaacaagtgtaatcagacccagtttatgtgtcttcctagattcacttggctctgtccaaccctagatcttagctgcttgtgccatggagagattctggccacctgctgtgtgagcctccctcagggtgaggactgggcttcggcctggcttccatggtacctgctgcagagggagctctggaggctccagtatccatgactgccccaactatacctattaaactacggctgttcacattgcttcctcctgaaatgaaatggcatgccttaggccatgaggtctgacttcctctgcagcttcctggaaggacttagcaaaccatttacccaaataaagtataggcgatagaaattgaaacctggcgcaatagatatagtaccgcaagggaaagatgaaaaattatagccaagcataatatagcaaggactaacccctataccttctgcataatgaattaactagaaataactttgcaaggagagccaaagctaagacccccgaaaccagacgagctacctaagaacagctaaaagagcacacccgtctatgtagcaaaatagtgggaagatttataggtagaggcgacaaacctaccgagcctggtgatagctggttgtccaagatagaatcttagttcaactttaaatttgcccacagaaccctctaaatccccttgtaaatttaactgttagtccaaagaggaacagcttctttggacactagaaaaaaccttgtagagagagtaaaaaatttaacacccatagtaggcctaaaagcagccaccaattaagaaagcgttcaagctcaacacccactacctaaaaaatcccaaacatataactgaactcctcacacccaattggaccaatctatcaccctatagaagaactaatgttagtataagtaacatgaaaacattctcctccgcataagcctgcgtcagattaaaacactgaactgacaattaacagcccaatatctacaatcaaccaacaagtcattattaccctcactgtcaacccaacacaggcatgctcataaggaaaggttaaaaaaaaaaaaaaaaaa

SEQ ID NO: 1802 - DNA, 1874 bp, Homo sapiens
  SITE (1593): n equals a,t,g, or c
ggcgcgactttttgaaagccaggagggttcgaattgcaacggcagctgccgggcgtatgtgttggtgctagaggcagctgcagggtctcgctgggggccgctcgggaccaattttgaagaggtacttggccacgacttattttcacctccgacctttccttccaggcggtgagactctggactgagagtggctttcacaatggaagggatcagtaatttcaagacaccaagcaaattatcagaaaaaaagaaatctgtattatgttcaactccaactataaatatcccggcctctccgtttatgcagaagcttggctttggtactggggtaaatgtgtacctaatgaaaagatctccaagaggtttgtctcattctccttgggctgtaaaaaagattaatcctatatgtaatgatcattatcgaagtgtgtatcmaaagagactaatggatgaagctaagattttgaaaagccttcatcatccaaacattgttggttatcgtgcttttactgaagccagtgatggcagtctgtgtcttgctatggaatatggaggtgaaaagtctctaaatgacttaatagaagaacgatataaagccagccaagatccttttccagcagccataattttaaaagttgctttgaatatggcaagagggttaaagtatctgcaccaagaaaagaaactgcttcatggagacataaagtcttcaaatgttgtaattaaaggcgattttgaaacaattaaaatctgtgatgtaggagtctctctaccactggatgaaaatatgactgtgactgaccctgaggcttgttacattggcacagagccatggaaacccaaagaagctgtggaggagaatggtgttattactgacaaggcagacatatttgcctttggccttactttgtgggaaatgatgactttatcgattccacacattaatctttcaaatgatgatgatgatgaagataaaacttttgatgaaagtgattttgatgatgaagcatactatgcagcgttgggaactaggccacctattaatatggaagaactggatgaatcataccagaaagtaattgaactcttctctgtatgcactaatgaagaccctaaagatcgtccttctgctgcacacattgttgaagctctggaaacagatgtctagtgatcatctcagctgaagtgtggcttgcgtaaataactgtttattccaaaatatttacatagttactatcagtagttattagactctaaaattggcatatttgaggaccatagtttcttgttaacatatggataactatttctaatatgaaatatgcttatattggctataagcacttggaattgtactgggttttctgtaaagttttagaaactagctacataagtactttgatactgctcatgctgacttaaaacactagcagtaaaacgctgtaaactgtaacattaaattgaatgaccattacttttattaatgatctttcttaaatattctatattttaatggatctactgacattagcactttgtacagtacaaaataaagtctacatttgtttaaaacactgaaccttttgctgatgnkgtttatcaaatgataactggaagctgaggagaatatgcctcaaaaagagtagctycttggatacttcagactctggktacagattgkcttgatctcttggatctcctcagatctttggtttttgctttaatttattaaatgtattttccatactgagtttaaaatttattaatttgtaccttaagcatttcccagctgtgtaaaaacaataaaactcaaataggatgataaagaataaaggacactttgggtaaaaaaaaaaaaaaaaaaaaaaaaaaaa

SEQ ID NO: 1803 - DNA, 1471 bp, Homo sapiens
ggcacgagcttcctgaaagcttaatgcccaaactgattgatttggaagattcagcagatgttggggatcagccaggtgaggtaggttattcaggctctcctgctgaagctcctccaagcaagtcaccatcgatgccatcactaaaccagacatggcctgagctgaatcagagcagtgaggatactgctattgttcatccagttcccattcgtatgactccaagcaaaatccacatgcaggaaatggaacttaaaagaactggcagcgatcatacaaatcccactagcccattacttgtgaaaccatctgaccttttagaagaaaataagataaattcatcggtgaaattcgcttctggtaatactgtagcagatggttacagtagttcagactcttttacttctgacccagaacagatcgggagcaatgtaactcgtcaaaggtctcattcaggaacgtcgcctgataacactgcaccaccacctccccctccaaggccacagccctctcattctagatcatcatctttagatatgaatcggacctttacagtcaccacaggacaacaacaggctggagttgttgcccatcctcctgcagtgcctccaagaccacagccctcacaggctcctggtcctgctgtgcatcgcccagtggatgccgatggcctcataactcacactagtacctcacctcagcagataccagagcaaccaaattttgcagatttcagtcagtttgaagtatttgctgcatcaaatgtaaacgacgaacaagatgatgaagccgagaaacatccagaagtcctgccggctgaaaaagcttctgatcctgcaagttctcttcgagttgccaaaacagatagtaaaactgaagaaaagacagctgctagtgctcctgccaatgtgagcaaaggcacaacaccacttgctccaccacctaaacctgttcgaagaagattaaaatcagaagatgaattaaggccagaagttgatgaacatacacaaaagacgggtgtcttagctgctgttcttgcatcacaaccttctattcccagatctgttgggaaagataagaaagctattcaggcatcaattagacgtaataaggaaaccaacaccgttttggccagattgaatagcgaattgcagcaacaattaaaggatgttcttgaggagagaatttccctggaagttcaactggaacaacttcgaccattctctcacctataagccaattgccgttaactgtgaacatacttgtttttaagtggttttgggttcaaagccaatttggagacctagacattcagctcactgcttaactcaacattaaattttatgattctgttttgccctatatgttcaccgttgtatttaagtatcttttattttttaatttcgacaataaaaaggtcaggatggcgttttctggaaaaaaaaaaaaaaaaaaaaaaaaaaaaaaaaaaaaa

SEQ ID NO: 1804 - DNA, 1117 bp, Homo sapiens
gggtgtgtggctcagacacttgtgtcctcacctgccacagtgggaatgctttgtgcgggaaatccagaagttgcaacaggaagacaagtgccagaagaacaagctggacagctacttttgggaaaatggattcaggagggaggagacatgatagcaaacccacgtatgtgtttgacactttgagctatgtgcatgcttcatcttgataaagataaaacctttaaaaaaatcacttaagtagtatagaaagtataaaataaagtttatcagctattatactaaataatactgaatgcaagctctatattttactaagtgtaaatgggctgaatttgactgttaaagaacagtttatcagattggattattcaacctgtatttatcatttttgctacaagcatctattgccctttcttctagtaaagtacctgatttggatttgcggatttccccggttagatgagattggcagaactgctcatcaaagttcacggctctccaagaaactgacatgtgactctaagctatgccattaggacgtctgcttcctagacttttattcttcctcatagtgacatacagactgggagtactcgggactgagtcatcccagctattacaatatgaggaaactgtccatctgttctgccacctggacctcttcgctacccatttgctctactttctttactggaaaattttcctactggttctatcttacgaattccttttctgttttaactagtgagtctatttcagttgcctatagccaatgaactctaactgatacagttgaaacctccaataagattcagctggataagagaaaaagaaagattaaaatgaaaggtgtgtgtataaatgtatgtaagtaagcaagcaagataggtaaaaacaaaaagaaagcagaacttaaaatccacaaaacagaatttaagttgaaaggcattagaaacaaacagggtcattatgaaatgataaaatatatgattcataaggaagatgtaacagtctaggatgaaaaacaaaaacaaaaacaaaaaaaccctagcaaacagaacctcccagtctcagcagtcaaatacaattgcataaaaaaaaaaaaaaaaaactcgag

SEQ ID NO: 1805 - DNA, 1121 bp, Homo sapiens
ggcacgagtgcaaattatatagccagctctgcctgccaccttaagcttattgcttgccctctagctcttccccccataagagttaccccataattgcaaagtagctctcaaagttccaggcatcaaatctgtgtttgaggcaggaaatagatggaagagttggtgatagcaagcttttcttttatggtcattacgtttatcaggagtttaaaagtctttccagaaacattcagccaacattgggccccatggacacttttagttgcaacaaagtatggaacaataagcatctggcatagaggaatagaaccttccaaaccaatatctcgcaaagaataccgtctaaggcagggattggccaactttgtctgtgaaagggccagataggctctggtggctatatatagtctctgttgcaatcattcaactttgctgctctagtgcgaatgcagacatagacaacatgtaaacaaatgggcctggctgtgttccagaaaaacttcttcataaaaattgtaagtgggtcagactaactgtgggctgtagtttgctgacccctgcttagaactttatttcgctttggttaccaaatggtagaccagggggatgatgataattaagtaggtgctatttattgaatgcctactgtgtattcgtcacctgaagctgaacacattgccatctctaaaacatatttgtattttcttatcaaggaagaaagcagtttgttgagaaggcaagtagcggaatctgccacaacacaaattaagacttgattaaaagagatacaaatgcatagatggaaagccttgctattgtaaagataccacttttctccaaattaatccacaaattccatgcaattccaatcaacatttctgtagtttttttatagaacttgagcagtggatctgctcagtggattttttatggaacacatacatgtaaaaagtaaaacatcaatacttttggtagaaatttaaacttgaagcaggacagagcttaaaaaataagacacaaaaaacgtaagcaaaaaaggaacattttgatgaatcggttttcattaaaatgaaaaactttcatagaataaaaaggctcattaaaaaaaaaaaaaaaaaaaa

SEQ ID NO: 1806 - DNA, 2322 bp, Homo sapiens
ctcgtgccgaattcggcacgagcggcacgagggagacggttgggagaaccgttgtggcgagcgctacacgaggcaaacgacttctcccttctttgaactggaccccgcgagcaccagagtcggcgtaactatcgcctgacaggcatttaaatcaaacggtattgagatggattgggttatgaaacataatggtccaaatgacgctagtgatgggacagtacgacttcgtggactaccatttggttgcagcaaagaggaaatagttcagttctttcaagggttggaaatcgtgccaaatgggataacattgacgatggactaccaggggagaagcacaggggaggccttcgtgcagtttgcttcaaaggagatagcagaaaatgctctggggaaacacaaggaaagaatagggcacaggtatattgagatcttcagaagtagcaggagtgaaatcaaaggattttatgatccaccaagaagattgctgggacagcgaccgggaccatatgatagaccaataggaggaagagggggttattatggagctgggcgtggaagttatggaggttttratgactatggtggctataataattacggctatgggaatgatggctttgatgacagaatgagagatggaagaggtatgggaggacatggctatggtggagctggtgatgcaagttcaggttttcatggtggtcatttcgtacatatgagagggttgccttttcgtgcaactgaaaatgacattgctaatttcttctcaccactaaatccaatacgagttcatattgatattggagctgatggcagagcacaggagaagcagatgtagagtttgtgacacatgaagatgcagtagctgccatgtctaaagataaaaataacatgcaacatcgatatattgaactcttcttgaattctactcctggaggcggctctggcatgggaggttctggaatgggaggctacggaagagatggaatggataatcagggaggctatggatcagttggaagaatgggaatggggaacaattacagtggaggatatggtactcctgatggtttgggtggttatggccgtggtggtggaggcagtggaggttactatgggcaaggcggcatgagtggaggtggatggcgtgggatgtactgaaagcaaaaacaccaacatacaagtcttgacaacagcatctggtctactagactttcttacagatttaatttcttttgtattttaagaactttataatgactgaaggaatgtgttttcaaaatattatttggtaaagcaacagattgtgatgggaaaatgttttctgtaggtttatttgttgcatactttgacttaaaaataaatttttatattcaaaccactgatgttgatactttttatatactagttactcctaaagatgtgctgccttcataagatttgggttgatgtattttactattagttctacaagaagtagtgtggtgtaattttagaggataatggttcacctctgcgtaaactgcaagtcttaagcagacatctggaatagagcttgacaaataattagtgtaacttttttctttagttcctcctggacaacactgtaaatataaagcctaaagatgaagtggcttcaggagtataaattcagctaattatttctatattattatttttcaaatgtcatttatcaggcatagctctgaaacattgatgatctaagaggtattgatttctgaatattcataattgtgttacctgggtatgagagtgttggaagctgaattctagccctagattttggagtaaaaccccttcagcacttgaccgaaataccaaaaatgtctccaaaaaattgatagttgcaggttatcgcaagatgtcttagagtagggttaaggttctcagtgacacaagaattcagtattaagtacataggtatttactatggagtataattctcacaattgtattttcagttttctgcccaatagagtttaaataactgtataaatgatgactttaaaaaaatgtaagcaacaagtccatgtcatagtcaataaaaacaatcctgcagttgggttttgtatctgatccctgcttggagttttagtttaaagaatctatatgtagcaaggaaaaggtgctttttaattttaatccctttgatcaatatggcttttttccaaattggctaatggatcaaaatgaaacctgttgatgtgaattcagttattgaacttgttacttgtttttgccagaaatgttattaataaatgtcaatgtgggagataataaaaaaaaaaaaaaaaaaaaaaa

SEQ ID NO: 1807 - DNA, 1330 bp, Homo sapiens
gtcctgagtccccagccagccttcagggtccccttggattgtgtagatgcagtctagcggggggccggagaagggctcaggtgggaggggcctcagcaggctcccagctcaggggctggcctggggggaaccctgggagccaggggctgactccagcaacactggcctgtctgcctgttctgggagggctgtgaggatgtcttgcagatgctctggatttctgcggaggcacctccattcctttctggctttttttgcgggggagggctttgggcctctttctttgagggaacaccgtcaaagaaagcctgggagatcgaggcttcagtgagccaggatggaaacgcgtgtcccaagtgtccggagcaggcggcagaggcctcagtgcggcaaacacagccccagagcctgtgtggcaccagcagcatcttagagccccaggtatatgctgagatcttatctcacgctgtcctccagtgtctggggggcccaaatgatggcacaggggcaagttgggcttgaagggcgcagatgcctgtgttcaaggaaggtggccaccatgggccgaggtctcacccaggaccccttgctctgctcctcagccttgcagtcacggcagcactatggtggactgcccatggccgtgtgactttgggggcaagtgggagggcgccctgaataatgattgcaaggacaacaggcagaggctaccctagagcaggacacagggtgtggtactgacaaccctagtgtcacctcaaatccatgtccccacactctgggcatgggtgggacttgtgaccctaccctgtcaggcggaccagtggcccaggagccatgaggacagttgtgtgccactggaagagaaactttttgaaaaaccctaaatcaggtagagaaagcaaaaaatctctggccgtaaaccgtgctctctaatttatcggcagcttctgtggatgacctctgatgagcccgggctgcgtccacgccctgggcaggtaggcgggagcttccctgcgtgggcctcatttcttgctgcagagaatcttttgcactaagtcatgctgtttcctcaaagaagctttgttttttgttaacgtattactcagagtcacccaagcctcttggctgagggtgaaggtgggacgggaggcgggagggggctggtggtgccgctcgtgcggtgtcaacgctgcagggagttgtggcaccttggtgccctctgagcacctggccgcctgctgtccccggtgcctgtgaaattcgtcatgccatgacccacctgcattaaacctatttttttaatgtgtaaaaaaaaaaaaaaaaaaac

SEQ ID NO: 1808 - DNA, 1100 bp, Homo sapiens
ggcacgagggccactgtgtcctgggacgtcccagaaggcaacatcgtcattggctactccatttcccagcaacggcagaatggccccgggcagcgtgtgattcgggaggtgaacaccaccacccgggcctgtgccctctggggcctggctgaagacagtgactacacagtgcaggtcaggagcatcggccttcggggagagagtcccccagggccccgggtgcacttccgaactctcaagggttctgaccggctaccttcaaacagttcaagcccaggtgacatcacagtggaaggtctggatggagagcggccactgcagactggggaagtggtcatcattgtggtggtgttgctcatgtgggctgctgtaattgggctgttctgccgtcagtatgacatcatcaaggacaatgactccaacaacaatcccaaggagaagggaaaggggccggaacagagtcctcagggaaggccagtggggacaagacagaaaaagtcaccatctatcaacaccatcgacgtttgagtgaagaaacacacccagaagagagatgcactaacaactggggatagggatggggtcagggggagcccaagatggtgatctgcccgagactcccagagggtaatgccactcccacaatctcaggcctggtacccatcctctttccactgtgagcagagccagaaggtaggtctgttcagagtctgtgcccctggacctggggagtggatatcagatgggatatctccttccattccccggtccaggggagagtcactagttgtaccctactccattaggtcccaaatgggggccccatttcacctgtatcaggactctgagcatccccagctgccccacatcttgcctctggccctcagagaggggtgtttctgtgggtactcctcttaccccagcaaataaaaggaattgtctgaccctagaggcagatgctgcactgcactactccaatgtcttccatggagcctcaggtgctccccctctcacctggcagccccttcagctgctagtgatatcacttgttggacatttttccaataaaggttcttggacaaaaaaaaaaaaaaaaaaaa

SEQ ID NO: 1809 - DNA, 1963 bp, Homo sapiens
  SITE (2): n equals a,t,g, or c
  SITE (15): n equals a,t,g, or c
  SITE (1871): n equals a,t,g, or c
  SITE (1954): n equals a,t,g, or c
gnaactctctatatngaatgctggtacgcctgcaggtaccggtccggaattcccgggtcgacccacgcgtccggatgaagcccatgccgctgtctgagggcaagtctatactgctgtttggaggggctgctgctgttgccatcctggcagtggccatcggggtagccctggctctgagaaagaaataggaggcttttcagaagagaaagacagaaggatgtaaggttggagttgtattggctggaatttgaacctccagcagctgtctggacatttgtggaacactctgggataattggggacttctgctcaacatggcagtggcatgttaggcatgttagggcttgaggtggggcattcacattcatctgactgtaaatcccaagggcctccgctcatgctaaattgagaatcttaggggtaaagcaccccctccaggaccgggtttctcagccttggcactagtgctgttctgaccattctctgtgttggggctgtcctgtgtgtggtgggctccacccactagatgccagtggcaccccctcccagagatgacaaacgaaaatgtctctagacattgccaaatgtcccgtgtgaacatcccctattgagacccactgctttagcgagagagggtttacttaggaagaattgggatagaaattcccagctgagagaacttagctgtgggctcctcagctactgacttcttagctcttaatccccttagaatttcatctttctcgatgagcaggctctgcacccactctttttttgccccccgccctcatcctggagtgtgagggtgctcgcccgtactctcagctgcctctcagggactgcactgttcctcttcacccccaggttcctgctaagatcccacgggcgagggcttgctctggactcagtctgtcaagtccccgaagcttcctgcagctccaccttgtaaaaatgctgcctttgggaatcttcgaaatatgtacacagagaaaatcacatgaaggagacctggggtccccacttgtgagtgcaactgcaagtaactctggctagagagacacatgtgtcttgtgtcaaggcaggaggataaccyggatgaccttctgaggtctcttcagcccttttcgctagtggtcacccaccaccatggttacttgccagcaacatctctattgctggatggtccctgtctataaccttgggctagtatattttttccaatatgggaccttagtcttactactgatgagttctatgggtctcttgctagggggtaaggatttttattcttgggcttatagagccagttagatcataattcttatgaaatagagagtgtcctaaatatcactgaaataaaaagtaggaaaaagaagcttgaattttaagactgaggctgctctgcagattctagtttggctttcagagttcaagagtggtggcatcttcacctgaattcttcaatgccagggtaataaaccaaaatagtcctaatcagtatatgctagttgagcatcggcataattttctttcctctggctgatcccagccctaaaggaagggtagacccgtgtctttccagccctaaaggaagggtagacccgtgtctttccagccctaaaggaagggcagacccgtgtctttccatgcccgagggccacgacgtcactatgcagggcacacgtggcttggtttaaaaaggtcatcttagatttatcttagtaaatgtaataaattattttttagatcttgaaatttataataaaaatactttacctaccctgatcaccaaaacctgatgttttaaatgtgctttctttttgaaatttatgttttcaaataaaatctccctaaagcaatatttaaaaatnggtmaaaaaaaaaaaaaaaaaaaaaaaagggcggccgctctagaggatccaagcttacgtacgcgtgcatacgacatcatagngcgatccct

SEQ ID NO: 1810 - DNA, 960 bp, Homo sapiens
  SITE (928): n equals a,t,g, or c
  SITE (956): n equals a,t,g, or c
  SITE (957): n equals a,t,g, or c
  SITE (959): n equals a,t,g, or c
ggcacgagctcactgcagcctcaacctcctgggcccccacaattttcccacctcagcctcccaagaagctgggagtacgggtgtgtgcaaccacacccaggtaagttttgttttttgtgtgtwtttttttgcatagaagaagtctcactatgttgccctagctggtctcgagctcccgagctctcaaactcctgccttgacttcccaaagcgctgggattataggcatgagccaccacacccagcctctaaacactttgcatgtgtttcctaaaaacaaggaattatgtgggaacataaccacagtaagacgrttaaaatcagaaaattcaccttcatacaatactattagctaacctcgcccggcctagccttgacatttttgaggagtcggttctgcagaatgtccytcagttkgggaacatctgttgsttttctcaggactagrttcagtttgtgcatttgtggcaggaataccccggaagtgatgctgtgctattcttagtgcatcatagcaggagacctatgatgtcagtgtgttactggggatgttaattttgatcattggttgagatggtgtccaccagctgtcttcacagcaaagttagtattttctctttgtaaaataagtattatgtagccgggcacagtggcttaggcctgtaattccagcactttgggaggccaaggcgggcagatcacctgaggtcaggagttggagaccaccttggccaacatagtgaaaccccatctctactaaaaaatacaaaaattagcatggcgtggtggctggtgcctgtagtcccagtgactcaggaggccgaggtgggaaactcatttgaacccaggaggcagaggttgcagtgagcagagatggtgccgttgcattccagccgggcgacaagagcgawactccttctcaaaaaatnaaatataataagtattaaaaaaaaaaannana

SEQ ID NO: 1811 - DNA, 1691 bp, Homo sapiens
  SITE (2): n equals a,t,g, or c
anccgccggtgcagcatgtactgccgtcgcgtgacaggcccagaggctttgggcaaagcgagccccgccggtccttctttgaatccttcatccggaccctcatcatcacgtgtgtggccctggctgtggtcctgtcctcggtctccatttgtgatgggcactggctcctggctgaggaccgcctcttcgggctctggcacttctgcaccaccaccaaccagagtgtgccgatctgcttcagagacctgggccaggcccatgtgcccgggctggccgtgggcatgggcctggtacgcagcgtgggcgccttggccgtggtggccgccatttttggcctggagttcctcatggtgtcccagttgtgcgaggacaaacactcacagtgcaagtgggtcatgggttcsatcctcctcctggtgtctttcgtcctctcctccggcgggctcctgggttttgtgatcctcctcaggaaccaagtcacactcatcggcttcaccctaatgttttggtgcgaattcactgcctccttcctcctcttcctgaacgccatcagcggccttcacatcaacagcatcacccatccctgggaatgaccgtggaaattttaggccccctccagggacatcagattccacaagaaaatatggtcaaaatgggacttttccagcatgtggcctctggtggggctgggttggacaagggccttgaaacggctgcctgtttgccgataacttgtgggtggtcagccagaaatggccsgggggcctctgcacctggtctgcagggccagaggccaggagggtgcctcagtgccaccaactgcacaggcttagccagatgttgattttagaggaagaaaaaaacattttaaaactccttcttgaattttcttccctggactggaatacagttggaagcacaggggtaactggtacctgagctagctgcacagccaaggatagttcatgcctgtttcattgacacgtgctgggataggggctgcagaatccctggggctcccagggttgttaagaatggatcattcttccagctaagggtccaatcagtgcctaggactttcttccaccagctcaaagggccttcgtatgtatgtccctggcttcagctttggtcatgccaaagaggcagagttcaggattccctcagaatgccctgcacacagtaggtttccaaaccatttgactcggtttgcctccctgcccgttgtttaaaccttacaaaccctggataaccccatcttctagcagctggctgtsccctctgggagctctgcctatcagaaccctaccttaaggtgggtttccttccgagaagagttcttgagcaagctctcccaggagggcccacctgactgctaatacacagccctccccaaggcccgtgtgtgcatgtgtctgtcttttgtgagggttagacagcctcagggcaccatttttaatcccagaacacatttcaaagagcacgtatctagacctgctggactctgcagggggtgagggggaacagcgagagcttgggtaatgattaacacccatgctggggatgcatggaggtgaagggggccaggaaccagtggagatttccatccttgccagcacgtctgtacttctgttcattaaagtgctccctttctagtccttcaaaaaaaaaaaaaaaaaaaaaaaaaaaaa

SEQ ID NO: 1812 - DNA, 385 bp, Homo sapiens
attcggcacgagtaataatcaacaccctcctagccttactactaataattattacattttgactaccacaactcaacggctacatagaaaaatccaccccttacgagtgcggcttcgaccctatatcccccgcccgcgtccctttctccataaaattcttcttagtagctattaccttcttattatttgatctagaaattgccctccttttacccctaccatgagccctacaaacaactaacctgccactaatagttatgtcatccctcttattaatcatcatcctagccctaagtctggcctatgagtgactacaaaaaggattagactgaaccgaataaaaaaaaaaaaaaaaaaactcgagggggggsccggtacccattgg

SEQ ID NO: 1813 - DNA, 1634 bp, Homo sapiens
  SITE (1215): n equals a,t,g, or c
  SITE (1218): n equals a,t,g, or c
  SITE (1223): n equals a,t,g, or c
ttttttttttttttttttttttttttagcagaacaacatgcttttattttaccatcatgcataaaaaggaagacaaatatgccaatggtacacttccaatttgtcagagcaatttcacagtatttaagcaatttaggaaaaaagatatatcacttactaagttgttaccagggaaaattatcatgtaagacaatcaattaaaccatacttttgtagattatttttccatgaaggcaatttgacaagcctaacaaagaccaagttgttcaaactatgtttctaggaatatagtttaacagaaacaagaacaagttgaaaactgttatgactattcatatgtctctatattgtacaggcaagtaagactgttgttcttccaaatgttcccaattgaaatcaaaagaatatctgtacagctcaattttcacaataagtttagaatcagaaaaaaaaattttactaaatcctaatgaaataacaatcttcacataaattaggtcacaaaacaagtaagaaagcattcaaagttgcgctgtctttcttttaaagaaccccttgtctaggcaacatatttaacactttaaccccttcattctccctgaaaagtatttttccattcatcatcattggggagtaagtactccttcctcgagagctcttaacgacagcacagtcttcactctaggcccaatttttacctggcccatgcctctagccttttgttcagtttctcctgcttagggcacctttcatcccatctagatgtgtctctctttaactattctaggagttgataaaagggctaggaagtaggaagttgggaagaaggggaggggcgtaagagctctagcactctattttacaggccaacttctttgcctctgaaaatgacagagccaaaatgaaataaaaaccttgcttttacaaatgtttctgagctatcacttttttaagagaggattgggaggctaaggagggcggatcacgaggtcggggttcgagaccagcctggccagcatggtgaaaccccgtctctactaaaaatataaaaattagccgggcgtggcggcgcgcgcctgtagtcccagctactcgggaggctgaggcaggagaatcgcttgaacccgggaggtggaggttgcagtgagccgagatcgcgccaaagcactccaacctgggcgacagagcaagactccgtcctccgtctcaaaaaanaanttttnaaaaggaaaacagggagagagagggaccttggcaggagccaatgtagggcaggtagcaatagaaagtgactagaggtgaaggaagagcaatgaagtaccataaatcacacagaacaagtggctcactgcttttctcctctgagttcattaacgtccagtaactgtccacagggcatgtgcccatactgctcaatgcagagctgagtaggtggaacaggctcccaaagctagaaatccaagtgacagcaaccagttcagaggccctgggaataaacagggtccaagcagtgcagataaaggcagtacaatctacagtatcatttgcttggcttacaagtagtgtgaaggatgacctcgtagcatgtgatattccagaacagcatgaaggtcatatggaagtggactcgtggc

SEQ ID NO: 1814 - DNA, 889 bp, Homo sapiens
ggcaaggaggagggccgccgttgctggagttcagcttagggaaggaggactctgaggaggccccgagccgcggagctttcgggggaggcgcccgcgcagacgcgaggcccatagccaggaccaccacctagctgattcttgatgacattggtcgggaaaactcgcctttcacggcccggccaaggggcatttgggtgcttttgctgcccgtggctgtgctcagcgttgtgggaagcccctgggaggccgaatgtgcaggatcaccgaggggaaagtgagcttgacaggaaaagaactacagcctgtgtgggtcccctcccgacaattaaaattgcaccataactccaaagatgaaacgctcccagaaagaaaaggcaaagacccatcggaaacaaaagagcaactttcaccgcctgatacatacacttcatgacatccacattgagacaaaatctcgccgtgtgacctacaacacctctcgttcaaccccacctacttggggtcgaatacagattttatctcatcaaacagaaaaattcttaacagaaaaaggaatcccaaaaatgactggtaatataattctggctgcctttatggtagtcagtgcagcgtctgcagatgcctctaaggagtccgaaaccaagtccgaagtcaacaacaagcaatgatggcgatggcgattctagttaataaaaaggggggagatgtgggcggcaagccacccaggcaccgaggcaagagacagaggacacgagctgttccagtataataaaatataaaacaagaatagttataccagatatagatcttagatatgattatatacgaatatcattaatcaaaaaaaaaaaaaaaaaactcgagggggggtcctggtacccaatggtcc

SEQ ID NO: 1815 - DNA, 1578 bp, Homo sapiens
  SITE (1071): n equals a,t,g, or c
acgcgtccgggcacactctcctctgactcgggccctcgctgagctgtagagggaagggggaaagcctcccagactctctgtcaccatgtgctacggcagatgtgcacgatgcattggacattccctggtgtggctggccatcctctgcattgtggccaatatcttgctttactttcccaatggggaaacaaaatatgcctctgaaaaccatctcagccgcttcgtgtggttcttttccggcatcgtgggagggggcttgctggtgttcctgccagcatttgtgtttatcgggctggaaaaggacgactgttgcggctgctgtggccacgaagactgcggcaagagatgcgcgatgttttcttctgtcctgcctgctgcgatcggagtcgcgggatctggctactgtgtatcgtggcagccctgggcttggcggaaggaccactatgtcttaattcttcgggccagtggaactacacctttgccaacaccgatggacagtaccttctggatacctcctcatggtcccagtgcactgaacccacacatgttgttgaatggaatatctctctgttttctatccttttggccctcagtggaattgaattcatcttgtgtctcattcaagtaataaacggagtgatgggaggaatatttggttatcactgctctcgccaacagcgatatgactgctgaaagaaccaccccaagacagaaccacaaccttcctctatttcattgtaatttatatattctacttgtattaatttgtaaaactttgtaccactgtatcatactttacatattctacttttataaatgtgtataaagactggcatcttcatgtgatgtcaagcgtagcaaacaaaccttttttttaggactgtgaaaacaaatgaggtcatttattgactgaatgacggtcggtcctcagcgtactgaatgaactctggcctgagtaatgtttttgagaaacattataaggataaatatcatttttccatttctattgtatgtgcatttccatttctattgtatgtgcatggaagatgtcaagttacttttttttttttnttaagaccatgaaggagaaaatccaacaacttgaaaagatgtgggtttttttttttcactgtttatatggtgtttcccattcatatgcctgccaatctctgacaagaggccattaggaactgttccgagttttgcaagagacagatacttgcccagagcaggacggctggttgaaaatgcccgagctagaggaaggactcaacaatgttgtcaggagtcctgccagatcttacctttctctgacacgtggaaaactttttgtccttcaaagacaagtgccaaggctcacatcttgaaaaagaaaaaggcctggatactcggacaagaaaaaatgggaaacggaataaaacagttaatcaacatcatgggaaaatgggggagaaggaggaagggcaagaggaccgtgaggaaataaccccaaaacttgatggttgaaatccaacaaaataaagtatccattgaccatgtttaaaaaaaaaaaaaaaaaaaaaaaaaaaaaaaaaaaaa

SEQ ID NO: 1816 - DNA, 2082 bp, Homo sapiens
ccacgcgtccggcatttcagtaataatgtagaaaaatattattaaaaaaagaaaaaaaagttcagaaccacaaccacgaggagcctcactgtgaaagaggcgcataataaaactactaaccagcggaggttatgctattttgagaaaaacaattaacctggttccagagaaatgttttatgtaaataataaactaattgtggcttgtaaatgatttgtatgtgatcctgtccactaaaatcacttaacaattctacaataagcttctgcatcaaagcctgctgcttgctctgtgccgaaataacaccgaatggaatctcctcatctcttgcctgttagccatgtgtctgattcagggcatgtatcttattactcatttttgtacatgtactctcgtttggttttgtaacttgcaattttcaaaccaaagttttatagtcactttttctcttcctgtttcgctgtagtcactggtgttcctttcccccgcgccccccgactgtaactcagtctgtgggagagacgccccggaaaacgtcgtgtactgtatattacctggtcatagctgattttcgcctccacagttcggtttctaggagccaataaaacttccccttgcctcctcatctttccaaattgttctttgaatggaggcgtttgaactcatgaacagttgcttggggatttgtgaaaatcctatctaggtttccgtgtttacagttctttggcgcagcctcgggcccttcccaggtacttgtgcgatgattgtattcactgctggatccttgaaggttcaaaaaaaagtgccatttcattatttgatcatcaccaaattctctctgcaaatggacgtaatcagaacattgtaacttatctatttatagtgatgagattaagactggagtgccatcacctcgggtgatgaattagcttttgctgtgtgtgtgccttccaaatcatgccataactgtaatgttgaatcggacagagccctacgtgcccgagggcggggcctacctgcccgagcgcgagcccttcatcgttccggtggagcccgagcggacggcagacgagtacgaggactacggcgccgacgagcctggcgacgagcagcctccccacgggcgctggcggcgcgccctgccccgcggcgcccggcagtgaacctgagaccgcgcaccgggcggccactctggggggaggtgttgggattttcatttacaggtcagacagagcagtgtacgtcttatctgcgatgtttcttccggcgttgcttcatccaagagtacgctttctgactgtagagaaccttgtgtctgcaggaaacctagctcgctgcacgcagtcttgtagacatttttgcctttgcccttgaaatgcttgcaaaatactttgctcgcgaaagctgcaaggagagaacgtgccttgtgacttcagttagcacaaagggcagcctcagtgaaactcttaggttaagcagtaagtcctggaacccagaactactgtatatttccagagggcagttcatcttttccaatacttgtttgcaattcagttacaccacgattaaagtaattcccctcctcaaaccaaaaaggaggaaaaaaacaactccattgcgattatttatcttcctcttctatcttctgttatgcattagggcatagaatgctcttatacacctcctttaacaaacacaaaccttaagccatgtagctgaaattactgtatcaactggatacagttccatattggcttaaacctccttggtttagacacactaacatttatgccaaattgcagaatattctgcagagatggaattgcatgtttgggttgtatatttagtatgaactatttttttttcagaacataatgtttcttagttatcaaaagcagttggaaaatgtttgcaagactatgaacatagaattgctgcttttatattttaactgcagattgtgaatttcactgccttatattatttatttctgaaacaaaagaggcatttttcaataaaactactgaaaatttgaaaaaaaaaaaaaaaaaaaaaaaaaaaaaaaaaaaaaaaaaaaaaaaa

SEQ ID NO: 1817 - DNA, 1671 bp, Homo sapiens
ggttttcaaaaacgtatttaggtgacactatagaaggtacgcctgcaggtaccggtccggaattcccgggtcgacccacgcgtccggatggcttccccttctaggctcccctcttactggtattcacgatgtcagggttgtgtgagagcagacgtgaggtgttccagatcatgcatatggacgtagaattgcttcggttattggaattatggatggctgtattatttcgttagcgtgggctgtcagaaatctgccaaatttaagagtaaaaaagaaaaagaaaagtcaaaatagagaggtgaggggaggaaaaccacttccttactggtattcgtaatcttccatctagtttttgatcaaaaagtgctcatttatttgtaaaaatccagacgtggtacctgaagcatagaatgttgtctttccaacacattcctcatcgttgtttccccagaaaatcgttttaagagcttatcaaagcagactaggtatccatattcagtttgacctaaatttttaaaataaacatttaaactccagtttttgtgtgtttactgtgcatcagcactcatgcaaatccgggatcagaaagaaactggggtttagccatctccgaatttccctttgcacatggggtacagtgggtttcaatatgcacttgctgcagagtttttgagcaccttatgggagtaagtagtgtttatttattataattaaaaagaaagttaaagctgcatctctgtagaatatttactttgcagagtgtaaagctgtagtatcttttccagcaggatttactctttcattcttaattcttggttgagaaaatcttcagtgatttaacattcctttatatcctcttaacagtgtcaaatctggggtagaagggaaattttttcccaaaaagggctccatctttgttacctttctgatcactcttagaaatctagctatgatcagtagatggtaacagctcatggcttcctgtatcagcactggagaggttggttgtgaggattaaaatctactcttttccctcagtgacatgtaattgctatgtttttggtaagaaagtctggtcagaaaaaatgtgaaagatcactcaaaaccaaagccagttataaggagtactgtctcctgttggtttaccttcacctcagaactacaagaatattacagtacctagtgaatagtctaacatttctaccagtcttttcagtagcctattggtcttggcatttcttggcactatgctctctgttcttggtgatgtcttcttgtttgtgactttttgttgttttttttttaaagtaactaaatgggactataaatgtagatgtgtatcagtaccaataagtttttttctgaaatccctgaattcccgattcctattcaagtcttttaaacttgttattttcttgctaagtagcaaagaacttttatttttcactttcctatatacctaagtatacctaaaaagtacggacactgcgtttcaatggactgtattgcgtgtagttttttgctgaaaactttttctgtaaacacaatggccttgttcagttttgttgtaaactgacttaccataagatgcactgttgatatgctttctgatgtgtgtttcataagggtgataaaataaagcttaaaaataaaaaaaaaaaaaaaaaaaaa

SEQ ID NO: 1818 - DNA, 1142 bp, Homo sapiens
ccacgcgtccggtcgggtctacgtgggcaatgtggcctggatgcacgtgctggcggcccgggagctggagcagcgggcggctctcatgggcggtcaggtgtacttctgctacgacgactcgccctataagagctacgaggacttcaacatggagttcctgggcccctgcgggctgcgcctcgtggagtcccgcctgctggtgccctactggctgctggtgcttctggccgctctcaacgccctgctgcagtggctgctgcggcccctgtttctctacgcccccctgctcaacccctacacactggccgtggccagcacgaccttcaccgtgagcaccgacaaggcgcacgccacttcggctacgtacccctgttctcttgggaggacagccggacccgcaccatccgctgggtgcaggccgtggagggctcagcccggtgacgtggagctggggcctggagcccggtgcgtggcacgtccgtccatccaggtccagggccctctagccctcggggcagaggggctggtgctacaccagctcgcctgccttgcagctccccgtgcttctaagccacgagccgcgagtctgcatcctcacgcctcttaagtcctggggcagggttttgggacaggcacatcttcactctcgacccaggccgacggctggctggggagtgtccgatggcccgattgttctcaactgccctgtcccatctggcttttcaagcaggaagtgagaaggggtcccacgggcttcgtgcaggccttctgaggtctgggcatggattcaggcctggattcggcctgaagatcctttctgactcctcctaccacctggggccctcttggagggtcatagtctcattttttcaggcctggattcggcctgaagatcctttctgactcctcctaccacctggggccctcttggagggtcatagtctcatttttttaaaaaacatttatcgccttttgacagctctctgctcttcaatgacgcctgagcaaacctgcagctttttccttcttcccacctctccacccaaatcacttcctacagtattgtgctgtacccagccgagccctggattaaagctcctaatccaaccctgaaaaaaaaaaaaaaaaaaaaaaaaaaaaaa

SEQ ID NO: 1819 - DNA, 900 bp, Homo sapiens
acgcgtccggtcatttgaggataatggataaaaaatataagggcattccatttagaagacacaaaataaaatctcttaatgtttttaaagataaaaattgatatgacttttttgatcaccatatttaggcaatacttacaatggagctgtgctcctttacttttgcctgtccttccccaaaaagggacaagttcaggagatagtacccaaaatttgtttattttaagtgaggaaagtatcattggaatatgtgtttatcctgatgttgaatcatatttaaaatgcactagagagatacctatctgaaacatatcatttaatgaattcccttagaaagcaattatccattattttattttctgttacaatttcaatttccacaaaggcttttaaactatgggtttaattgtattgattaccccctatagctagaagcagaagaaattaattagggctaccctattagctaacttagtatgctccatgttcagttctgtctttgacccattcttttgatctataaatatttttaaactcttcctgaccaacacaaacaatgctattttaaagtgaatggatattagccaaaatgtgcttgactggttggtaatgcttttgtgattttgtatatgtctccggttgcttctggggctgtgtggtcatgggtgttgaggtttactatttccaaacatcataaataccttgtattgccagtagacaattgaatgttgcatgttgcccaaagggattccatgtttaaagaacacacattattaataaagtaccttagaagaaaaaaaaaaaaaaaaaaaaaaaaaaaaaaaaaaaaaaaaaaaaaaaaaaaaaaaaaaaaaaaaaaaaaaaaaaaaaaaaaaaaaaaaaaaaaaaaaaaaaaaaaaa

SEQ ID NO: 1820 - DNA, 1326 bp, Homo sapiens
tcgacccacgcgtccgctcaattttttaagttagatttttcacagagtttgctattagtaaggcagctctctaaatgcaactgtgggttttcccattttgttctcttttacatcattaggtgtgagttccttagcttccccttgtaggaacaagagtaatgaaaggtcaccagagtgtgttttgggattttttttttttctttgtttttggagggcgggagaaggagacaaggcaaaagagaaattgtcgaatgaggaaggaaaggggggaaaaatcttcaagacgaaatttaaaataagccactgagacttaggtctctcagacatagccatatgaactccattctcggtgaattctgttcgggtttatttttcacatatccttttcttcctttaagaaatttttggtcctccaaaggattttgaagcatgtatattataaggtttagcatatttgttcatttgtctctgaagggtgtggtcagttcagagcagtttattttggacatatcctgaagcctttgttttgaactcagaaatgcaattgcaggaattggtaaaccattggtccaccagctttcctagactgctgaagaaggacttgattctctacgtgcagtcctaagtcctttaatgacactcttatgacaaatgtaaagatttactgtacacgtgataaattttattaagagtgcctcaagccaaaatgaaagtaaacttggccatatgtgaagaatgttgaaatgtactattgtgcattcctgtgctactgttgtgtttcaggtgtcacttagcttctgtaactgagatttctcaaaatgtgtcgaccgctttgcttttcttaaaatcttaagattccggatccaccatggttttgtttagtttcttattgtctacaaaacttaaaatgaaaataactgtttttagaatactagtggcagtcattgacttaaccatttacctgttgaagacctcatgcctagtagtggggtgtggtctggtttcccccagctacaggacaaccagtattcctaaatttataccctttattgaaatttgctcctgactgtcagaagtcaggccatctgatttatagaggattccaaaacaagagtttttgaaaaggcttattttatacacctatattatatggagaaacaaatgtttttattaaatgtttcgctgaccaaaataattttaaagaaattaacgttacttatatctttcaggaaaaataattgtagcagctgatctgtaaatgactttagaagctattttagtaatttaaataaatttactttcttggtttgtaaaaaaaaaaaaaaa

SEQ ID NO: 1821 - DNA, 621 bp, Homo sapiens
  SITE (364): n equals a,t,g, or c
  SITE (370): n equals a,t,g, or c
  SITE (426): n equals a,t,g, or c
gcgcccctagccacagatccgaggacaggcaagaccggcccagaagccacaccctcggctgaacccagtaaaagcacaacgctctccaaaaggcagtctccaggcaaaggcggcaggccagaccctaccctcgggacgactggttccagtgaggacaaccccttctcctatgatgaatacactctccggaagcgggggctgctggtcgcactgtgctkttcatcactggcattgtcatcctcacgagtggcaagtgtaggcggttaccccaattatgccggaatcgtaacaggtgagaccattggaaktaagggccggcaactgaattgatgggcaccccaagactgagtccccaccggctcancgtgcncagccacctccctccccttcgcgaagcctgcagaatagtcaataaagcccagcctnagagggaagacccgcatggagacagagctggggctgatggcccaaggcccctcccctccccaccctgcccacccagaggactgcccagctccctgggcactgctccccaagttacccattgttttcagatgaaaagtaaagcactgtggtccttgaaaaaaaaaaaaaaaaaaaaaaaaaaaaaagggcggccgc

SEQ ID NO: 1822 - DNA, 2144 bp, Homo sapiens
gggtcgacccacgcgtccgagcagatcaacagtacttttccatcttgctgccccaatctccccagcaggccacaggcaatgtgaaatatccctctagccaaccgacatttcctgactgccagtgttgcccttttcagcaaatgccaattccaagttccattgaatcagaactccatggctccttgacacatgctgttgagtgctgactgtgtgttctactgaaggagtaaaacactgactatccaaagagaaaaggatattttgttttataatgatcatatattattgtktattgtkttcttcttcccytttctatgcaactgtraaattaatgaacagagtggtatttggaaatggtaatacatttgtcactgatttgtatactgtatacagcattgggaaaatgggtgggggctttctaatatgataccttctttttaataaccatgacaaaaattgcataagaatgagaaaacaatgttacatttttacattccttcatattaaccttgtacaataacttcatttattttttccactcctttaccattaagttttggttatttataatttatcagccacatgaccaaatggatttccttgtgtctgtttccatgatttggccaaattactaaattcatgtatttcaatcaaatatttatgtgtatgatttaggccacatctctgtgtatgccgctgaacttcatttaagcatcatatacttcatttctttagtgaccacttggataaccacagtaaaagccctgtggggcctccctggcatttccattgggatttgtttcctgcattttatgtccctgccctatgtaagtaggtcttgatttcttaatttatttcatgtcccagtctatatgatagaggaaactcaaagcaggattctaataatctcaaagatcatttcaccaaaggttacccatttacataatcattttcattttgacatagaagcaaaacatgggataactttttttttcattgcaaagtcttgaktttcatcattaaacacacagcagacctttccttcattgtgctaccaggacatatctttgtcttcaattccctttgaagagaactttatttttgtttwcatatactcaagtcatttgtaattcttgaaattcccagtcattttctttctgacagcagacacaaatttaatgcatatttcattttacctttcgggtgaatgattacatttttttattacttttcatttgatcaatttatttggaagggatgtttatcaaaaacctatgtcmctgcttccacagaggaatgaaattaatmcttagatggtggtacccctgcctgtacctttgagtacattcacttaggtgttttgttcaacttctgatttaacctttaattgattcagttgaaacatgttatgtaatcaccaaatgtagagaaaccaaaacaaacaaacagtgaaaataatgtgttttgattcagcatacatacatttaaaacatcaggacattttaactttgggttctcttgacctgggatttggccagaaggaggcttaaagktagaaattgctattcttttagaataggttgggtgggttggggggcaagggtgtctatttgcagcctagatattttgagaagaaaattgttttatataagaggaaagccatgaccacctttctacctcagatccatcttcatccattgtgtttgaaatagctttatgctgctgcagtccgcaaaatctagagctttttcagaccacatcaaacccaagaaaatcacctatttaaagaaaaaaaaatttccctgaactctgaactacmagttgtagatttggtgtcttccttgktctttctttgaaaaaatacgtattcatttttttctgcttgtaattgtgtgcaacatgtcttctctctgctattaaagaaaagctacagaaarcactrcattgtaamcttctaagtaataataaaaaagaaatatatcacaataacaacaaggggaaataagtatgtagttcttttgaaatatgtggtaaagaactaatcatagactatcatctaatctggttacatgttgtatttttcatcctgaataaaagtaattttaacacaaaaaaaaaaaaaaaaaaaaaaaaagggcggccgc

SEQ ID NO: 1823 - DNA, 1187 bp, Homo sapiens
  SITE (1076): n equals a,t,g, or c
  SITE (1124): n equals a,t,g, or c
cccacgcgtccggagaaatggcatccggcttggggagactgcttttgcgggggcctcgctgcctcctgtcaccggccactcccactctcgtcccgccagttcggggcatgaagaagggattccgtgccgccttccgcttccagaaggagttagagcgatggcgcctgcttcggtgcccgccgccgcccgtgcgccgttcagagaagcccaactgggattaccatgctgaaatacaagcatttggacatcggttacaagaaaccttttctttagatcttctcaaaactgcatttgttaatacctgctatattaaaagtgaggaggcaaacgcaaaaccttggaatagagaaagaagctgttcttctgaatcttaaagacaatgaagaactcgctgaacaagggacgtctttttcaaaaacttgcctcacacagtttcttgaggatgcatatccagacttgcccactgaaggcattaaaagtcttgttgactttctcaccagtgaggaagtggtatgtcacgtggccagaaacttggctgtggagcagttaacactgagtgcagaatttccagttcccccacctgttttacagaagactttctttgcagtgattggagccctgctacagagcagtggccctgagagaactgctcttttcatcagggacttcctaattcctcagatgactggaaaagaactttttgaaatttggaagataataaatcccatggggctactggtagaagaactgaagaaaaggaatatttcacctcccgaatctagacttaccaggcagtctggaagtaccacagctttgccagtgttttttgttggcttatactgtgataaaaagttgattgcagaaggacctggggaaacagtgctggttgcagaagaagaagcggctcgagtggcacttaggaaactctatgggttcactgagaacagacggccctgggactattccaagcccaaagagaatttaagagtagaaaagacttcactgccagctaacctgtcaaaatagtggcaacctggaattttttgagccagagaatgagataaatgttgaaaatnttcgaagctggatatatttccaaattgtaaataaataggtcttatttntcataaaaaaaaaaaaaaaaaaaaaaaaaaaaaaaaaaacaaaaaaaaaaaaaaaaaaaaaaa

SEQ ID NO: 1824 - DNA, 1233 bp, Homo sapiens
ccacgcgtccgcctggtttccccctggctgacagtgccttggttcctgtcctgttggaatgttaccattgggcctcctgacagcatctgggtgacgccgggagaagcctccctcatcatcaggttctcctctcccttcgacgtccctcccaacctgggctatttccagtactatgtccattactgggaaaaggcgggaatccaaaaggttaaaggtcctttcaagagcaactccatcgtgttggatggcttgagacccttaagagaatactgtttacaagtgaaggcgcatctctttcgcacatcctgcaacacctctaggcccggccgcttaagcaacataacttgctacgaaacaatgatggatgccactacgaagctttcaacaagtcatcctcatcgccgtgggagtctttctgtcgctggcggcgctggcggggggctgttacttcctggtgctgagatacaaaggctggtgaaatactggtttcactctccgccaagcatcccatcacaaatcgaagagtatctgaaggacccgagccagcctatcctagaggccctggacaaggacacgtcaccaacagatgatgcctgggacttggtgtctgttgttgcatttccagcaaaggagcaagaagatgttccccaaagcactttgacccaaaactctggtgcggtctgctagcctgtggggtaagggctctgagccgaggaagctgctgatgtccatgtcagcactttatggaatccggtcctccattttcctgtccccaaaaggccgtcagtgcctgtgaagatgtaacgggtctcatgggggcgacaagcttattgatttttttcttcaaactaagagttttctaatcatacgcgtttttagaataattctacagatatgtccccgaaagattaagatttctcttaaacactaaaaagacatgtaattatttgttagcaaatgggcgtctggcacgcctctgacactttctcgtcagcagccaggacacgaagtcccctccttgatgaacccctcgggcagaccatgtcacctgtcccagcctgccccaagaagggacattaagtggcccttcttcatatccaaacacctggcttgaaatgtgattagccctgtaaatagtttcacagagattaagcctttttttcccccaagttaggaataaaagactataattaactttttaaaaaaaaaaaaaaaaaaaaaaaaaaaaaaaaa

SEQ ID NO: 1825 - DNA, 1197 bp, Homo sapiens
  SITE (1182): n equals a,t,g, or c
tcgacccacgcgtccgctttcatctgagtcaaatagtatgaaagtgattgagttaaaaactgaaaaacctggggcacctgggtggctcagtgggttaaaccactgccttcggctcaggtcatgatcccagggtcttggaatcaagtcccacatggggctctctgctcagcagggagcctgcttcctcctctctctctgcctgcctctctgcctacttgtgatctctctctgtcaaataaataaattctttaaaaataaaaactgaaaaacctgataaatacttagtatgttaagcaaatttatgaatcgatttagcacatttgcatgtaaatttcccttgagttacccttctctattttatgagcccttgaaaaataatccttaagtttttaaatttattgaaggctccaaactcccagcactagctagatattacaaatatgaaacaaactgatttcaaaatgaccaagatttgggggatctgataactcagccgttttcagaaacaactggagagtgaagagatctctctcacttttgcaaacatgcctgactactcacaactggcttttagcactggctttgttgaatgcacaaagcattcactttactgattggacatgaatgcttcaatatttctgtgtattcatatatctgctcagaaaataaaacatatgctttggtatttgttttttgcaactgagattgtggaggatattcaccctcagtttgatttcttcatcttttgggacatgaaagactactctgccagctctttaaaaaacaggtttgaattaattattttcaataatatataagcaaacaaaatccccttggcagcaattcacattgcattagaatttgagtgatactttggcatttctgctttctcttcttttccggataattgcacagttctcttgctctctctaaactggatgtgtaatgtcttctttcttttgaaaagtccttgagtatcattaatgtgataaaccaagttgtatagcagtaacaaaaacttgtgatactatgagtcttttgcaatgttacctcagctaaaagaggtatctgtgtgtgtgtgtgtgtgtttaagttgtttttgtctagtgtttcaaatgttttcagcaaattgtgtaatatgaaaagtttcaataaaatgttgaaataaaaaaaaaaaaaaanaaaaagggcggccgc

SEQ ID NO: 1826 - DNA, 5077 bp, Homo sapiens
  SITE (5055): n equals a,t,g, or c
  SITE (5071): n equals a,t,g, or c
cgagaacaattaccatggtgatgcggttttggcagtacatcaatgggcgtggatagcggtttgactcacggggatttccaagtctccaccccattgacgtcaatgggagtttgttttggcaccaaaatcaacgggactttccaaaatgtcgtaacaactccgccccattgacgcaaatgggcggtaggcgtgtacggtgggaggtctatataagcagagctcgtttagtgaaccgtcagatcgcctggagacgccatccacgctgttttgacctccatagaagacaccgggaccgatccagcytccggaytctagcctaggccscgggacggataacaatttcacacaggaaacagctatgaccactaggcttttgcaaaaagctatttaggtgacactatagaaggtacgcctgcaggtaccggtccggaattcccgggtcgacccacgcgtccgagccgctcgcgctaggagagcgggcttcgggcacttgacatggcggcagtggcggcgactgcagcagcgaaggggaatgggggcggcggtggcagggccggggccggggacgccagcggcacgcggaagaagaagggcccggggcccctggccacggcgtacctggtcatctacaatgtggtgatgacagccgggtggctggttatagcggttggtctggtccgagcatacctggctaagggtagctaccatagcctttattattcaattgaaaagcctttgaaattctttcaaactggagccttattggagattttacattgtgctataggaattgttccatcttctgttgtcctgacttctttccaggtgatgtcaagagtttttctaatatgggcagtaacacatagcgtcaaagaggtacagagtgaagacagtgtcctcctgtttgttattgcatggacgatcacggaaatcatccgttactccttttatacattcagtctattaaaccatctgccttacctcatcaaatgggccaggtacacacttttcattgtgctgtacccaatgggagtgtcaggagaactgctcacaatatatgcagctctgccctttgtcagacaagctggcctatattccatcagtttacccaacaaatacaatttctcttttgactactatgcattcctgattctaataatgatctcctacattccaatttttccccagttatacttccacatgatacaccagagaagaaagatcctttctcatactgaagaacacaagaaatttgaatagttcctgctttctgcacctcccaccaaaacaaacttttcaatgatcaaaaaatgctgcagattttttgagttcccaatacgtttcatagaaaataagtaagaactatttttaaaatattcaaacaaaactaaaacaaaaatccagtgtcacatgggcctgagattttattttagaaaaaggttgttacataaaacaccctggccagttcatttcagcatgctctttcaaccagaagttcttaatatttatgatggcactagaaagggatttggcattttatgtccttctgtgtccttcatgtatctgatcaatgaagacctgtaacactaagtacttgagagttacagtctgaataatgaagtcgtaccagctgaatagcccagcttgcagtatagttatgtttcagtctgcagtgtgtttagcattcccttgtcaaagtgcttgactgcatgctggaaactttgtatttttgaagcggcaaactctgttctctggaatgctctgaagttatggctgggacctatcccctcacatctaatgaatgaattataaaatgtatatgtctatgaagcttcggggtagtgcctgtaatcagaaaacaacttagaacccttttgtttgtttccaattgagtcattactgcctgccactaagaaacgtgcttgaatctaataagtatgtgtgtaccgtaaagaatatatcttatctggagctcagcctcaatcatgtcttaacaaaatgacaggtctcagaaagggggagctcaatagctcaaaagtgacaagtccttttcacagcaccgttctcagaacacctctgagtaacgtgtttgccagtagctattctcactgatgcactgatggccctgaagaagcggatccagtcacataggaaaggaggctgtgttagtgaaagcacatggaaggtgttgctttagaaaggtagtcaggaaaaacattcaggaatagatttatacaccattattgttttatttttaaattttcattcactcttctgtttggatacttttgctaattaacgtcctatgttaatttccaccaagctataagtccatagtcagtaaaacattccccttgggctgtcatgagctaaaagcagtgtcatctccgcatgttggagcagccaagaaatagtttggtactaccgacatygtctaatccatgtcacatcctcatacaatttaattgctcaaccatgcatttaaaactcctcaagaaaggattggtactgcaactgtaggtaaactgaaaaaaaataagaaagaaagagttggatgaaaatgtgaaagcccaagtttagatgtgcattaagtattaaatagcacagtatcttcttcatggagccttttttcctcccccatcccctgcagctgcctttttttgggggcagggtgggggttgatgttgaactttaagagtttaaaagtttagcttattgagtagttgtcatttaaaatataattgcgaatatcagaaaactcatactggaaaactaaattttttttttctcttgagacggagtctcgctctgttgcccaggctggagtgcagtggcgcgatctcggctcactgcaagctccacctcccgggttcacgccatcctcctgcctcagcctcctgagtagctgggactacaggtgcctgccaccacacccagctaattttttttgtatttttagtagagacggggtttcaccgtgttagccaggatggtcttgatctcctgacctcgtgatccacccgcctcagcctcccaaagtgctgggattgcaggcatgagccactgcacccaacccctggaaaactaaatttttaagtgcttatttttatagaagtttgaaaatttaatgcaggcaggtgtgtaataaattatttttgaattgaacattaaaattctgcttcttaaagtcagcactcaacttggacatgttgaaattagaatctattcttgtatttgatagacaaaatatgtgggaaagattttttgcatgacttttctctcattttattcttccataatgtatttctactataaaatagaatcaacttgggttatatttgtcatttactttgttctgttagattttttcagttgtttttggaaaaattctagaaatcaggatgaaaaatgcagcttttccagggttgctggactgggggttttatttgggcctccttattataatttgtcactacttataaaaaacattctgttgcaaacagtggtgttgcattgaattgaactttggcaatgagaacacagcacacagctcccttttcaaaaagggtctcaaccccagtgtgtatttttgtacatcaacatttagaatacttatggcagataagtaaggcatgtcactgtgtccttcagtaacctctctcagtaactggtttctttatccctaacatgaattcatttctcctttgaagtcatttattattttataaattgagaacaaccacaccaccaaatgtcacaccttcttataaagtgtgaacaaggaaggtcatgtttttgtgggtattttgtcagacttagaggtttcatttcagggcatagtcaaaggcatcatcctcccaactacccacttgattatgtatttcagatccctccgtgggggccttcttctgacagagaattctttgaggtccgcagtagtgcttttgtcagcacagactgctaatctacatcttgctgcgttctgtttgctgaggttgggcttattcatttaacacgtaccaaccattatccagaggcaccatggagagttagtcatggaataaagcactgtccttgcagatgaaaaaagtctccagagcagacttctgacaggaaaggtttagatgctggagagttgaagaggtgtaagaagagatcgtgccctcatttttcacttatttttttggttattcatttataataaaaggttggcattgatatggtacaacctgcaaattacttgcagttctgagtttcagataaaacattataaaacattaaattcaatacatactgctcctttgaaatttgggtaaaaaattgtacaaccgtatatatagtcatttttgtattttttctatgttgtgaaaaccaaaattgtaattttataagtctttgattcactaaaattatataatttaaatgtattttttgtatatttagaaataaggagtccagagactacgcttaactttctatgcatgcatttgaaagctgtttttacctgataatgtagtaataagttgtattcataaaatactgatctgtgttgcatttcaaaataaactggtgtgtgctctgcctggatttgaaataccaaaaaaaaaaaaaaagggcggccgctctagaggatccctcgaggggcccaagcttacgcgtgcatgcgacgtcatagctctctccctatagtgagtcgtattataagctaggcactggccgtcgttttacaacgtcgtgactgggagatctgctagcttgggatctttgtgaaggaaccttacttctgtggtgtgacataattggacaaactacctacagagatttaaagctctaaggtaaatataaaatttttaagtgtataatgtgttaaactagctgcatatgcttgctgcttgagagttttgcttactgagtatgatttatgaaaatattatacacaggagctagtgattctaattgtttgtgtattttagattcacagtcccaaggctcatttcaggcccctcagtcctcacagtctgttcatgatcataatcagccataccacatttgtanaggtttttttttttanaaaccc

SEQ ID NO: 1827 - DNA, 1634 bp, Homo sapiens
  SITE (1056): n equals a,t,g, or c
gctcaaaactaatgtttatgccatgtactttccctcagatgtgacttcattaattcagccatgtgaccagggtatctttagatcaatgaacagaaaatataaatccactttcttgaacagcatgctggcagcagtgaacagaggcatgggtgcagaaaattttcaaaaggagtttagtataaagaatgccatatatgttgttgccaatacttggaacacagtgacaaagacacagttgtgcatgtctggcacaacctctggcctgcaactgtgtttagtgataatgatgaactgtgtgtgtgtgactttgaaggattctgtatgtcaagtgaaaaaaaatgatgtctgacctccttacatatgtaaaaaatataccttcagagttcagcagtaagctggaagaagtagatgtcaaagaagttttgaactytgataataatgcttcagttattcattcattgactggtggtaaaatagtcgawwtggttttgaatcagggttatgatagtgatgaagaaggtcaagataacaccacagaaaaggtgcttatagaagaagacatggtgaaaatgtatggtgggcatattgaaggattacggcagcgtgcattaacaacagaatgaaaaaccatgtcagtttttaaaattgaagagagacttctgagctaaaaaccatgttaatgaggcagatgactccacaagaaccatttttaaaagccttccagcagaatgtctcttcatcccccgtaggatccacttcctggtccctcagctgcttctgatgtttcttcttaactaaaaaacacagtttatagtaacctttgaataaaaacacagcatcataggtgaagactgaaagcctgctgttgtttgtagctgctttttcctttttttttttttgagacgtagtttcactcttgttgcccaggctggagtgcaatggcgtgatctcggctcactgcaacctccgcctcctgggttcaagcagttctcctgcctcagcctcccgagtagctgggattacaggcgaccaccaccacgcctggctaatttttgnatatttgatagagacggggtttcaccatgttgaccaggctggtcttgatcttctggccttaggtgatccacttgccttggcctcccaaagtgctgggattgcaggcatgagccactacccccggctctgtggttggttttgtttaatagctgaaacaggtatcctggtgatgctactatgctgcttagttgtcctgacacattattttttcagtgttaatggtatgtcatatttttactgttaagtacttaatgtatgaataaatgtaagaaaacaattgcctattgttagcatgtagattaagagtcaggaatgatgactcttgttgacatgggtggctgagatagtgacacctttgctttctgatggttcagggtacacaaactttattacaggcacaaaattatcaaaaatacggtataaaattaccttaaggctatgtatataagggatgtgtgtatgtgtgtatacacacaaaaataaattttgtgtttccacttggatcccctccctaagataactcattgtgtacatgcaaatattagaaaatgcaaaaaaaaaaaaaaaagggcggccgc

SEQ ID NO: 1828 - DNA, 1648 bp, Homo sapiens
ggcgggagctcaggaccggcgccttctccttgcttctgggggtcgtggccttgctcccgctgtgcggaaaagaatccaggcccttccacgcgcgtgtgggtgcgggggccccgaagtgctcgtggttccccgctaggtctccgctggggcaggaaccggaatcatgggtgggaccaccagcacccgccgggtcaccttcgaggcggacgagaatgagaacatcaccgtggtgaagggcatccggctttcggaaaatgtgattgatcgaatgaaggaatcctctccatctggttcgaagtctcagcggtattctggtgcttatggtgcctcagtttctgatgaagaattgaaaagaagagtagctgaggagctggcattggagcaagccaagaaagaatccgaagatcagaaacgactaaagcaagccaaagagctggaccgagagagggctgctgccaatgagcagttaaccagagccatccttcgggagaggatatgtagcgaggaggaacgcgctaaggcaaagcacctggctaggcagctggaagagaaagaccgagtgctaaagaagcaggatgcattctacaaagaacagctggctagactggaggagaggagctcagagttctacagagtcaccactgaacaatatcagaaagctgctgaagaggtggaagcaaagttcaagcgatatgagtctcatccagtctgtgctgatctgcaggccaaaattcttcagtgttaccgtgagaacacccaccagaccctcaaatgctccgctctggccacccagtatatgcactgtgtcaatcatgccaaacagagcatgcttgagaagggaggataaaaactttcagaatgagcaaaacaccatcaacgttaattccagagatggaacattttttttcctagtgagaaaacaacccatttgaagagaagaccactaatgagaagaccactaaagagagacatcaagaatggattcagcagaatcatttcacgttttgaacagcagcagtttgaagggccaaagccttgatcagggatcagtcattaaaggacactcttgagtattagtaaaccctcttatgatgattaaaagagaagggcagccctctccaccttttggtactttctattcaacttgcactgaccataaaatgtttctcttctgaacaagccccatcatttggtgaacctccaccctaacaaagtaggatggggttgggggctaaattaattggagtggggcgaggagagagccagaaaacatagatccgagggcagcagtgctgggtggagagagccagaaaacagatctggaggcagcagtgctggatggaattgtctaggctgtggcatgttggttttgtctttcttttctcctttgattatgtaagagctatttcattataacttattatggtgattatacaggcaagaagacaaaaaggagagaaaatgtacctcttctactggaataatgtttatgattacaagtgagataaggtatttttatcaatatgaaggcaaccttggctgataaaacctctatagtgaatactcacatctttacttcactcactatcaataataaatatattttctgacaaagaaaaaaaaaaaaaaaaaaaaaaagggcggccgc

SEQ ID NO: 1829 - DNA, 1726 bp, Homo sapiens
ccacgcgtccggaccatttaaatgaggctccattcaacacaatgcacatttaaatgaggctcagttgcaagagaccactgggcttagcgttttcaatttgtcaactataattctataattgcttttagctaatcatccaaatgattacatgttgtaatggaggcagaagaccctcgtatgcatcatttggtctctttttctcagaggaagtgctgaaggatcaaatgttttgtgtgtctctgtgtgtgtgtgtgtgtgtgtgtgtccgtgttttaacttggtgttctgacgcacaacaccataatagacctccattttcatcaacggtgggggaatgagaacaacgccccccatcccaacatcccccttttccagagggggaaactgagacccaagtttccctcttgccaaggccacaggactagaactagaatcgtcagttttctgatttccagatcaggactatttctgcttatgccattttaatttttcatttctttccataaaattaaatgaccttcttcaagaaagatttaatggtcaagatgcgatttggtaaaaagcttcctcaaggatttttttcttattacaaagatgagaccggctgaggctgagagatttgcaagcagtggtatgtcattatccccagctcagttttttgtgtaattggtgtgaagagattgctgctgatgaatcagcctgctgctcaacagaaaataatgattcttttgtgacgtgagtcagtgtacgtacgtgtacgtttgtggttgtttatgaaaggtatgtgtgtacataaaatgcttatcaagatggataatgtcattttaaagtggtaaataataaaaaatagtcctgagcaaaactgattttacaattgcctgagaatgcagcacttcattttaacactatgcaatggctagaaattgatttttttttttttaatccaattaagcctcaaggttggttatccatttaaaaggtcggatgagttaaacaatgacagtaccttcagttcgtgctaataaatttgcacagaacttcagcacttacatcgtgtgcctcacagaggcatacattttgtatgtgcacaacactgaactaccaaagtcccagcagtggtacagatacaccagcagaccctggaccccaactgggggagtccctgagctgaccgccggccctatcacctcttccacttagatccccgaagcacccccaccccagagtgctgagtccttccatctacctggcccccttttctgtggccccaagagcactgggagatgaaaagttgcctctcatttaaaaggggggaaaaagatgtattcactacttggttttgtgtgctgctgagtttataatgtaacaaataaatcctgttttaaaaatagtactttatagtgtgtatttactgtgtattcatagtgcattaagaaaaagacttcggccgggcacggtggctcatgcctgtaatcccagcactttgggaggcagaggcaggcggatcgcgaggtcgggagatcgagaccatcctggctaacgtggtgaaaccctgtctctactaaaaatacaaaaaattagccaggcgtggtggcgggcgcctgtagtcccagctactagggaggctgaggcgggagaatggcgtgggccagggaggtggagattgcaacactgcactccagcctgggcgacagagccagactccgtctccaaaaaaaaaaaaaaa

SEQ ID NO: 1830 - DNA, 1175 bp, Homo sapiens
  SITE (740): n equals a,t,g, or c
tcgacccacgcgtccgcccacgcgtccggcctccacagtttcctgcggctgtctgcacacccagaccagagcagttcctgcctttgcgctttgcaccattttccttggtgaacttctattcatccttcaaagcccagcagtaatcatcctttagaaagtcttctttcagagggaaccaaaaaggtaatcgctggagacagacagatgctgcctgaatgcctgttgtgttgtgtggttgtgggaatgttacttcacctctccgtgcctcagtttcctcagctgtaatggggatggtaacagtgtctaggggtactgcttggaatgcacatagggagatgagtgaaggcccagcactagaagagtgcaggcactagcagagtgcaggcgcaattgctgctgggaccagcaggtaactcgcatccaagttacagtgcccagccccagcagcagcctcagcaccaggcagagtgtgctcagcamtgtggggggccaagaggacttgagggccgctggtctgtgattctctcatctcttttgaggttmarsamttggcgtctctcctagaagctctggggaamctgacaaatcctccagggaggacacagaacgccaggaagggctggctcggggtgcaccaagatggctgccccgagamaccgtatctgagggcttgggtggaactgaggagaggccggctgggaagsccatccgggaggaaarggcagacggctamggcagcntcaggtggtacagtttgccccggaagtgaggtagagaagagagcgggaggagagagggccacatgcctctcagccatggccctgaatgctggcttggctgagcctcatctttgctgtttgcagaatggggagaattgtgcctgcccagcctcctccttggggactccaggggcccaaagaaccaagagctgcaaatgtcctggtggccttggaagtttatggatggtacagatctggggtggagggcatggccaggacagggagggctgtcagagagagggtctgtgggtttgtggagtgtggggatcagtcgctgactcattagatgaaccaggagcctgcatgctacagcccacctgccaaatcttgcccccacctgctttttaaaataaagttttattggaacatgaaaaaaaaaaaaaaaagggcggccgc

SEQ ID NO: 1831 - DNA, 1014 bp, Homo sapiens
ccacgcgtccgggctgccccccaagtgtcgtttgttttactgtagggtctcccgcccggcgcccccagtgttttctgagggcggaaatggccaattcgggcctgcagttgctgggcttctccatggccctgctgggctgggtgggtctggtggcctgcaccgccatcccgcagtggcagatgagctcctatgcgggtgacaacatcatcacggcccaggccatgtacaaggggctgtggatggactgcgtcacgcagagcacggggatgatgagctgcaaaatgtacgactcggtgctcgccctgtccgcggccttgcaggccactcgagccctaatggtggtctccctggtgctgggcttcctggccatgtttgtggccacgatgggcatgaagtgcacgcgctgtgggggagacgacaaagtgaagaaggcccgtatagccatgggtggaggcataattttcatcgtggcaggtcttgccgccttggtagcttgctcctggtatggccatcagattgtcacagacttttataaccctttgatccctaccaacattaagtatgagtttggccctgccatctttattggctgggcagggtctgccctagtcatcctgggaggtgcactgctctcctgttcctgtcctgggaatgagagcaaggctgggtaccgtgcaccccgctcttaccctaagtccaactcttccaaggagtatgtgtgacctgggatctccttgccccagcctgacaggctatgggagtgtctagatgcctgaaagggcctggggctgagctcagcctgtgggcagggtgccggacaaaggcctcctggtcactctgtccctgcactccatgtatagtcctcttgggttgggggtgggggggtgccgttgatgggagagacaaaaagagggagagtgtgctttttgtacagtaataaaaaataagtattgggaagcaaaaaaaaaaaaaaaaaaaaaaaaaaaaaaaaaaaaaaaaaaaaaaaaaaaaaaa

SEQ ID NO: 1832 - DNA, 1827 bp, Homo sapiens
ggcacgagcargaggaagatggcggcgtccgcagctgccgctgagctccaggcttctgggggtccgcggcacccagtgtgtctgttggtgttgggaatggcgggatccgggaaaaccacttttgtacagaggctcacaggacacctgcatgcccaaggcactccaccgtatgtgatcaacctggatccagcagtacatgaagttccctttcctgccaatattgatattcgtgatactgtaaagtataaagaagtaatgaaacaatatggacttggacccaatggcggcatagtgacctcactcaatctctttgctaccagatttgatcaggtgatgaaatttattgagaaggcccagaacatgtccaaatatgtgttgattgacacacctggacagattgaggtattcacctggtcagcttctgggacaattatcactgaagcccttgcatcctcatttccaacagttgtcatctatgtaatggacacatcgagaagtaccaacccagtgaccttcatgtccaacatgctctatgcctgcagcatcttatacaaaaccaagctgcctttcattgtggtcatgaataaaactgacatcattgaccacagctttgcagtggaatggatgcaggattttgaggctttccaagatgccttgaatcaagagactacatacgtcagtaacctgactcgttcaatgagcctggtgttagatgagttttacagctcactcagggtggtgggtgtctctgctgttctgggtactggattagatgaactctttgtgcaagttaccagtgctgccgaagaatatgaaagggagtatcgtcctgaatatgaacgtctgaaaaaatcactggccaacgcagagagccaacagcagagagaacaactggaacgccttcgaaaagatatgggttctgtagccttggatgcagggactgccaaagacagcttatctcctgtgctgcacccttctgatttgatcctgactcgaggaaccttggatgaagaggatgaggaagcagacagcgatactgatgacattgaccacagagttacagaggaaagccatgaagagccagcattccagaattttatgcaagaatcgatggcacaatactggaagagaaacaataaataggagactttagcacacttcacttgtttctagaagtccagaattttggacctccacgtgaaagaactgttcttacctctgaactgggggctcccataagggataattttcctcagagtagcaaagtttctcttattagagaaatcttgtgactcagatgaagtcagggatagaagacccttggacctggcaggttaatgctgattattccttggcctttcccttgtatttatgcaaggaaggatatactgagctgatactsttccaagcctacaacttcaagttttatcatttgaactcaagtacttttgctgctgaggaatggaatcaaaagaacgtagtctcctggtraccacctcagatctctattattaggctagatgtatagcctctactcccccagcttcttgctcttgaccctgcactgtaagttgcccttctattagcagccaaggaaaagggaaacatgagcttatccagaacggtggcagagtctccttggcaatcaaccaacgttgctatgaaatatgcctcacactgtatagctcattataggacgtcaggtttgttgaaaaaagtgggcaagacatgattaatgaatcagaatcctgtttcattggtgacttggataaagactttttaattttaaaaaaaaaaaaaaaaaaaaaaaaaaaaaaaaaaaaaatt

SEQ ID NO: 1833 - DNA, 734 bp, Homo sapiens
gatttcatttaggtttttgttaggatttccattaataattgtgataaaattttaacttgggttacagtttaaatatctggaaaattctttcacagaaagttacctcattcttcagtgatactggctaagtgaattataaccagttgcttgatggtatatgacatttttgcagcttatttgaatgtttttaagtttttaattatattgctttctattgtaggccttgaaccaaagacaatgattgatttaactgaatttagaaatagcaaacacttaaaacagcagcagtacagagctgaaaaccagattcttttgaaagaggcaagtgtggtagtcagttgattattttcttggctgaactatagagaaatactaataatttatactttgcagattgaaagtctagaggaagaacgacttgatctgaaaaaaaaaaattcgtcaaatggctcaagaaagaggaaaaagaagtgcaacttcaggtatactcagttattctaaacctttaaaaagaattattgataagtgagttgtctggatatgaaattatttgtgtcttagctgtttttgctgttctattgtggatctgctacaaatttaataaatgacaataataacctgaaggagataagtgagtgtcagtgggttcagtcctgaatctgaaatagacaaaaacaaaacaaaacaaaataacaaaaaccaagcaaacaaaaaaaaaaaaaaagggcggccgc

SEQ ID NO: 1834 - DNA, 1392 bp, Homo sapiens
acgcgtccgctctccagcgtggctggcagcggggacggtgcgccggggcgcaggcccaagagtcgcgtgcgcggccccttgcaccatccccccgggcccacccccgggccgcgctgattgggcaggtagggactctgcccagcggaaagttttgggtgccgggaggaagtctaacctttgggagactccaagacagcagctccgaggtcggcgggggtctgggtggccatggaggagccccctgtgcgagaagaggaagaggaggagggagaggaggacgaggagagggacgaggttgggcccgagggggcgctgggcaagagccccttccagctgaccgccgaggacgtgtatgacatctcctacctgttggccgcgagcttatggccctgggcagcgacccccgggtgacgcagctgcagttcaaagtcgtccgcgtcctggagatgctggaggcgctggtgaatgagggcagcctggcgctggaggagctgaagatggagagggaccacctcaggaaggaggtggaggggctgcggagacagagccctccggccagcggggaggtgaacctgggcccaaacaaaatggtggttgacctgacagatcccaaccgaccccgcttcactctgcaggagctaagggatgtgctgcaggaacgcaacaaactcaagtcgcagctcctggtggtgcaggaagagctgcagtgctacaagagtggcctgattccaccaagagaaggcccaggaggaagaagagaaaaagatgctgtggttactagtgccaaaaatgctggcaggaacaaggaggagaagacaatcataaaaaagctgttcttttttcgatcggggaaacagacctagatccaaggccacaagtaaggctatggctctgattctagaagacaaccttccaagatgcctggcaaaaccacctccctgtgccacacagacacactaggcctgtgtatttatttccccttcaaagcagactgaggagggaggagacgaggttctcttggcatcactttctccctggctgcagaactagacacccttgaagatttggcctgggccagtgagactgaaatcaagaaaaacagaagggatgtgcagggtgggggggtccacttcctgctcccatgtcaacccccagggcctccagtgtgcagacgcgtgtcctactcatctgctcccacggatgaccctggtcttcaatggttagcagaagggagaaaagaaagcaggaaaatgtgctattgagattccagtggtgacttcactgatatttagtgaatatttgatttagccaacatgcctttctttatgtgattttgtattaaagtaaaatgatttttatactttctaaaaaaaaaaaaaaaaaaaaaaaaaa

SEQ ID NO: 1835 - DNA, 959 bp, Homo sapiens
ccacgcgtccgcggacgcgtgggcggacgcgtgggcggacgcgtgggtgccgcggaaagtggaggtgagggccgcccgccctagaggtgcccgtccgaaaggcagagctgacaaggaaggtttcgaagcgttttgctggcaaagggatttcttacaacctccaggcatgcgtctttctgccctgctggccttggcatccaaggtcactctgcccccccattaccgctatgggatgagccccccaggctctgttgcagacaagaggaagaaccccccatggatcaggcggcgcccagtggttgtggaacccatctctgatgaagactggtatctgttctgtggggacacggtggagatcctagaaggcaaggatgccgggaagcagggcaaagtggttcaagttatccggcagcgaaactgggtggtcgtgggagggctgaacacacattaccgctacattggcaagaccatggattaccggggaaccatgatccctagtgaagcccccttgctccaccgccaggtcaaacttgtggatcctatggacaggaaacccactgagatcgagtggagatttactgaagcaggagagcgggtacgagtctccacacgatcagggagaattatccctaaacccgaatttcccagagctgatggcatcgtccctgaaacgtggattgatggccccaaagacacatcagtggaagatgctttagaaagaacctatgtgccctgtctaaagacactgcaggaggaggtgatggaggccatggggatcaaggagacccggaaatacaagaaggtctattggtattgagcctggggcagagcagctcctccccaacttctgtcccagccttgaaggctgaggcacttctttttcagatgccaataaagagcactttatgagtcaaaaaaaaaaaaaaaaaaaaaaaaaaaaaaaaaaaaaaaaaaaaaaa

SEQ ID NO: 1836 - DNA, 2263 bp, Homo sapiens
ctcaggtcttctaatttgaataatgttcttgggtttcggatgaatatctttgatctaccaaaggagtattcttccacgggaatttctaattcattaaataggacctccacaccagacctggctggtcctttccaatgaggccatgtttgtttacaaagcattttgtatctttctaggcaaggttcataggcctgcctgaaggcgtagcctgccctccgcactcggacgttctccaaaagccccaggtacctgatctgatgacacactagagcctcgttgaagatgtgtgctgcttttttatcattcggtttgatacacctaatatagtttgggttcttggtctgtaggtttttcatcagagtggccacggatgccttgaactgtgagcctgctgtaggaggccttttcaggttgatcttggcgggattcccttcggggaacaaagacttgatgagggcatggctggccttccacatggcttgggacaggtctcgatagagaaggtcattgtttttgtcaacgaatccttccacctggtacagcacctttccagcataatgctggatcctgaagcagctgtgaggcagagacgtgtcattgaggaaccgagagcacttgctcatcctgctttcaaaatgctggtgggtggcacatacttggttcagcttttctaagaaggtctcatcagtgactgtgccaggtctgaggcactcttcatccagcatggccaggattccatttgtgttattttctattaggtcacaaatgatagcattattgaagtagtcaatgtgagtccattctatatcctcccgtatatactcctcctgctcttctttaagagtaagttcaatgaagatttgttgcagcttttcgttacaataattaataatgaactgctcaaagctgttgtcctcgaaaatctcaaagccataaatgtccagaacacccatgaccttctttctcacttttgtttgtgccttaatgctttcattgattcgatttaccaaccatgaaaacaacctgctgtagaggtttttagccagagcatcacgggcataataagcctgagccacattcagtgtagttgaaactttctctgttggctcaactgttcggaaactgaatgctcgtctagaactgattgatcaatgccggcaattcacaaatttcttttaactcattttatctttgattttgctttcatctagaccattcactcgagattcgggcttgaactcaatgttccccagtttcaacactgctgccaccaccgccaagacagactcagcttcatgatccataaagcccacaatctgcatggcattccgcacggttctaaaatttgctgcatcatccactccattcactttggccgaatccagactcaggtagttatacctgctgaaatccctctcaagcttaagtttattgaggagctcttcagaggcaccagagagcagctgatagaacacatggaagtttctttcacctcttggctgtttaacaacccgagatttctctaaaagatagttacttattactcctcctagtggatcgcctttaaagtcaaattcaatatccatatatttgccaaatctagaggagttgtcattccttacagttttggcatttccaaaagcttccaggaccgggttggactgtaaaagctgttctttaacttgattaacttctgctccttttccacaaacagctgccacataggacatgacaagcttactggcctctgtttttcctgctccactttccccagtaatgagaatacattggtccttatcttgatctcgtagggatctgtatgcttcatccgaaagggcaaagatgtgagggctcagttcataaaaatttctgttcctgtattcttccactttctctggtgaataaatgggtaaagaccgatatgggttaacagatataaccacacttccaatgtaagtgtatatttcactgtggtcaaagcgcttcttgaggttgttgatgaaggtctcctcattgagaggttctaaaagaaccatatccccaactccaatcatattgtccagaagtgaggttttcacctccattttggccatggtctccaggtatatttcactgtggtcaaagcgcttcttgaggttgttgatgaaggtctcctcattgagaggttctaaaagaaccatatccccaactccaatcatattgtccagaagtgaggttttcacctccattttggccatggtctccagctcgcctggcggtcgac

SEQ ID NO: 1837 - DNA, 5083 bp, Homo sapiens
  SITE (5079): n equals a,t,g, or c
  SITE (5080): n equals a,t,g, or c
ctcgagtttttttttttttttttttatggaattactgattttaatttttgctttattaaatgttctcatttttctatcatgagaatagattactatatccaacaaaagggagggacagaaagaaaagaattaacaaataatctcattgcaatcgctactgcatacctagaagctaactggtaatacacacttgcctaagaactaacaaatcaattcaacagacacttcaaaagaacccatgttacaaggcatcctatgcatgggacgaatgcaaagtcccacctacaatgtcacttatccccagattccccatctaatgaaaattttctatcttcccacagcacatgccttgcttctaacagacaattattgratgraaaaawtwaaagcaagtaccttagtamcatgaatcacaaaagcaatgtattctgaacctgaaaytgacaattacaaaacaaatgctatcctgggaaaagcatttcctagacaatacctggaggccaactggcattgctggatttacttccgattttatttgttggtggagatttggcaggtaaccagctatcaccagcaggacccgtatggccacccagtgtgtcaccagggatgatatcaaactggttgtacggtgaccctccccgggttttaccaggggccactatagcgccatttttgtgcatattggcttcctgtgtggctacagagggcagcccctccatcatggaggtccactgtttaaagcgagactcggttccagcctccttcccaccaaccatgccatagtccatgccgccagagctgaagccagaaccatatccaggtattggccctttggtttgaaggtctgggagccccacattcaatgcgttgggtaccatgttgtccagatgcggcttgggcccaacaggatgagagggcgagtgcttcatgcctggctgcctctgctgctgctgctgctgctgctgcagtgcactcaccattcgagccagctgctgctcttgctgttggcgtacagcttgagaaatctttctctggttctgtaacaactgctgctgttgctgctgctgcaagagaagctgacatgccaactgaaactggggaatttgtggaagctggctcagcatggcaatttgttgaggagataactggggccccacattgaaaagacctggactcaggccactgttgggaaactgcttgagcattgaggcagaaacctggggggaaataaactggggaggcacttgcgcccggagactgggagaagaatttagtggctgcacgggtgtgtgcagacctctcgattgtgctgtgctgtttccaaacaaaccatgactaccgcccttctyaaaataaggcccactatctgtggttcccatgtctttggaattaggtggacggaacccagatcgatccttcctcatgatatcattaaaatccccgagattcatcgctcgcttgtccacatcaaattttttatctgaaaggcttcctacagacaaatccattttgctgcttggattatcttcagtctgactcagcaatcccatatttgaaaactgtttggcaagaggattcatccatgaatcattgtttcctcctttgagtgagcacttcatttgtttctttcctccttgtccccagcttgctgagttgtgggaggaagcactgccctgagagccagtggtgttccagactcctccatcctcctcctcttcccagctgggatggcgagctcctgtgactggcccgtcactctccccccagccgtcttgcatagatttggaattaggcttcatggcattgggagcgttggcgggcgtgttcccccagcctgtggtcgatgctcctgtatcatccatctcgccccacccaggactgctttcatttggctcaccccaagcggaagtaccattatctggagcaggtggtgtgcttttgctccagactgatgccgatttactggtcattggggtgggcaggtttggttctcgaggtgctgggcccccttgggaattcttatcccacagattcacattcttgtagttataactgttagggtctccccatgctgaagtgccatcatcaatgtccattttccgactaattgactgtggggatggctcttcccaaccactgggttcctcatccttargtgttgcaggctgtggcccgctgctycagctggaattggaaggtcgaacgttgcctggaggtggtggkggtgggcctccccacgaaccagaagcctctggttgtggtggcggcggctgctgtgggggctgctgctgttggtgttgtttatyccaggaawtgggctgtcggcccgtctcattccatgctggggatcttttgcaatcctcccacccaccttttgaagctaggcttgcattgccaccattaccccaagtcccgatttcattctgccctccttcaccccacccagacacaggtttacttgcagaactttcccaattgctgttttttgtctgatcgacttcctccccccaaccattctttccagaagccatccttgattgggctggcgtccacctccccacccctgatccttgctgggattctcattccaagaggaaggtgtcttttcatcaggtcgtcctcctccccagttggaagagttgttgttcttgtagtcattccagcctcctgtgttcttggggtctttccactctgtagaggctgagagctccccccatccagacttcatttgattgctttggctgggtgcatctccccagccccctgagttcttggtctgtgtggcagcgctctcccacccctcagttcctttgtcagatttcccctcaggccttggcacctcttcaatgtcccacactgtgtcctgcttaatttgagtttggccccagccagtgtttgagagcaccctggggtccaaatcagttcggctcaaaagagtctgcaagacagcctgacaatcaggatgtgtgggcctgtacgaccgacggccagagttatgactgtcactacttcctgctwtgtggttgcttccagtgctttgacctccaacttcacttcctgtgragctggaagatcttccccaacagggagcctgggcattgccttggttttcagggagggggtggcccttttgattgtcccatgctccagtgctagaatttggttggtttggaccactccattctccaattttcaactcatcagacccagtcggctgtttccattctccctgagagaccccagatgtcattttgttcccttcaccccatttgttgtcattagagtcctgggggccaaagttccaggacccacccgtagacctgttattgttgtcccaagagtcattttttgacccagttgatttctgaacagaagctcctttccaggagtcctctctctcttttccattgttcccattgtttccagaattgctttgtccagagactgwgycagttccagaaggccccctagctgcaccccaagatccaacactcccagtctttcgatctccagtgctttgtgaaggggcatcagtgctcctggaggtgttccccaagcccattccaaagggcattcccttattctccatggggtttggtgaacttaagttcaaggagttagtgtttccattttttggtccatcagtgttatgaatttgagcctgttctctgccagagacaacaaaattaacacccgcattttccatctttgactgctgttccctggatgtctgacctactgtgctaacctgtgcactggaattactattatctgtttccaatgcccctttcctagaagttccttcttggaccagtgctggccaggcagatgggttgctatttgggttaaagttgctgaagccagagccaggtccaattctatcctgaccactcacattcctccaatttcctagtccattgttgttctctgtagtagagttggaagattgaacagatttagccttagggtcagatttccagaccccaagattacattcgttcccagaacttgcagactggcactggctcccttttcctttgttactagtggtgcttcctggcagagtgctcttctcagagccagggttcgaggcactgttgttatcggtggtgttttsggaagaarattcartgtytttgytggcaawacaargccaytyttcmatktcagacccgtytacaatcaccttktcccagatgtgaattgggttgggggaggtgccgttgttggaggaggytcccgagccccaagtggaatttgcataatttgaagcagcagcacctccaagggttgagtctggcgcagtcccactctcaytctgcagcagcgctcctgtcacttgtgcgttgtttgggtttgctccaggtgctgtgcagggaggaggccctgccccacccccaaggagcatgcaggacggtggagggggctgcccacgttttagtaacactttgtggtcctgctggcaacggaattgcggcggcacctcccgaggcatgtagcgggcggcgcttggcggttgtccgttcggcactgccacccttttggcattgttgccaccattgactggtggcgatggagagctgccaattgggctggcggccgttggttggcttaaacttggtttcgtcacttcgggcactttggttttttgttccgtgaccttctgagtggcttcttttttctttttatcctctttcttccttttcttgtcttccattaactgttcttccctttcttgctccttctctctcataaagtgcagcagtgcttaaatccagcaaattgaggcatacaaggtagaaatggaaatgaaaaaaggtccaaaaaatgaattctttttgtctatctgtttttttgtattttaaatattcagaaaccagcagagactctgtcggccattttggcttgaactaactctctctcacacactctccctcttgctctctcgtcgacgcggccgcgaattcccgggtcgacgagctcactagtcggcggccgctctagaggatccctcgaggggcccaagcttacgcgtgcatgcgacgtcatagctctctaccctatagtgggtcgtannaaa

SEQ ID NO: 1838 - DNA, 1790 bp, Homo sapiens
  SITE (639): n equals a,t,g, or c
  SITE (827): n equals a,t,g, or c
  SITE (852): n equals a,t,g, or c
  SITE (858): n equals a,t,g, or c
  SITE (886): n equals a,t,g, or c
ttggcggtaacaatgctctttatttgtggcgtttaaaggcggggttgggcgggacagcgcccttgcgtgtattaggcacaggttcggaacgcagcatctttccaggggcttccctactagctcagccccataaagtcactggtttcctccatctggaccagcagccgcaccagccaaggcgcccactgggtgtcggaggtgggcgatgtcaatccccgtggccttcgtcgggagggtggagctggccaaaaagagagcggtacagttctgtcctggcatcatcattcattgtagtatggtcaataggtgccatgaaactcagtagcttgctaaggacatgaaaccgaagtttcctgcctttgctggctttcctatctacttttttgtggattttgcttcgtaacttctggattgcaagccactgccttcccatggccacctgatcgttgggatccaaggagctggtcttccgttctatgagttctcgaaggagctggtggtaaaagtcatcatcatcaaagatttcttcatccaagtccttcagatgagcattagcaggggcttgaggaaggatctccggttcccctggcaaactctctgggacaggctgagctgctggctcaggtttgccaagaactngatagacggagcgcttggtctgtgtccttcgaagtaatctctctttgtccatcagaatatggtcgatctgagtcaagattgagcgttcaaaggcaccaaaacccttcccagttttcagaagccagttggtcttatcgtgccatttcttaagtgtccggttcctgtagactgaaaagtcggcaaagcgntttgccaatgaagttggaatagtcntccatntccagcttcctctttgcagggacctttnttggttgctgcttcttctcttctaccagctcatcatcttcactagaaatctcctcacttcccgcattgggctttgtcccatctactagatatctagtgtctgggtactggaaaagcaactcttcctgaagacctaccaatgacctcaacaatgctttaagtgccttgtgactatttttcagggcactggaaaattctgggccacctttgtccttgaacaatgggaaaacatctggttgaggaagctggttggtggtcaacagagctttttgtagtttgatccttccttccaagagctggtcccacagtgctatctggttcttcacggctcttcctttctccacttcctcagaaactttgacactagagaaggtcatcaccacaccatcatcctcactgtttctatctccagccctgtcttcctcactctcgccttgggagtcttccgcgtcatccccttcttccatgccactctcttcgtcttcctgtatggtgccagttgcttcttcatcaaagcaagcaaaggcatttctgatgacatcttcaggatctgtgccatttaacttctcaccaaacatggtgaggaacatggtgaaattgatggggcctggagcctcattcatcatggcatctagatactcatcagttggattcttccccaatgaagcaagcatatcatgcaaatcttccttgtcgatgaaaccatctctgttctgatcaatcatgttgaaggcctctttgaactcctgaatctgtgactggtcaaacatagcaaacacattggatgttgcacgctgagggcgcttcttggtcttggtctttgttcttttgctcgacatggtggtggttaagtcccggcacagctacgagaatccgagcacctctccgagcccctcggtcgacgc

SEQ ID NO: 1839 - DNA, 829 bp, Homo sapiens
  SITE (16): n equals a,t,g, or c
  SITE (17): n equals a,t,g, or c
  SITE (25): n equals a,t,g, or c
ttatgaccaattaggnntttttgcnaaaaaagcttattttaggttaacacttatagaaaggttacgccttgcaaggtaacsggtccggwaattcgcggccgcgtcgactgtgtatgtgtgcatgcatgtgtatgtgtgcatgtgcgtgtatgtgtgcatgtgtgtgcatgcatgtgtgtgcatgtgcacatgtgtgtgtgaggaggggctgctttcctatggcacagtcactatgggggagcccaaagctgcagggtcagccctggggagccccctcattggaatcagaggaccacagctgtctgtaggtgaggctttctggggcctggatctgctctgcgcccctccggcattctgtgtgacagtggctctgccacagccctcctcagtagaagctctggcttcctggtggacctggaggccccgggagaccagggggaccctggatccctggttcacccttaggccccatggccccccgctggcctggtgaccctgtcttccctgcaattcccggttttccctgaggccctgagggccctggagaccccgggggcccttctggccctgggggccctatgtccccttttgggcctggctgtcctctcggccctccagttccaaagctgccctttgagcctttgaggcctgggaaccctcgagggccaacagggcccctttctcccacaggcccggcctctccaggttgcccctgaggaccctggggtcccagggggcccaagctgccggggtcgtcgacgcggccgcgaattcccgggtcgacgagctcactagtcggcggccgctctagaggatccctcgaggggcc

SEQ ID NO: 1840 - DNA, 2574 bp, Homo sapiens
atttatactatgaacattggggtaatacattttattttttcattgctatatgacagctaaggggcaaatgattcaagtatattttaaatcagaagtattcaaattatttttgtataatactgttcagtacttccaagaataagctctgacaacagccattgtttctgcttccactcatattctctacacattttaatacagaaatttttgagagggggttactttattgcttgtgggttagtatgtctcttacttcaattaaggttacttatttggtttgccttaagcattacttttttaactttgtgccatttggtctttactttttatggatgttttcaaagaaactattttatattcaatctagtttatttagtctactgtatttctatttcgtggaagccttttcccctcaaataatatattatatcatttttggacttatataaatgataattaaataaatttttttcttaatactgttggactttgtatatacaagttcaaataactttttcgaagatagtttcttatataaatgtaatttaatttttttactcttctatacagttctttagatgtaaaagaattagcacaatctctggcagttttataaaagctgttgaagctcttgtcctgcactgtctttaggtatcataggtatcaggtttgctttgtgttaatgccacttcaagtcattatttggtttctgctatttttttacctgaggataagaagaatgaatattaaatttgaatattaaatatatgttactttccaagcactgtataatgactgttcagtgaatatcagacttccgtgtcattaaaagtcatgagagacagcacagagaggttataggttgccttggtgtacttttgtccaggagtaacagggacagaatactttctttccttccttcaagtacaagaaggctttctctaccatttgcgtctacactttattttaaaagctatccttttctagtagtattttatcatggcaatggcatgatgacaacaacagtctttcattacagactgaagggaagcatgtccttacttaaaatagttctgctactttccctcctattataaggaaatyttacagattctaaaaataccttaatttttctttgatttttattttaccaagtcacaaatgtctttttgatgttttgagaattgttctcatagaatcacaaatactgacatttcattagatgattattttcctagaatccccaaagagcagtggcagtccatggcttggttgaagctagaaattttcctgcccctggtgacctggtaagcctcctgctcggaaccgtgtgagtgggtgaggaagatgagagatggtcagatggaagagagraatacatgaactgctctggcctctctggttctgttcttggcccagagtttttgaaaagcagcggagcatgactgacttcacatgctcagctttctcagccttttgtttattttgttgtccttagatttccctgttgtaaaaggggcaagaaaagtaactcatcatctctaacacaccatggcagcttagccaggtagtcttagtggtggtgtttaggcataagatatgctgatcatcagtctcaggccacagtttccttcactaatcgtccagcttgagtgttctgttctcttcctgcccatttccttgaacctcctgctctagccttggcggagggagagtgctrtttgcttttgttctccctctgtcttaggaaaagccatctttaatatagttcttcaccacygttggggttgttttgtgattttttttttcttccgaagaactcctggttgttattggattttgtattttaatacaaattattgaattttataagcttgtacacaatatttaattagtgtgaaaggaaacaaagaatgcaggaaaaataatttaatatcaacctcagttgacaaggtgctcagattattcaattcgggatcctccttttgttaggtttttgagacaaccctagacctaaactgtgtcacagacttctgaatgtttaggcagtgctagtaatttcctcgtaatgattctgttattactttcctattctttattcctctttcttctgaagattaatgaagttgaaaattgaggtggataaatacaaaaaggtagtgtgatagtataagtatctaagtgcagatgaaagtgtgttatatayatccattcaaaattatgcaagttagtaattactcagggttaactaaattactttaatatgctgttgaayctactctgttccttggctagaaaaaattataaacaggactttgtagtttgggaagccaaattgataatattctatgttctaaaagttgggctatacataaattattaagaaatatggatttttattcccaggatatggtgttcattttatgatattacgcaggatgatgtattgagtaaaatcagttttgtaaatatgtaaatatgtcataaataaacaatgctttgacttatttccaaaaaaaaaaaaaaaaaaactcgagggggggcccggtacccaatttttccaaaatgggcgag

SEQ ID NO: 1841 - DNA, 1579 bp, Homo sapiens
  SITE (1522): n equals a,t,g, or c
  SITE (1537): n equals a,t,g, or c
  SITE (1541): n equals a,t,g, or c
  SITE (1563): n equals a,t,g, or c
ttgaaggtacgcctgcaggtaccggtccggaattcgcggccgcgtcgaccacagacaggacgcakggttactagtattttggattgactgcagattttgaactgtctgcctagatgaactataccatgtccctagggccaagtcccatgtgcattttgtggctactagaccctcttcagaaatcaaacacaaaatagctctggcctgtaaagaaaacaaacttcaccagtaaaattgtttcctgttcctatccaccaatgtgcatagcacagtgtgtagtctgggtaatacggtttgcataattttttgataatgttctacttaaaaagggcagtgtatttatatattacttatgtaattaaaaaaaaaattcttctggctgggattacaggcgtgagctgccgcgcccagccgtgactgggctctttcacttagcgtggtgttttcagagttcatccagaagaggatgytatttaaaactagttttgcagatgctgttccttacggcatgactcttacctcttccatggtcattgggaagaaattccatctgggtgcagcgtgacgggaatgttttctgttttcttttagggtttgtcacatggaggatgtgtacatatggattctctaaattggatcgcgctatacatattttttttttttattttcttagctattctctattctagattatgytttgaattagcttttccagtttaatagaaaaatctttttgagatttttgatttcgggagaattgacagttttacagagcccaggaaaatggtgtttctccttgtttgttaagctcttcctgttcttcagtgaagtctcacggctttcttcgtgtcgtctgggctcattcttagtcctggagtgcttggctcttgcgttcttacattccatagcagtctgcagattcctatgaacagaagagcctctgaatctcagattaggctgtgtttcgatctgacaggaaagctggttccctgataaaaagtccagaaatgcccgctcagctcagctactcctgaggtcaccagggccttctgtgcactccacgctgctgtttttgctcaggtttttgcctcgaggtttcacagtggctgccagagctctgaacatcactgacacattcatggcaggcaccaggaagcctccggagaagggacctttgctttccatggatctgktggctgatccgcagcagcaagagccatgtctcccagaagactgctccctctgkctcatgagccagcctggctgctctgctacaggacactccttgtttttatgtctctctgtgtattccagtgggatttggggaaggagaggcatcgggtgcagggactcagtgtgccttcttgaaaccagaaacctctcacgctctctgggcctgtttccacttctgttgatgtggtttttactccgttgtatgccgttgctctgtcttcacacgggcagccacaccggtcgacgcggccgcgaattcccgggtcgacgagctcactagtcggcgacnactctagaggatccntcgnggggcccaagcttacgcgtgcnggcgggtgtccttaaa

SEQ ID NO: 1842 - DNA, 2202 bp, Homo sapiens
  SITE (255): n equals a,t,g, or c
  SITE (1084): n equals a,t,g, or c
  SITE (1177): n equals a,t,g, or c
ggcacgagcctgattccatgttcttggccatgttagccataatatcctgtgcagtatgtttttcctgtgcagaggcaaaaacatattgggcatatgttcccaagcccccagcagtatgacccatactttggagtgacactcctcctaagatttatcatgattaaggagcatgggctccaggacccctaactccacctgacatagaacagttagactctcagaataatgtcattaattataccgctccattggaangacttcctttgtgtgtcaccacaaagacatcactcagccatagctgtcttacagttcaagctcacacatggttgagtcactatgggaaaatcatgtacttattaagtcttggttatattaatgtaaccggtgtgctaaccaaccattcctggcccagtcgccttcattgtgctgactatacagaatggattcccttcaatagttcctacccccctccatagacccagtgtcttagcccactggctagaaaacawtctatgttaactggagacattgtggatkggggacctaaaggccaattagatggaaaagaagaaaatcagaaatcatggcacaaactttgctggcattggtggcaagcttttaatgcttcttctttatataacactgggatccaatcccagtcggccgcccagattgcttggcatggagcaggctttagcccgcctcttcctcagtggcattatctagggaggaaaggaccaattcaaaagatgatatggaaggcagcattcccatttatgaatggcaacatctgggttgtaatactatccaataatagcaatagtaagcaacacagtcttaatgttacatttgtaaagaatatcaccactcaatttacagtttgtgtttttaatccttatgtgtttttggcagctaagaaggaccagctccaggtaaacaatacccaattgacctgtaaatcttgccagttatatcactgcattaatcatagcacattgcaaacacataatatctctactttgatgattttaggttgcatccctgggctatggattcctgktaatctgtctgatccatgggctgncacaattgctttacattttgtgaaacttcttctaactcagtttactcattgkgtccgtagaggcttaggcatgataatttttgctattggttnacttggtcacactaataatttctgktgtgatgtcctctgtagctttgcatagttctattcaaacagctcagtatgtggagaactggacacgcacagtcaaccaagggtggctacttgagaataaaattaacactgagttacaaactgaagtggcagtgttataatccacgattctatggttaggggaacaagtacaaagcttgcaattgcagcagtaattgtgttgtcattttaatcacactcatatttgtgtaaccaacttagaatataaccaaagtgagtatccatgggatctcttgtgaaagcccatttgcagggagctttcacatccgacatcacctttgatattggtgaattacaaaacaaaattcttgatttaaataaacaaattccagagtttcagccttctttagaagactggactgaattccagcaaggcctggagagcgtcaacccttggacctatctaaagcaccacattaacatcttatatatagttcttggaataatgttgttttgtctctgtcttctgttcatagtctgtaaaatcggatggactgccaatcggagaatgaaagctacccagcctggccttacattctttcacttaatacataaacaagaagggggaaatgttgggagccaaaaaggccaaagggatggtgaccaactcagcattccactggaggctacatgatcaaacagcaaactgtttatcatgaatacagaatgtgggcaaactcgcttctgtgcctgcccagaaggtttgctgagggccatcgctccctggccccggctccttgaggttatctactgggacatctagagcctattgtttgaggaatgcagtcttgcaagcctactctggaccgagcagctgacctcttcttccacaccccttctcactatctcttttgcctaataaatatggagggctgtgtaaagctcagggcccttgtccactagaggcaaggtgtcccctgacccttcttccaaacataaaaaaaaaaaaaaaaaaactcgag

SEQ ID NO: 1843 - DNA, 1556 bp, Homo sapiens
ggcacgagtttcatccccagctgtaattcaagatgaggaagtgttttatcagtcacttatgtatcagcttgattaggtagatcatggctcttttcagaatatttttagtagcttggtttgtagcctttcttagtgtcaggaaattgaaccccatcctgagagcccttgaggagctttgaagctagtactgtgagcattaaactgagcagcatctaggcaattaaaggaaatggattttatatagtttggagtggcctgagctactttctcttgtgctgttttggatattgcaatcaggtgtgtgatgtttacctctggcaataggaagtggactccaggtggcaagaataccaaagccgagtggactccctcattccctggatcaaacagcatacaatactgatgtcagataaaacttttccccaaaaccctgttgaactaaaggtaaagtcaaggacttaaattttttttgtaaaatctttctaaggagtaagtctccaagcttatcactgctggcttctaggtgaggtggtatgaaaaatggggtcctatagtttgtgtccatttattcaccaaatattaattttataggcactttataaccaatatatacacttcaaagaaacagaaattctggccaaggagagagaaaaaggaagaattgaggaattatataaattactagaggtaagtgagcttatcctttgctgaacttggggtttgctggtctgtactgttgttgcttcttgattatagattccttgtttcttttcccaaactgcattaatagaagtactctcctggtgacaaataatagcaccactctcaggctggtcttaaaatgttgtggtaaaggggcaatgtcagccatctctgttttttaaagggcttattgaaaaatgacatgtatttattcagaaatcttgattttgtggacaaattttctgcttctcagaggaactaaatctttccctaggtggaaagaagagagacttctattcagaatttgattcccagagaatttgaagttgtagaaatgagaatttaaccttgccagataaaagttattgagggaaaggaggatttatagaaagtgtaaaaggaatggaatgacttagagtaggtagtccctacattctagaggtgacttttctgctctttaactcaagggtgaagaacctgatacatatttgattgtttttccatgttagacaataggaaaaactgctgaatggctgggtaaagaagcaagaagtgatgtgcaaataataaatcaaaactgggacaagagggcatggctgtgtttttggactgaaagagtatctgtttcaggtgtggattgaatttggccgaattaaactgcctcaaggttatcaccctaatgatgtggaagaagagtggggaaagctcatcatagagatgctggaacgagagaaatcacttcggccggctgtggagaggtgggtccagatcctgagagtggtctgacattatttattgcgctccagcctgagcaacaagagtgaaactccatctcaaaaaaaaaaaaaaaaaaa

SEQ ID NO: 1844 - DNA, 2185 bp, Homo sapiens
aaaggcccaaataattcccacaattgctatttcagaaataatttttatttggctttgaagtcactttctacctcccactgccctggctgttcctgctcatctccctgacgtctgagcttggtgagctccagcactcagcccttaggcttcaatttctttcccactcatgctctctaggttagtgtttctcaacgagggcactagttggaattttgagcctagtggaatttggtataataataactcatgatgagaaaccatcccatatattgcaggacatttaggatctctgtttcctgccatttaatgtcagggatgtaccctcctacccccagccttcargcaacgagaaacactgccacacataacctgatgtcccccggtgaacatcactgcttggtgagctcaggtataccaaggcattaaatacctgtgttctaaagactccagaatatatctccctggctcagatctgactgcagacttgcagaccaagtatttgtctaatcagtgtctcaaactcactgtgtccaaaacggaacccttgatgttgtccacatctcctgcctgagtctgcccaatctcagtaaatggcgccttcattctaccagctgctcaggctcgatgctttggagttgctcttgatttctctgcgtctctcagcaaatgcctctaarctctgtcttaaaatatatccattatctgacctcttctcagcacctccagaccgttggcatctcttacctgggttattgcagtagcccactgcttggtcttcaacctccactcttgagcatgtccatatcagggatggtgttaaacatctcagtctgatcaacatcaccactcagctcagccattttgggcttcccttatcactcagarccaaatcctgtggtgagagcagcctacagcacgcaggargacctggscccacaatgtgtttctgctctcagctttggacagtctcttctccactcactctaccccagccagactcacctcctggcccttccactgacacgtgagggcctttacacctgctcttccccctacctggaatgctcttccctcagattttccgactccttcagatataccctccctcagggataccttccctgaccaccctttccagaatagcattccctgactcctgaccctgcttcatttttcctcatcactgtcagacttactgtgtgtctgtctgggtatttgtttctatgaagcagatcctccctaacggaatctaagctgcatgagagctgggagcctttttattctatctccagtgcccaaaggctgtagaagggcctgttgagacacccaggtacacatttaggtagttcacgcctggctgttcttgtgtctttcctggctctgcctttctttcagtaggctcattcttgaccagggaacggcaggccccccagtatccctgcagaatctccatcaagcacagactggagcactttcccagagggcactcaccggccagcttcagctctgccagctgtgttcctttcccaacaagaaaaggcctctgaacagatgtaagaattgaggcttttcctgatgggtctgtgtttgacccatttcagagcctgcagtgcagtacctgattgtatccatgagtcaaacagctcttattatctcctccccagcccatggcagagttgaaggaggaaagtgcgccagaggtaagcgtgctgacagttctgtggtgtgacagcctcacagtttggaaagacaaaattttaaaagcttagtagtccacaggcacttgtagaggcagagaggcagacccgataggcctcaatacggtggcacactgcatctcatagttttaaaataatgaagactggctgagcacggtggcttacacttgtaatcccagcactttgggaggcctaggtgggcagatcagttgaggtcaggagtttgagaccagcctgatcaacatagtgaaaccccatctctactaaaaatacaaaaattaggcatggtgacaggtgcctgtaatcccagctatttggaaggctgaggtgggagaatcacttgaacccagggggtcagaggttgycagtgagctgataccatgccactacatttcacatttcagcctgggcaacagagycgagactccgtctcaaaaaagaaaaaaaaaaaaaaaaaaaaaactcga

SEQ ID NO: 1845 - DNA, 1649 bp, Homo sapiens
taaaattcatgattttgggcaaaaaaaaaagcatatcaaaacaaaattttaactactaatgggaaggttaaaaagctgccacgtatttctagtacaatgtatccaataagagcaaggacattgttaaatggaacaagacagctgggaaaggccccactatctctaatagaattgtgctactataaaacatgaagatatcagcaatttggccacttgcagtttttttcagcatgttaaagcaagtgctaagtactttattagtactttatttagtactttattttaaaggtctagaaaacaacagtcttcctggaggccccagaatccctttcatgggattcataagggactcaggtattcttattttctgccaaaaggtgtgcttatttagggactcttttacgatactttgtttctgaagttaggtagatcttggtttactgtgccaaggtcctacctagcattccctgtaggaatatttgaaattccactagctagtctaagaagtcaaagcacaaaattaattgtcaacgcttctctcatattcttaaaattgaagcagtttgcagggaagaacaagaatgaggtgtccctgccttggtaaagcaactgccaaattttgttctagaaagaatccccaagtgtgtggatctattataatttctttatcttttatgaatgagggcatcttttctacttgagcaagatcatggtccttgaccagtgggcttttccttcatatctgtcttgtgtagttgtgcttttcctttggctcgtttttggtctgtcagggtaaccagcagtgcacaatatgagacaaatgctctttagagagaaatctggtgagactgtagaacccagagcaaaactgtttttttttcagtctctgttttcttttctaaatgctatagaaaataaaggcacctgaaaagaaactactactttaacactgctgtggaaggcctttgctttataagaaaaatattattagctatgggaaagtaatgttctttatgtaaagacttaaaaatagactaatagtttacagagttattatataaaatacgatgtgaatttatttcaaacaagttgtgaaggtaccaaaaaccacaataaaagttaatatatataaaaactactagaacaaaaaagcttgaaggtgtgggggtggagggtatggaagaccaaaagtaaatttaaaaaagaaatttttgaaaggaaacagctttatcaggggaagttaaatataacactccgtttttttcttctttctaataatgatatggatcaacaaatgcaatttgaactttttaagataactctaaatgtgttttgtttcttaaatgcacaattgattcttctatactgtaatgcttctttgctgacgctggaaaatggtcagactgctgactttgtgcctttaaaatgcattctgctttgacagtggcagactttttggtgctggagaagattcactagcagtcttatatgtgcttttcaggaaatatctttctacttaaggccttgagagattcaaagtggcatgacttaggcttggaccaaatataagatcttttacattgcaaacaaaatgttgtattgaataaaagggttaaaaaaatcataaaaaaaaaaaaaaaaaactcgag

SEQ ID NO: 1846 - DNA, 2665 bp, Homo sapiens
ggcacgagcggacagctgctgcagggcccatggcggacacccagtacatcctgcccaatgacatcggcgtgtctagcctggactgccgtgagccttccgcctgctgtcacccacagagcgcctctatgcctaccacctgtcccgtgccgcctggtacggaggcctggctgtgctgcttcagacctcccctgaggccccctacatctatgctctgctcagccgcctcttccgcgcccaggaccccgaccagctgcgccaacatgccctggctgaaggccttaccgaggaggagtatcaggcgttcctggtctatgccgcgggtgtttactccaacatgggcaactacaagtcctttggtgacaccaagtttgttcccaacttgcccaaggaaaagctggaacgggtgatcctagggagtgaggctgctcagcagcacccagaagaagtcaggggcctctggcatacctgcggggagcttatgttctctctggagccaaggcttcgacacctcggactggggaaggagggaatcaccacctatttctctgggaattgtaccatggaagatgccaaattggcccaggactttctggactcacagaacctcagtgcctacaacacccggctcttcaaagaggtcgatggagaagggaagccctactacgaggtgcgggtggcttctgtgcttggctcagagccttccctggactctgaggtgacttccaagctgaagagctatgaattccggggaagccctttccaggtgacccggggggactacgcgcccatcctccagaaggtggtggagcagctggagaaagccaaggcctatgcagccaacagccaccaggggcagatgctggcccagtatatagagagcttcacccagggctccatcgagggccacaagaggggctcccgcttctggatccaggacaaaggccccatcggggagagttacatcgggttcatcgagagctaccgcgacccctttggttcccgaggagaatttgaaggtttcgtagctgtggtgaacaaggccatgagtgccaagcttgagcggctggtggcgagcgcagagcagctgctgaaggagctgccctggcccccaacctttgagaaggacaagttcctcacccctgacttcacctccctggatgttctcaccttcgctggctccggcatccctgccggcatcaacatccccaactacgatgatctgaggcagacggaaggctttaagaacgtgtcgctggggaatgtgctggctgtggcctacgccacgcagcgggagaagcttacctttctggaggaggatgacaaggacctgtacatcctctggaaggggccctccttcgatgtgcaggtgggcctgcacgagctgctgggccatggcagtggcaagctcttcgtacaggacgaaaaaggagcattcaactttgaccaggaaacagtgatcaacccagagacgggcgagcagattcagagctggtatcggagcggggagacctgggatagcaagttcagcaccatcgcctccagctacgaagagtgccgggctgagagcgtgggtctctacctctgtctccacccgcaagtgctggagatctttggctttgagggggctgatgcggaggacgtgatctacgtgaactggctcaacatggttcgggccgggctgctcgctctggagttctacacacctgaggccttcaactggcgacaggcccatatgcaggcccggtttgtgatcctgagagtcttgctggaggctggcgagggactcgttaccatcactcccaccacaggctccgatgggcgcccagatgcccgggtccgcctcgaccgcagcaagatccggtctgtgggcaagcctgctctagagcgcttcctgcggagacttcaggtgctgaagtccacaggggatgtggccggagggcgggccctgtacgaggggtatgcaacggtcactgatgcgccccccgagtgcttcctcaccctcagggacacggtgctgctgcgtaaggaatctcggaagctcattgttcagcccaacactcaccttgaaggctcagacgtgcagcttctggaatacgaggcgtcagctgctggcctcatccgatccttctctgagcgtttcccagaggatggacccgagttggaggagatcctcacacagctggccacagccgatgcccgattctggaagggccccagtgaggccccatctggccaagcttgaggaagatgtgtggccttgcccccaattccatcagaccaaggctgcaagtggccctccattcgtgtgtgtatttaggggctggggagggggaggggcaggagcttggaccttggtactacctcagctgagggtggtgacacaaccccttccatttgtcagcactttccagcctgccaattgcttcccctctgtgatctcatttcatctgcactgccatacgtggagtgagcaagacagggcttaccatcctgtctaccagatgaggaaatggcagttctgagaagtcactggtctagatcccgcaggtggcacatgacagctagggttcaaaacgttctcaccaaatccaatgctcctcacatattaattttataaccagacaaataaatattagagacaaccaccaaaaaaaaaaaaaaaaaa

SEQ ID NO: 1847 - DNA, 1258 bp, Homo sapiens
  SITE (805): n equals a,t,g, or c
ggcacaggggsagatggacggccgccgtgttttgggccggttctggagtggctggcggcggggcctgggtgtccgcccagtgcccgaggacgcaggctttggcaccgaagcccggcatcagaggcaaccccgcggctcctgccaacggtcggggcccctcggggaccagcccttcgcggggctgctgccaaaaaacctcagtcgggaggagctggttgatgcgctgcgggcagccgtggtggaccggaaaggacctctagtgacgttgaacaagccacagggtctaccagtgacaggaaaaccaggagagctgacgttgttctcagtgctgccagagctgagccagtccctarggctcagggagcaggagcttcaggttgtccgagcatctgggaaagaaagctctgggcttgtactcctctccagctgtccccagacagctagtcgcctccagaagtacttcacccatgcacggagagcccaaaggcccacagccacctactgtgctgtcactgatgggatcccagctgcttctgaggggaagatccaggctgccctgaaactggaacacattgatggggtcaatctcacagttccagtgaaggccccatcccgaaaggacatcctggaaggtgtcaagaagactctcagtcactttcgtgtggtagccacaggctctggctgtgccctggtccagctgcagccactgacagtgttctccagtcaactacaggtgcacatggtactacagctctgccctgtgcttggggaccacatgtactctgcccgtgtgggcactgtcctngggccagcgatttctgctgccagctgagaacaacaagccccaaagacaggtcctggatgaagccctcctcagacgcctccacctgaccccctcccaggctgcccagctgcccttgcacctccacctacatcggctccttctcccaggcaccagggccagggacacccctgttgagctcctggcaccactgcccccttatttctccaggaccctacagtgcctggggctccgcttacaatagtcctccctctgttcctgaccccctcacacacactggaaagtgagggtgggggctctgcagtcagacaaacctaagatcacatcctggacaggccacttgcttgctgtgtggcattgggcaagtaactttacctctctggacttgtgataataaaagttcctacctcatgttatggttttgaggatttgctaaaaaaaaaaaaaaaaaaaacc

SEQ ID NO: 1848 - DNA, 1027 bp, Homo sapiens
ggcacgaggaaggttttcttctgcacatgtatttgtttgatctgccttttgtgcgtggggtgggagttaggtaggaatcttaaagtggagagccagtttcttcccaaattactgacctaacccatccttaacccccagttcaaggccacctttgtgatagtgaagcttccacatgctcactcagccccttctgctctctcttcttctctactgtgcatgtcggcttgtacttttgccagtttctctaaagacacaaccagaggtggggtggctgtgtgtgcacaacttcaactttacatgtggggctgagtccctatgttgtatatccttgtgcaaaagcacaatatgttaattgctatagcttttaaaaaaataattaatagtttttcataatcaaattttcttgcttttttgttttttcaaaaaagcatacttttattgaagaataaaccccttatatatgtacacttatttataactatgaacctgaactaggatagaaatgcattgtgtatattacaaaacataacaaaaataataggggtagggaggtgcagatgttggtcaaaggatataaacctgcagttctatgatgaataagttctggacatctggaatacagcatggtgactatacttagtaatactatattgtacacttgaagcttactgaaagagtaaatctcaagtgttctcaccacacaaacccaaaggtaactatgttctcaccacacaaacccaaagggaactatgtattaattagcttgattgtggtaaccatttcacaatgtatacatttgccaaaacattatgttgtatacctggaatatataattttatttatcaattatacctcaataaagctgaaagaggggattactaattcccacaaaatacagatttaacaaaaacttttattcaacaaacagtgctatgaagttgtaaattggaaacaaaagaaataaaatttcatccacagtcttctcatcaaaaaaaaaaaaaaaaaaaaaaaaaaaaaaaaaaaaaaa

SEQ ID NO: 1849 - DNA, 1248 bp, Homo sapiens
  SITE (8): n equals a,t,g, or c
aacctttnttagttgagcaaaagamcaagcaatttgcttttgcaamcaataaaaaactcacttttttwatatgkgcttatcttatcatgattccatttttacccttaaacttttataggctgcaataggatctgtggctttggacacagcaaggtcacatggagagaaacaattagaagactatggaatggatgtgttgacagtggcatttttgtccatcctcatcacagccccaattggaagtctgcttattggtttactgggccccaggcttctgcagaaagttgaacatcaaaataaagatgaagaagttcaaggagagacttctgtgcaagtttagaggtgaaaagagagagtgctgaacataatgtttagaaagctgctacttttttcaagatgcatattgaaatatgtaatgtttaagcttaaaatgtaatagaaccaaaagtgtagctgtttctttaaacagcatttttagcccttgctctttccatgtgggtggtaatgatctatatcaccaaccttaatctctctgccttttttttcaaacaccccttcatcatccatcttaatttgcataaggacatatctactttaatgtactaccacagtttacagttaatgtgggaaagaccagcttcagtatcctcttcagctaggattgccctaacttttaactttcacagtttcctgattcatatttgcccaggctctgatgccttgaattggttttggctctcttttttggatctgtttttgttgttaaacatcataatgcagtctctcattaatttttaccatcatttaccctgataatctgcctcttctccatttctccttcccttactacctttctttgaattactgtaactgattggtcccaccaaaattttaaagtacatgaagtatcttcattggttcatcctcttgccccctccagatgtcaaaaaactttatcctgccccctagctgaccacccaggttcctttatttcagtggcccatgtgagtctaccttcccctaaggagtgccctaatccagccctttttttgtttcttatgacccatatctttaggctcttcccatttctaggtgggagataggtaagtttcaaatctatgccagtcttatgaatattacattagggtaatgtgctataatgaagaaataaaaaatacagtgcttaaaagaaaataaaattctatttctgtctaaaaaaaaaaacggcacgtaggggggggccccggt

SEQ ID NO: 1850 - DNA, 1019 bp, Homo sapiens
tttttttttttttttttttttacataagttttacaagataatacatttttacagtgacctgatgtggatacaactttgcaacttggcaaaaagcaaatcttaacttacattataattaatttgctgcattttacacatctctgattctcaattttggcaagtacaacaggttaagggttctatttagtgtccccttctgatgaatatgatgatcttgaacccattcttcctcctcaagcacggtcatcctcctctgatggcaacagcagaacctctgggaaaggaacctttcggtatccagaactcccaggtggcagcccagtgtgggatttggagcatgacaacaaaggcattttctcaacatttactaaaggagagtggggtgttctatacgctactgatggggactgtacatgaacacatttaaattgaattacaacaacattttagataggaaatatagaatcttataagaacataatctaaattataaccaattttaaatagcaaagtttaacaataaagctacttaagtgtttgaattagaaataaacagtaaaacatctgtattaattataacagagttgacatttgttatattttatcttcagtattaaccaaaggagtggaatttagccagggttgcactttttaaaagttgtatatacttttatttattttacaaaaggaaaaaaaaagacatacttttcccataaaattccaggtcttactatgtaaaataaccatgcactacttcatgttataatcataattttagactatttccagtaggtaagtgtcataaagaaggaagagatatggcttccacagcttcaatgaggtgtaaggctagaccatattgcccatgtttttctggtaaaagctcaattactttatttactagtttagctgttgttgcaattggcacttcagtgttttgaaggtcctgggggtccattgctttcagccaagtacacagtgtgggtggaagtctggcaagcagctccattcctcgtgcc

SEQ ID NO: 1851 - DNA, 1309 bp, Homo sapiens
ggcacgagagattcacttgtaaatgttttcgggctccctatactagaatatgagttcagtgactgtggagatttttgtttggtctgcatgctgtatttccagcacctcttttcaccctttcctcgcattcataagactaaaatttatcataatttggatgtcttttaggattggaactgttggagtaagatcgtattgtcatcttctcactaaagattttgcaggtggaattatgtgtggatgctacctttaatttctagcattaaaattctgaagttactttattatttttctgtttgggggtggggttttttttgttttggacagagttttgctcttgtcgcccagcctggaagtgcaatggtgcgatctcagctcactgcaacctctgcttcctgggttcaagcgattctcccgcagtagcctcctgagtaggcattcaccacaccctgctgttttgttacttgtttgttttttgagatggaatctcgattgatcgcccaggctggagtgcaataatagcaccatctcagctcactgcagcctccgccccccccagggttccagagattctcctgcctcagcctcccatgtgagctgggattacaggcatgtgccaccatacccagcgtaatttttgtatttttagtagaagaaagggtttcaccgtgttggccagactggtctcaaactcctgacctcaggtgatccgcctgcctctgcctcccaaagtgctgggattgggggcatgaaccaccgcacccagcctgaagttactttggaaacaaatatatttgtatatgacagcttgtaaaactgtagtgagaagagcagaatcatatatttctcagtgaaaaagaaacaaatcttataatgaagcacagaagaggctttaagaattactgataccatcttgccttttctcctttgttggtaggaaattagtaaataagccaggtttgatggctaaagagtgatttctggagttttttaaaagttaaaatcttttcttattaggcatccacctaccccaggtttgggaaatggtattgaatgttgggctttcccttgtgttttagtgattatttaaagcttgggagtgtttttttcttatttttctgcaggtggttatcactaggctaaaactggacaaagaccgcaaaaagatcctcgaacggaaagccaaatctcgccaagtaggaaaggaaaagggcaaatacaaggaagaaaccattgagaagatgcaggaataaagtaatcttatatacaagctttgattaaaacttgaaacaaaaaaaaaaaaaaaaaa

SEQ ID NO: 1852 - DNA, 2255 bp, Homo sapiens
ggcacgagctcaagagaggccttttccataatctctgtaagccagcctggaaaggctcacaacaattttcccaagatgtgatggaaaagctcgtgttagtattggcaaatttgtttggaagaaaatatattccagcaaaattccaaaatgctaatttaagtttttctcagtcaaaggtgatccttgccgaactcccggaggattttaaagctgctttatatgagtataacctggcagtaatgaaggattttgcctccttcctgctgattgcttccaagtcggtgaacatgaaaaaagagcatcaactccctttggtcaagaatcaaattcacaggtaaagaatgtgaagactcccaactcgtgtctcacttgatgagctgcaagaaaggaagagtagccatttcaccatttgtttgtctttcggggaacacagataatgatttgcttcgaccagagactatcaaccaggtcatcctgcgcacagtcggtgttagtggcactcaggctcctctgctgtggccatggaaattagataaccgaggaaggagaatgccactaaatgcatatgtgctcaatttctataaacacaactgcttgacaagattagaccaaaaaaatgggatgcgtgtgggacagcttttaaagtgtttgaaagattttgcattcaacattcaggctatcagtgactccttgagtgaactatgtgaaaataagcgtgacaatgtagtcctggcatttaaacaattgagtcaaaccttttatgagaaacttcaagaaatgcaaattcaaatgagtcaaaatcatttagaataacaccatggaaaactttcaagtctgattatgtggtatttatccctttgcaaggagagatataattaagcttacacaatgaaatggaaaaaatgtttgtcttggagtcaaacagaattaaactcagataccagctctgctattttctaactgaatgactttaagttatgtaatatatctgagctttaacttcatttttggcaaaaccagagtaaaaatgaatacctctagttgttttgaggattaaatgagataatgtaagaaaagtgattgggattgggtggtgacttaatgaacggtagtggttttttaagtagttaatgtatagcaaaattagtttcacattgtcaagttttcaatacatccccaagttaattgaattttaaattaatgatcaataaatcacaaaggacccaaatcaattctgaacaacaatttagttatgtaagaagacttctgagattacaagaaactcactgctgtggactggatgtttgtgccctcccctccaaaatttttatattgaaattctaaccctcaatgtgatggtattaggagatgataggtcatgagggtggagctccttggatgtaattagtgcctttaacagagagacaagagagcttgttctccaatctctgctcactaccactggatgatacaatgggaagatggccatctgcagaccaagaagcaagccctcaacagaactgaatctacttacaccatgatcttgaactttccagcctccaggattgtgagaaatacatgtttgttgtttagccatctagtctgtggttttctgttgaagcagtctgaattgactaaaacagtcacttggagtagttataaaccactttcctgttgaaagcagaacatgctgattccactgttttgttcaatagcaatgatagattttgtttaagtcccctacactttcttatttctaaatgatcaagagtacacttcctggcagtgattaaggagtgtgtatctaacagaaaaaatatatataccctgtgaacccgaatatggaattcagattgtttctgccctcagtatcatacttaaaaaacaagcatacaaacaaacataagggaacaaacagcaaccataacaaaaacaaacctttaaaggtgggtttttgctgtgataaatgaatacggtactctgaaggagaaaaaagtttctcaaatgagcttaaactgcaagtgatttaaaaattagagaatataattcttaaagctattgaaagtttcaaccagaaaacctcaagtgaattttgtatgtaaatgaaatcttgaatgtaagttctgtgattctttaagcaaacaattagctgaaaacttggtattgttgtagtttatgtagtaagtgacttggcacccatcagaaaataaagggcattaaattgaaaaaaaaaaaaaaaaaaaaaaaaaaaaaaa

SEQ ID NO: 1853 - DNA, 1659 bp, Homo sapiens
ggcacgaggagaatctgccttctgatgagagctgtctttctcttgatgatcttgccaaaaggatagagattgcagaggttgttcctactgaaggattggtctccatattaaagaagaggaatgatactgtaggagatcatcctgcccaaatgcaacacaaaccatctaagcgaagagtgagattccaagaaatagacgatagcttggatcaagatgaagttggaggtggctcctgtattttgctggtcttgctgtgcatagcaacggttttcctcagtgttggaggaactgcattatactgcactttcggtgacatggagtcacctgtttgtactgactttgcagacaaatggacttctattacactaagttacttcagggagtggcagaactgaagcactggatctacctctcctagcagcattccagacacagacatgctggcagtgagagtgaaaggcgggagactttctaaacagtttttctttcaggaattctgtagcattcccccttccctctgttaggaaccaaggacatcagaaatagcaactttaagtggcaagccggaggaactctgttagaataatccacacagtgaggcaaatatcaatctaagcattgtggatggaaggaatggtctttggagagagcatatccatctcctcctcactgcctcctaatgtcatgaggtacactgagcagaattaaacagggtagtcttaaccacactatttttagctaccttgtcaagctaatggttaaagaacacttttggtttacacttgttgggtcataaaagttggctttccgccatcacgcaataagtttgtgtgtaatcagaaggagttaccttatggtttcagtgtcattctttagttaacttgggagctgtgtaatttaggctttgcgtattatttcacttctgttctccacttatgaagtgattgtgtgtttgcgtgtgtgtgcgtgcgcatgtgcttccggcagttaacataagcaaatacccaacatcacaaagatgatctttcttcttttaacttgatgatgatgtgcaggcacaaatctttggagaaggcttaactgtggaatagatgaattctagaactcttgaccctgcaatgagaaactgtgacagatctgtgtcaattaacttgattagccagaaattaatcacaggcctagagaccaaagaaaaagctcccctgagtctcaggcaacagttttgtcacggatgcaaagcttcctgaaatcatgaatgctggactcagtttggcaaacgcttacacctattatgttctgagattctgagaaccagaatgcaaacttaagtaagatacagttcccactgtaggtgttttaatcctggtcttatatagaataaaccagtactttgctgagtgaaatcaccatatagaattcagtattaacagatcatgcattcagatgcttgaatgtgcattcttgttgtgggcttgatttagatcctattgcggggtcattacgcaaaaattcaatcataccttccatagacaaatgtctgatttttgtttaaatctgtccgttaggtggcctttccttatctgaggtgtagtggtctaacatttaggaagccttgctttgactttatcgggcagcattaaaaaaaaaaaaaaaaaaaaa

SEQ ID NO: 1854 - DNA, 2845 bp, Homo sapiens
  SITE (813): n equals a,t,g, or c
  SITE (836): n equals a,t,g, or c
  SITE (927): n equals a,t,g, or c
ggcacgagataatatataaaaagtaataaatataataataaagttttttaactttaaaaataaaacacgctttaaaagcaactgctacctcccctcccccccactaataaaattctagtatgataaaaatgaataccctgctttcattggaaatttctagcttacactttctctctcactccgtttctccttttctgtctctctctactccttctccctccctccctccctctctctctctgtctatatcaatttgctttaagaggaaactgggaattaaacaaactgggatcaatgatgtaatgtatctttagtactttggattttctaaacaatttcctgtagtttctgagagttgtattttaatcacattcatagaaactcagtcagtctggccaatggaggagaatagtatagtcctgctctttcaaattatgttgagcaaaatggctttcttctctgggaatgcactgtactcaaagatataaggtattagactagaggctcccttaagttacggctagttctaacgttctaaaactctaacacagaatctttcttctgttggattgttagttctttgaaactagacagtgtgttctaaatactaaccctcataataccctgaataatacagttagtatgttaaaaattaattaaaagaatggtcatcacaactttgaattccatggtacactttccacaaatgcttctgtttgtaccatgtttgattagtaatgtgaccctttctttcccatgtttagtgatttagaatctagaagagaagtaaaaaaagaagaaggtgaagctttngcacgagaacatggactcatctncatggaaacgtctgctaagactgcttccaatgtagaagaggtaaataagaggccctttaaaatcttcatctttatacttaatagaaatgtnttatatatcttcattttacttattatttaagtttttagtcggatggtctttgaacatcataaagtaggaaagtttcttccctttgaaatcccttgtaacattcaccttctgtcagactcttaaatcatattgagccttctaaagcctgaatgttttcttacatttttgtacgtattttcactccctccctttttctaaacaatttcctatagtttctgagagttatattttaatcacattcatagaaagtcagtctggccaatggaggagaatagtgtagtcctattctttcaaattatgttgagcaaaatggcttctctgggaacccactgtactcaaagatacaaggtattggacttcttcgtgttgcatggtagggaaatcttttttgtgttgcatgggagggaaacaaggaaccacactaatgaaatttggaaatgtttcaagacagcagaacgtttgtagctatttatatccacttctgcttattttttttaattttatttatttttttaactgtcaatatattaccacatcaccacttctgcttaaagtattctattattgctgtgtaacattttacaaagcatgagaatcctgtttcatctattgatgaaatttgtattatttcatttatttccattgatgaacctgaactattggaacttttctgaacacagtgtatccttttatgctgtatgtgtttgtgtttggaggtagtatgtatatacatattataaatagatgattacatagttgatcctttctaaggtaaatgtattactatactgttattttataaaaagaggtaatgaagctaagaaaagtagtagtttatccaaagtaatacttagttcccgatttctagataagaacagcttataagagcaactacagaaagtagttctaaaaaacaaatgagttaagaatcactgccgtaaggataacagaggtcagggtcctgggcaacagctagcatgtgccttcaatgtagtaagcagtcagtaaatatttattaagaatgatacttggagctcttctgattaacccttgaacctaaaaattgactacagtaattctacagcattggtattttcaccgaagaattctttcttaggtaaaatattatacagtcatgtgttgcttgacaaaggagatacattctgagaaatatgtcaccaggtgatttcatcgtcacgtgaccatcatagagtgtacttacataagcctagatggcatagcctactactgcacctactacacacttctcttagtagaccttggtgccagaggaatgacacagtgatgatttcccttggttttctttttgccacatacccgagactgggtgctagagaaacaggcaacctagaaaggtcaacaggcacagaaaaaggaaagtcttctagccagagaaccaggaaataggcaggtcagaacagtgttcgcaagccagaacactcttagaaagtaaccattctactgtagccaaacatcacagaaaaaattgtggttctgcttccacaatccccaggcagtaatgaagtagcacctaccaccaccatttcccttgttggagtggagtgagaggaagccaactaaacagtggtttaaataagacccagagtctcataacatagtatctaaaatacccatgtttcaatagaaaatcattcatcatacctagaaccaggaagatcttaaattgaatgaaaaaaagataataggtgccaacagtgaaatgacagtggtgtttgaattatcttacaaagattttaatgcagcaatcattaaaatgcctcaacaaacaaggaacatgcttgaaacagaagagtcttagcaaacaaacaatctgagcaaaagaaatgcaagataaaaaaaagaaccaaataggaattttaaaaaaaaaaaaaaaaaa

SEQ ID NO: 1855 - DNA, 1647 bp, Homo sapiens
ggcttttactcatcccttcttttagaaaatgctgccttgacagtctgattttcatggtatcatgatccgctatctcctgatgtgtcctctgtacatccagctgctctttctcactctcttatttgtgctctcacttccttaaattttaaccttcttctcgtgctgcactttctccaggtatatgagaaacctctccatttttcactttcatctgtattgctctttgcctgttggcctcaatttctcccaccacaagatgagcccctatacgtatctaagaatgtggcctcaagaaccccagtgtggcaatcccagtgaaaagccttttcccagtactcatctttccatcctggggaaggcatgggattgcttttggttggttgtgtacctaccctggcacacagcactattatcagagtgatgggccaatacaatatatggtgagggaaatgaggttccatgattggccccatcagtcacaaggatggaaaggcagtttcctaagacagatgtatcaggcaggagagaggagctatacaatgtcaacagggaaagtgtaatataaataatcatgaactaataatagagggttagccactaagggataaaaagaagtctaaaggttacagaaacaggtgaatggataaacaaaatgaaatgttattctgccataaaatggaatgaaattctgatacatgctaccccatggataaaccttgaagacattatgcaaaatgaaataagccagactcaaaagggcaaatattatatggtgccacttatacaatgtaccatgaatagtcaatccataaagacagaaagcggaatggaggttttcaggagctggaggaaggggagaatgggaagttattgtttaatgggtgatacggtttggctctgggtccccacccaaatctcatctcaaattgtaatcccatgtcaagggagggacctggtgggagatgattggatcatggaggtgattcttgtgatagtgagtgagttctcatgagattcgatggtttaaaagtatgtggctcccttctgtctctctttttctctctctcctgccactttgtgaagagatctgccttgcttaccttcaccttccaccatgagagtgtttcccaaggcttccccaggcacacagaattgtgaatcaatcaaacctcttttcttcataaattacccagtctcaggtagtatctttatagcagcgtgagaacagactattacaatgggtatagagtttcaccttggactgatagaaaagttttggaaatagatagtggtgatggctgcaaaacattgtgaatgtatctaatgtcactgaattgtacacttaaaagtggttaaaatgataaatgttatgtatgttttaccacaaaaaaaaaaaaaaatacaggccagcctggccaacatggtgaaaccctgtctctactaaaaatgcaaaaatgagctgggtgtggtggcacatgcctgtggtcccggctactctggaggctgaggcaggaaaatcgcttgaacctgagaggtggaggttggagtgagccgagatcgtgccactgcaccccagcctgggcaatagagtgagattccatctcaaaaacaacaaacaaacaaacaaacaaaaaaaaaaaaaaaaaa

SEQ ID NO: 1856 - DNA, 640 bp, Homo sapiens
ggcacgagaagaaatccaaactacaggctctttaatgagatcttccaaattttaaatgtcttctcaactttttaaaatgaagattaaaaactgtgtgacccaaataaaacagacatgtccacatatgttttttagggaaggatttttgtatctgttcactgctgtattcctaggctaccaaatgaattcagcctgtaggcctcgaatttgcaacttctgacttatatgtaaataaataataaatgtattttttcttttttgagacggagtcttgctctgtcacccaggctggaatgcagtggcatgatcttggctcactgcgacctctgcctcctgtgttcaagccattctcctgcctcagcctcccgagtagctgagactacaggcgtgcgccaccacgtctgactaatttttgtatttttaatagagacagggtttcaccatgttaaccaggctggtcttgaactcctgaccccaggtgatccgcccacctcagactcacaaagtgctgggattacaggtgtgagccaccgcacctggccaagtgttgtattcttaatcatctggaaaaaaataaaaaaaaaaaaaaaaaaaaaaaaaaaaaaaaaaaaaaaaaaaaaaaaaaaaaaaaaaaaaaaaa

SEQ ID NO: 1857 - DNA, 706 bp, Homo sapiens
ggcagagagatcacacccttgcctattactaaagatgaagggaaggatgtttattcagaagaacagagagcttgcctggaacagagctacttgcttgtatgttgggttctcccatatggagtgagtggacacagaaaaccatgctttctgccttgaccttgtacatatggcttatgtgacctttggcaaatcacttgctttctctgagtctcgttttcctcgtctctaaaaaaaaattaaaattgaatagaggatggtgtgagatttcagcaagattaaaaggtataagaggccagtccactgctgggatatggagtgtggtctgatgatccttttaaagaatggctgcctgggagttggggagtaggcggctgtcatatgaaagaccctgggccaggtgcagtggctcacgcctgtaatcctagcactttgggaggccaaggcagaaggattgcttgagcccaggagtttgagaccagcctgggcaacatggtgaaagcccatctctaccaaaaatacaaaaattagtcattcgtggtggtgcaaacttgtagtcccagctccccagggggctgaggtgggaaaatggtttgagctcaggaggcagaggttgtagtgagccgagatcatgccactgcactccagcctaggcaacagagccagaccttgtctcacaaaaagaaaaaaaaaaaaaaaaaaactcgag

SEQ ID NO: 1858 - DNA, 1264 bp, Homo sapiens
  SITE (1211): n equals a,t,g, or c
  SITE (1256): n equals a,t,g, or c
gctcgtgccgaattcggcagaggcaacccaggcgatggtttgcggtgaggggtaattgaagaggctgtaacgttttttgctgccaagagagaataaattatttaagggaggcattagctactgcgatwtaawtcgtatcgctgggtgtaatrcccctctccccattctgggtataaaaatgttggctgcattgttgtgttagtgtgtggggatcaaggaaaacccataaaatctctttaggagcaaaggatgtaatttaatttcgttcctaaagaaagaaaagtatctgattgcagawtacacaatatattaaaacttatttttctacatgtacttctggaagggtcagatcaaggttttatttagtgtttttattccagtactctaatattttataaataagtagttggagatgagcccagtcacaggacaratttttacygaaagtacctttawayctttagtttgattaaatggcagtctcttagacaaatgagatgaaaagatcyctgcctatttycagactttatttattgkaagcttgcagtataataactctgtcttttaaaaaatgactttgaattaagtgaataaagaaaatcatccaggaaattcagtcagtggcattcttaatctgtcagcacttagttatcgagctccttgattcttatacgaaggtaccctttgaattaaatataatcctgtgatttattacttaatatttagagaagatatgtattttgatattacaaagtccattagaaactaaactataacaataagcatactaatcttactgtttctttaaaaaagaaggcacatgtaatattgacatatacaaatattcagtagacgttagatttctaaaaaatgagatcttgattttttaaaaaacactgtttacagaattttattaagtttaaaatttagagacaggaatggttgacagtaacttatctgaaaaatttctcagtgaagctcgctggttttgacatgcttgttttttgtaaatcatcatatgctttttgtatattcccacaattgataaaatatttcgtacatttttcatattcaaaaagcaaactttcaaacgtatgctaaatttaagggattacaacagaacattccaraaagatgaaaagtatttgctaaaatgattgtggttactatttttggacccgtgatttgtgatttaagtattttgaaaagcngagtatcttcttggctgtgtaaggttggagtgggtttagagtatntttgtgta

SEQ ID NO: 1859 - DNA, 2249 bp, Homo sapiens
ggcacgagcgatcatgaatttttgcgtggaaccaagcttttggtttataaattgatcagtaaaattattgatgtaaaaaccaatgtacagtgcattccacaactgtttatgtttagcattgcacgtactcacttttctgtatgatgtgggcagctcagtaaatcttcagagaaaaatctgactcagtcaagtcagggatcctgaaagctgcagatggcacaaagaccttttacaagtgacctggcttgatcactgcacacgccatccctggtacctgaggcagaagacacatcttgtgcttccctagtcatcaggttcatcacttcgaagcatagaagctgtagactgaccccgtcaacagaagggtcatttaagacagtgctgatcactcttaccatggaatattagcttttgctggtgggaacattagcttcctagtcaccaaataactgtatgtgggataaaactgaaccttgaactgcctcataaaatgactttatattttaggacatgggaagaacagaagacagagcatgctcttttaagtctgataacatggtttcaagcccagcccccagcctttcttaccaatcaaggactcagaactgaaggcaattatttcttttggtggacttggaatctccgtttgtctacactgtcctcttcacagtggagtctttttatttcagacctacagattgtttttatatttgttgtcacagtgtgacaattttttgtacagtcggttttaaggtcttctctgccattagagccagtaggttacagctattgatgtaactatagctgcaatttttgtgcaggactgagaaacacagtgcattatttattgcggaatcattgctgctaaataactactgtctgtttatttaacacaacaattgaatgcctgaagaagttgcagtggctttattatatgtgaatgcatctgtttctcctcacgaattgttttactgctgcattttttgtttttaaaattaaactgcagtgtttcctggaatgtaaatttagctttgcttaatagtaaaataagtgagccatcttgaacactttaagtttatactatataatttcttaatgaacattggcaaatagagtagctaagagattgacaagcacattacgtttagataagcatgtgatgcagaagttgattcaagcaagtgaatccctgacattttgaggatctcacattagacaccaacaaattaaagctccaaaattatttattttttatgtgttcctcactttagaaacgtctactgcatattactggatatttgtatactaatacacttacctattttacattgtgttttaaatttagttaaaacttaaccgtagaagtctgttcaaacgcgaaaggtcttgctttgtttgttttaaatacatttattttattagaaaggatgatatttcattggggaatagtttctttcatttgggggctatgtgtttcaataacattcacttggaatcagctgaaagctgtaatatgtctttgaaatgagccatgataaattacaaacaagagaaatgagaacttacaggattgcttgaaattattgtgggtattatctgtttaccagagatactaaatattagttttaattatgcatctctttgaacatcataaacacactttggtgttggtaacagtattttaagcatttttgttcacttttaaggactatttgtttagtgcatcttacaaactataaatcttaattggtatattttgaaatggtcgtgtaaatttttgccttatatatcatgaaaatagtcataacttaatttcttttcctgaaattcactgtaaaacattcaggggtcctaccatttctgttcaggaaatcttgtagtttattgttgttatttaacagtattaagtggatttttgtatatttcattttaactttatttgtgaatagtgattgtggcatgtttggggtgttattttaatatttcacgatactaaaattttaattttaaaaaattctggaagaaacagattcatgtgtaatggtgaatattggaccactactgcttttcacatttgtaaattggttttatgttaaaccttgtagcctaacaaactgctgttctttctaactgacagacatgtattaatattgtactttgaaggttataaatatgtggaaattccttcattttgttttgaaatttataataacaaaatctccatgttgttaaaaaaaaaaaaaaaaaaa

SEQ ID NO: 1860 - DNA, 1450 bp, Homo sapiens
ggcacgagattttcttaagtacatctggtcaaacatatttcctgtatgctttggatgatggcacaatacaaatacaggactatcccttacatctggaagcacaaagtatagctttcacaacaaaagacaaatgcccatacatggcatttcataacaatgttgctcatgttttttactttttggacaagggagaggctctgacagtttggactcagatcgtctatccagaaaacactggtctgtatgttattgtggaatcttatggcccaaaaatattacaagagagtcatgagatttcctttgaagctgcctttggatactgcaccaaaactctgacactaacattttatcagaatgtagattatgagagaatatctgattactttgagacacagtgttccaaatagctgttggctgtgatgataaaaaattcattgcaattaaaggatttagtaaaaaaggatgtcatcaccatgatttttcatacgtgattgaaaagtcatatctgaggcatcagccatcgaaaaacttgagagtaaggtatatttggggagaatatggctgccctctgaggcttgacttcacagaaaagtttcaacctgtggttcaactatttgatgataatggctatgttaaagacgttgaagcaaatttcatagtgtgggaaatacacggcagggatgactatagctttaataatactatggcacagagtggttgtttacatgaagcacagacatggaagtcaatgattgaacttaacaagcacctcccactagaagaagtctggggacctgagaactataaacactgtttttcttatgctattggaaaaccaggagacttaaatcaaccatacgagattatcaacagttctaatggtaaccatatattttggcccatgggccattctggaatgtatgtatttcgtgtgaagatcctggatccaaactatagtttctgtaacctaacagctatgtttgcaatagagacatttggactgattcccagtccaagtgtctacctggtagcttctttcctcttcgtcctgatgctgctcttcttcactattcttgttttgagctactttcggtacatgaggatttatagacgatatatttatgaaccacttcacaaacctcaaagaaaacgtaagaagaattaggaaaactgaaagtttgtttattacagatatatgcatatagagaaacagtgtattacatagtgatattgagaggtgtgtttgccctaacatactatatataagctcgtagtaggcatcaccaaattcaagatctggatatattctgaactatctcctaaatagaatgttttcatatatattgttattaaattaatcctttgtttgcattcatttttaagatatatatgtacttcacatggcatgaaaaataaactaaatttgactattaaaaaaaaaaaagaagta

SEQ ID NO: 1861 - DNA, 1645 bp, Homo sapiens
ggcacgagctaagtaatcaattgaggttattccaaccaaacatttaaaatatccttattaagtgtccaccagtgagtggtactaagtgtgacatactgtgcacaatccttgctctcaagaaacatgaacagcatagctaggaagaaaagttggagaggacaccagggcataagcagattcgcactgcaagataaagcaaaaagaagataagtgccaagtaccagatggaatgaaatcatgttccttttgctctcttgcccagcctaagaagacaggccaggggagtttgtgatcatggtacagaaatggaggctattgctcaatttgctcactctgccccatcggtcaaaattgctattcaaaatgtgccttactccctattttgtatttagagtcttggattcttatttgaaacttggcagctttggaagctgtcttatattttgttctgctttaagactttcactgccaagtacatattcaggctttgtttgccagtttttttgattgtgtggttgaatgccatccctggaaagatgtacttttgagctagtatgaagtcaatgagctgccttcagcattcatgaagaggttctgaagtttctgtttcaaggcttttgacatgtcagcgtgtgtaaatctagtctgatgccaagatgccttatgccaatgggttccttttgattttggtatgcatgattttccttgtgcatattaacctgttgccattaaaagaaacagaaaattataagatcatgtaatataacataggttctagccacaaataacattagtactgtatcacaacactagtggattttggtttgttagaatttttaactgtcttggcttttttttaatatcctttctaaaactgtgtattcaactcctgatttttcattcaacccatgatgatgcttcctgactgctcagctggaatctggatttgccttctttcattcagcacacttctgaagcagtggcaggtcttgtggggaattttgggggtagcagattcaaatttggcaggaccctggggacattaatcaattggaaaatatcaatgagcaaatcatttctcagataaaatggttcaattaaaaatgatattgaactgaaaaaaacaaaacgttaccaaactaaaaatgtgtacaattcataggctccacgatacgtttattttgtttctatgtactttttaggcttgatcttaccatctttataatttaaataattggcaataacttataacttgttgtaatgataatgagttcacctttactacttactccctgaccgatgttgtggccctctccagtgccttcctcgcttttattatgtacccacagcagcctaatacacagccctgtggccagcagcttccacaatatttgttgtggaaaatactgattgatattttgggtgaaaaattgtaacttaatggtactttatatcattattaaacatacataatatttcaaatattaaataattgcaatgttcctcagataaaaacacgtctatccaacctggccattggaagtaagagaaaacttcccacagaaaactcttaatatattatttttgttgctgttgttgtctgtttccaatgtttattcttttgtccaaaaaaaaaaaaaaaaaa

SEQ ID NO: 1862 - DNA, 979 bp, Homo sapiens
  SITE (9): n equals a,t,g, or c
  SITE (23): n equals a,t,g, or c
  SITE (976): n equals a,t,g, or c
gaactcccntgaacaaattctgnagctccaccgcggtggcggccgctctagaactagtggatcccccgggctgcaggaattcggcacgaggtaaattccaaaaaaattcctaaaagaaatgttcccgtgcccctgccaccctcactcactaggaatgcaacaatgcattggacaggagggtctcggcaatcggcttgggacccacactgtctaggaaagaaacttctggtttccatgtgctgactgagcaacaaccccttggaagaaatccttgaaaaactgggatgttctatggagggaagctactcatgagttgtgtaacttaggcaaaggcattcaccttttctgagactcagttttcttcttatcaataaaatggagctaacaataggcaccttcagaattatgatgattaattggctcgtgttttctcaacactgtcaattgttcttgaggtcactattgttacccctacttctatgcacccaccatgtatgcatggaatgtgctagaaggggaagaggtagtgggaggtgatcctggggcaaatacagctaagacctccccccatcctacatgcactcattcttctctttcctctgktagtctggaaggggttggggctgttggaagaaaaggaacataaagcagagagaaggatgcagtgagggtgtctgggactgttggcaggcarcagtcgggtttgggggctacagggctctgcaattgaggaagccagaggtggatgaagagttggccacacctctcccctaaagctgcagaatcttctgactataaaaagagctggtgcattcagaatcctctacaaccagtccttcccctgaccttcccagaagcttcgaaccctcagtgctgagctgccaagacgagctgggtgactaacatagccattctccagtttggggatgtcagaatgtccaccccttccccacktctgggggcggaccgaacccgngcg

SEQ ID NO: 1863 - DNA, 2952 bp, Homo sapiens
  SITE (1145): n equals a,t,g, or c
atttacagagacaactgaagtaaggaaaactaaaatcagaaatggaatatcatttacaatttgggatcgatggaccgtacatggaaaagaagatttcaccctcttggatttcataaatgcagtcaaagagaagtatggaattgagccaacaatggtggtacagggagtcaaaatgctttatgttcctgtaatgcctggtcatgcaaaaagattgaagttaacaatgcataaacttgtaaaacctactactgaaaagaaatatgtggatcttactgtgtcatttgctccagacattgatggagatgaagatttgccgggacctccagtaagatactacttcagtcatgacactgattaatacaagttgtcttaacgttactccaggaccacttgattttgggaaagagtgcacttaattcagaagctaaagaaaatcagttcataatactatggatttctctttcattaagccttaattttaagggaaacatcagtaagaaactgcactgaagaattataaaacattttggggcatagcatacacttgtctaacggttcacacgtggctatgatcacaagcaactttgaactggaatgctrtttacaaaagttttgtgtattaatctgtgtattaatctctctggataaaaagaaggaaaaaatatgtatgaccagaacagatatggatgaagaaattgaaagcaacgaatgcaactattcaaaaagtttaattttatgaatttcttttttgtttagtcttgaagactgattttctatgcaaatagtgtttggcatcctgcacctctgatatgatttggctttgagatttataccatgggaagaatatgtatggtggatgaaggtggatattttaaattgtgcagttacagtttactgtcctattacctctgctcgtttaaccagtttgttatatcactgtgtccccaaaatcaggatttttgttgatagcatcagtgttgtaggagcaataggtcagatgagacatattaacttagactaaacgtgaacagtattatatggactctcacaacgctcttagagaatccgtgaatgtgaacagacaaatgtggctaaccatttgattcttcagtatgccttctaatgtggctattttatttatgtgnagactctaaacctgattgtcctaatatataaaactaaaagattttgtaaagggagtgtctttagaaatagatgaaatgtagaatgttaaaaattattgctagggtagtcttttttttttccagaaacctaattagggtattaaattttgtgttttttttgttttttttttttaaacagaagcatgttatttcattcccattcccagaaagggagttaatgaagataaaaatttattttttaaggtctttattgagagaaactttgttttctgatatgaactattgcagatgtttttataaatactttcattaaaatgatgtaaacagtagtacccaacactgtaaactcagtgaaaatagtaaatgattcttttattactaagactgtyatgcattctgaagcagttggcttttttttaaccataggaagtcatttccctctagctccttcccttctactctcctgctcagaccattagtaggtactttgttaaataaaaaactagattaacatcaatattactccaatttggtatcttttacactatgtattatacctactttctttttatttcatttacaaatagtttaaattactttatcaaccagctgtattgtttccctcttgtaaaagtaccatcaagtggggaaaatgtatgtggaagtggagagtgaatttgtatgactaaaggataatctgtacatggggaagtgggcaaaagtggataggatgaatttaaagaaaatgactacctttggaaaaaagaaattaaattttgttcacatatcctaccctttcccattgtgcatatcccaagtgtcatatttaaaactaaggttacttaaaacagaatccaggaatatcaaggctctgtggcttggaattttagaggataggactaataaaaggacttttgcaaagaaggcttttttccacgttcactttgttttgtgttctttgaaagtaactgatacttttcgggtagttaattcagcagtccataaatatgatccagtaacttgcttatattttattgaagtctcgacagctcttcagaagtaaatttagaacgatgctgtcagttcatatttatagatattagtgttttagcagataaaacaaaatcaacaaaaattaagttcattttgtgattaaacctgcaaccatttttccattactttttttctatagttaatggttattgccatgatttcttctgtttggttctactaagctagaaagccagggtgaagttaatgataattcccattattttatttctgtaccatgagattgctgttgatgactgaaataccaggtgcaaaaattaatgatttgatttttgtacagtttcaatgagtattttttacttattaaaaataaattaagaaatgtaagaatatctttgtaaatcatgtttcataagttgactccagagattctgattttgctgtttattttgtgagtaatgttgctttggtgtttcctgattttcaagtttgcaatcatggagatacagcagttattaggtgtggaaggacattacctcaaatgtcctcagatggctccaggaaattcttttaaaacagttggagagaaatagtcgtgaccatgtaaaacctagaggatctggtaaatcccatactactggttagggatttgtaaagtccatttctttttagagttcaaagcagttctgttacttgtccataagttcctcataaattgtcccaaaggtaggacatggaaataaatgtatatctttattttttaatctactatgtcacactctggtgatattcatgg

SEQ ID NO: 1864 - DNA, 1117 bp, Homo sapiens
  SITE (35): n equals a,t,g, or c
  SITE (36): n equals a,t,g, or c
  SITE (1096): n equals a,t,g, or c
  SITE (1114): n equals a,t,g, or c
gggactttttactggtaaagctcacaaaagctggnngctccaccgcggtggcggccgctctagaactagtggatcccccgggctgcaggaattcggcacgaggagactatcagcggcagcattctccagggaagacccatcccctagtgccagagcttgcatcctggagactaaagattgcacttttttgtagttttttgtccaaatgcaatcccatttctgtgcctcttagcatgcagttagatttggacaaacaagattcctaaggaatgactttattaactataatatggttacagctattatataaatatatattctggttatagttctaatatggagatgttgtgtgcaatgctggcctgtggtggtctgtgtaatgctttaacttgtatggaggaggccaggctcagagctgagatgtggcctgaaccttccctgtatcgatcctttaatttagaactgtcaagatgtcactttctccccctctgccttttagtggtatctgacatatactcaaaacagtaatttcctggtcacatcattaactgctaattctgtatttataaagaattttcagatggacatgtacaaatttgaactcaaaccatccccagtccagatacagggcagcgtgtaggtgaccacaccagagcctcagcctcggtccttctcagccgtcgggataggatccaggcatttcttttaaatctcagaggtagcagtaaacttttcagtattgctgttagcaagtgtgtgtttgccaatagatacccattatactaatgtgccaagtaaatgttcattgcacatctgcttccactgtgttcccacgggtgccatgaagtgtgtgaggagcccctcatctggagggatgagtgctgcgttgactactgctatcaggattgtgttgtgtggaatattcatctacataaattttatatgcacagtaatttccctttttatatgtcaagtaactatttgtaaaagttatactcacaaattattataatgattactaatatattttttccatgtttcattgcctgaataaaaactgtttaccactgttaaaaaaaaaaaaaaaaaaactcgnggggggrmccggaaccgngtt

SEQ ID NO: 1865 - DNA, 860 bp, Homo sapiens
cccacgcgtccggtttctgtgtatgctttgtatttttcattgagaactggatcttttgactgtaatgatataactctcaaaattcagattcttttccttcccatggattggcgatgttacttgatgcccctgcaatcatctttttattggtggcttttccaaattattttcacaaaaactatttttcttattatatgtagtcaatgatgactctcttccattacttcacggcgagcagtgctttaacagagatttcctatattatttggatccaatgtaaaatttttttaaaatgtgtttatcttttcataccttcttagactgatattactggtaaagctgcttcagcctgaagtcttgaaacagtggccagtctctgtgccagacacttagcaatcacaagcaattgtcaaaacatacaccgtaatttttgaagtacaatatacctatcatccaccctagcaccagcaagccacactggaattgttggcccccatccacgtggttgttcactatgggactgaagggtagagaatgggggccattatagaaaacagtgaatttcactgtaatgaaccctgactctttcttcataaagctatcatctggagactacaagtgtccaaatagactcgagaattccaaagtagtttctctagatacttcttgtcagttcaataactgttttggtaaaggtactaagttctggagcttctcactttgctatcatctgttatgtcattctaattttctattttctaaataaacctttgtaatctaaaaaaaaaaaaaaaaaaaaaaaaaaaaaaaaaaaaaaaaaaaaaaaaaaaaaaaaaaaaaaaaaaaaaaaaaaaaaaaaa

SEQ ID NO: 1866 - DNA, 1086 bp, Homo sapiens
  SITE (519): n equals a,t,g, or c
  SITE (531): n equals a,t,g, or c
tcgacccacgcgtccgcaaataccatgtggctggtaaaaatgatggtgtaaattatatttacagactgataaacgtaaaaagtatctgggacatagcattattgaaaagaaagcaggctagtgaatactataattattttgtaaaagtctcttatggacataagttatatatttacatggccatattttgcacaggaaatatgaaaaagtatatatatcaaacagtaatggcttatttttatcttctgggagttttgcaggtgcttccctctttacaccattatatgtcatctgaagttttgttctgattctgtattatttcatttctaaaagaaaagccccaaaaccaagtgctgttttcctggtctgtggaaacagagtctccgaggaattaggctagacatggtaagaacaaagttctgttgtgataaaagctttggcctgaggttccaaccattcagtttgccagctcagacttgatcttgaacgarggcggggttctgtgactggagaccattncycycctttkgnatttgttggtgtgtccaaaamcctcagatctcccagcttcaggcttctttgaggscagtgctaaattggttgaaacccttatttgaggcagttcctgaaaagggtaggtgaaatttcctgctgataaaaggcatcytgtgtcttgttcatccttagcaaattgccaattagcaaagaagagagggcagatgaagtaccagccaatttgaaattggtgtggacttccatcaaggtatattaattcattttacctagatgattcgaaattagttgcttttttcttttaatcctaaaaggataattttcttcatgttcttcttgtcatgtcagccaaatcctatagtgtcaactttcagtaaatgtatcttagaaataactatggaccaatctagatctttctctctctatcatctatacagtttagagattttaaaactcttaccacttagtttgaaattttattttaatttataaaatgatatattcttatgtaaaaaattcagacaataaagatgtatttaaagtaaaaaaaaaaaaaaaagggcggcctagagg

SEQ ID NO: 1867 - DNA, 969 bp, Homo sapiens
  SITE (10): n equals a,t,g, or c
  SITE (969): n equals a,t,g, or c
acccacgcgntccggcaacttcttactcccccaacggcttcactttccatgctttgtttgttcttattagcatctatcactatctagcatgtagactgtacttctttttattttgtttgtcactctcccctcttagaatggaagcactgtgaggacagcattttatgtgcatatgtgcgtgtctattttgtgcctggaacacagggggtacttaatacatttttgttgagtgaacaaatgaatatgttgagcctcatcatgactctgagctgaacaagctgagcatcatctgcatcttacagatgaggagactgaggctctgtgagcctataaaatggggagccagatcaaagccaggtctcccaatgtcatgacctttatatttttcccttcaccggtaatacccttagacttggtcagtggagatcctcccttgggcctcaaattttagagcatcccggagtctttctctggctgtaccccttaccattaagtgggatacagtggctgcctggagtttgtcctgcctcttctagatcacgttgcaggtacccaggactctggagttccctgctcagatagtcttgagcctgctgacaagaccaacattgggggtttcttcccaggctgtctctactcaacctgggcctgaaggatgggcacagggtggttgcttatagaatatatgggtagaatttgaacatatgggctgcaaggatccacccacatgtgtacaaggcccctggtgatataagatggagttaggagcagaagagaagtgatacagtaagaagtgtaagaatatgagcacaataactgaaagtaaaatctcaatggatacattaaacattaagttagatgcagcagaaaagagaagcaatgaactacgagatacatctaaagtaattatctagaatgcaacacagagagagtaaggtataaaaaatccaaataagagttcaaaaaaan

SEQ ID NO: 1868 - DNA, 1206 bp, Homo sapiens
ggtcgacccacgcgtccgcccaaggcagcccagccccgtctctgccctggtggattggtggggagctgcggagggaaacagcagccaggactacttcaaggcaaatcagggcccatgacgggggtggttctggtggctgttggggaggtggctatgaagatcctgcttctctgcctctgcctcatcctcctcagagtgaggtcttgcaggaggaaggcagcaagggcagcattgggcatggaggctgcagacgctgtcacggactaatctccagactccagactgcttccagatgcctcctcatccagttcctccacagtctgagcggccgtgtttcctctgcaggctttgcatggtctgtcccctgctggactctcctgatccctcctttccctgtcacccaacatctccccaaaccctccgggccaasgactmtgcggctcttgacactttgcacgtgtagtttcttctcctgaaacacccttccctcctgccaaaccacgtctggaccctccttcaggttcactttttttttttttttttgagacacagcctgggcgacagagcaagactgtctcaaaaactaaaacaaaaaaacaccaccaccaccaccaatgtctgattaaatctaagccacggttccattttggggcaaggggcagggtgtgggtgtggtggacagagaacgggctccagccaccatcagctgcacgtcctggtagcacctgagccattcccagtctcctgtgctgggagatcatcatctaatcctgatgatgacgccctcctctcagagctcgggggatgagctgccaaaacccatggaggttcaaaacccgggctctggagacagaagacactgggctcagagacatggggccactgtccaggctttccctgggcctggacctgggctccttccactgtctgagcagggtcagcctgggctggctgtgctggttcaagagatgagggaggaggacacagcggttgccaggaccctgaggcactggactgggcactgccccaaggggcagaggatggaacccggtgttgatattgtgatgctgacccgtctgctcacctgatttgggtgctgaagggcagctgacccccctaatcttttatagacttgtgaaacgaaaataaataaaagtcaagctgggaacagcttagggcaaaaaaaaaaaaaaaaaaagggcggcc

SEQ ID NO: 1869 - DNA, 1623 bp, Homo sapiens
acccacgcgtccgcatattttcaatgattggcatagcgcctggtctactaaatgctagcttatcgtcattattattattctcattgttattatttattgttgtaatagcaaagcttaattaaataataatgatactaatgatggtgatccgtttcctgctagtcccacttcttattcccaccactgatcttcacgcaactgccaattcctcctgatgttatttgccataagtaatcaatacatgacaacagggttagaatcactgttgaaggaggcagaacaaagtgaaccatggacaggttgtagagagagatgccccgccatggggagggaaaggacattcagctgaaggctcttaggagacatactccttagggcctctgactgtgggctgtccctgttctcctggtctcccaggccctctgcactgtcttggattctgctccccacctgcctttcttccctgctctcctcactgcctgcctgaaaatgccttctgccagccaagtcctcacagtggagtgaaataatccttttaccgtggggtaacgagagggacatccaacctggagttggaactaaggtgcttgaatccttccctgcccttcgcccctcagatgactgtgtttatggacctaggtggctttgtctatgaagcatgcatggcacagtgccagccaattccctctttctgaagcaactgctagaatactgaataccttccctgaaggtaaaatacaaatattttttaagtgaaaaatgaaaatacatttctgaaactgttttctacatgctgatcacaaaagggaatagattactatccatggtcctcttttgctctttttcctctaatctaatctcagtttgatgtcctctctccttgaaagattatatacatagagagcctaattattaggctgcccaaaacagctgctatacctggacagaacgctcactgaggtttggtcaccagactcagacaaggttgaacacggtagcatctgggacaaaaatatgcttgcaaaaatatattgaaactgaaattttaaaagggattctttctctgcttctgttttctaaagaraattatctgcacaattgttctctgtatgtcacttcatttgacatgaacttttcaaactgcaggttttagctagctagtttatgcctaaaacaaaggaaatastgattgaggagamcagtggcatggtggagagtgagtcctttctcagctgtagatatgacctgggtctcctaggctttggagtcagactttggctatgccactttctggctgtatggctttgggcaaattacttaacctttttgaacctccatttcctcaactgtaaattggagctgataatagtatccatctgtagggatgtagtgaagataatatgaaataataaatgaaaaatacttggcacatagaaaggttttgattaatattagctatattgtttttaagacagagtcttgctctgtttgccaggctgaggcacaagaatcacttgaacccagggggcggaggttgcagtgagccgagattgtgccactgtactccagcctgggtgacaaagtgagactaaaaaaaaaaaaaaaaaaaaaaagggcggccgc

SEQ ID NO: 1870 - DNA, 1370 bp, Homo sapiens
acgcgtccgaagtaatattttattgacatataatgcacatacagtaaaatttactacttcacagtataaaattcagtggttttagtatatccacagagttttgcaatcatcacaactatttaattttagatcattttcattgctactcccaaaagaaaccccatatccgttagcagtcattcttcattacccccatcccctagcccctagtaaacactgatgtattttttctgtttctgtggatttgcctgttctgggtatttcctataaaaggaatcatacaatatatctttgtgactggcttcttccacttattgtttttaaggttcatcatcagtacttcattttactgccaaatcacattccagagtatgtatataccatcttttgtttactcatccattgatggacatttgggttgtttccactttttggctattataaaaaatgttgctaggaacattcaaatacaagtttttgtgtgaaaatatattttcatttctcttgggtatatttgtaggagtgaaactgctgggtcatacaataactctatgcttaacattttgaggaactgccaaacagtgttccaaagttactgcaccattttataatcctaccagcattgcatgaggattccaaattctccacattcctgcccccatttgttatggtcgattttgattctagctattctaataagtggtatcttattgtggttttgatttgcacttccttaatgactagtgatactgagcattcattcctatgatggttgcttccattctatgagttgccttttcattttcttgattgtcttctttgaagcaccaaagactttaattttgatgaagtatgatttatcttttttttgttatgcttttggtgtcataatcaagaaagtactgcctgacctaaagtcacaaagatttaccccaacagttttctcctaacagtttcatagttttataggtttagctcccacatttaggttgatgatccattttgagttaattttggctatggtgtgaggttggaatctaacttctgttgtctttatatggataaccagttgtcccaacaccatttgttgaaaagacaatttccctgttggattgtgttagactcttgtcaaaaataaatttgccataaatatgaaggtttatttttgaactcccaattctattccattgatattttggtctatccttatgccagtatcatgctgttttattgttaagttttgaggctgggatttgtaagtgctccaactttgttctttttaaagattgttttgattattcttggtcctttgcatttccatatgaattttaggatcatcttgttagtctctgttaaaaaaaaaaaaaaaa

SEQ ID NO: 1871 - DNA, 751 bp, Homo sapiens
  SITE (5): n equals a,t,g, or c
  SITE (20): n equals a,t,g, or c
  SITE (82): n equals a,t,g, or c
  SITE (124): n equals a,t,g, or c
  SITE (135): n equals a,t,g, or c
  SITE (144): n equals a,t,g, or c
aaggncatccagttttgccnttttcactggtgaaagaaaacccccttggcccccaatacgcaaccgcttttcccggcgcgtngccgatcattaatgcagctggcacgacagtttccccgactgnaaaccgggcantgagcgcancccaattaatgtgagttagctcactcattagcaccccaggctttacactttatgcttccggctcgtatgttgtgtggaattgtgagcggataacaatttcacacaggaaacagctatgaccatgattacgccaagctctaatacgactcactatagggaaagctggtacgcctgcaggtaccggtccggaattcccgggtcgacccacgcgtccggtggctgaagacttttgttatgaggagctgcagattagctaggggacagctggaattatgctggcttctgataattattttaaaggggtctgaaatttgtgatggaatcagattttaacagctctcttcaatgacatagaaagttcatggaactcatgtttttaaagggctatgtaaatatatgaacattagaaaaatagcaacttgtgttacaaaaatacaaacacatgttaggaaggtactgtcatgggctaggcatggtggctcacacctgtaatcccagcattttgggaagctaagatgggtggatcacttgaggtcaggagtttgagaccagcctggccaacatggcgaaacccctctctctaaaaaaaaaaaaaaagggcggccgc

SEQ ID NO: 1872 - DNA, 2329 bp, Homo sapiens
  SITE (12): n equals a,t,g, or c
  SITE (2292): n equals a,t,g, or c
  SITE (2305): n equals a,t,g, or c
tagaaggaaacnggaacgcctgcaggtaccggtccggaattcccgggtcgacccacgcgtccggttatatcctcaacttggatttatggtaaccccttttagttcatggagaccaaaatttggggtatttataatagtcagcgcaggaatgcacatggaatatctacttgtccttttgaacctcacgagtcatccagaatgtatagacaggaaaagcatgtcttatttaaaactgtaatttatgggctcaggatctgaccgcagtcccgggagtaagcatttcaaagggggaaggcagtgtggtccctaccctgtgtgaatgtgaggatgtagacatccatcagtgcaactcgagctccatcctcctccgatttctaaggttccagttttctggagggacagtcatcatgttttgatttatctgggagaaaactgtggtgcacagcttgtgaggagggcaaggttgtgacgttcgagcttagttctggtgttattctgtctcctcttctttgtcatcagccaaaacgtggtttttaaagagagtcatgcaggttagaaataatgtcaaaaatatttaggaatttaataacctttaagtcagaaactaaaacaaatactgaaatattagctcttcctacacttcgtgttcccctttagctgcctgaaaatcaagattgctcctactcagatcttctgagtggctaaaacttatggatatgaaaaatgagattgaatgatgactatgctttgctatcattgttacctttcctcaatactatttggcaactactgggactcttcagcacaaaaggaatagatctatgattgaccctgattttaattgtgaaattatatgattcatatattttatgaatcagaataaccttcaaataaaataaatctaagtcggttaaaatggatttcatgattttccctcagaaaatgagtaacggagtccacggcgtgcaatggtaattataaattggtgatgcttgtttgcaaattgcccactcgtgataagtcaacagccaatatttaaaactttgttcgttactggctttaccctaactttctctagtctactgtcaatatcattttaatgtaattgattgtatatagtctcaagaatggttggtgggcatgagttcctagagaactgtccaagggttgggaaaatccaaattctcttcctggctccagcactgattttgtacataaacattaggcaggttgcttaacctttttatttcaaactctctcaactctaaagtgctaataataatctcagttaccttatctttgtcacagggtgttcttttttatgaagaaaaatttgaaaatgataaaagctaagatgccttctaacttcataagcaaacctttaactaattatgtatctgaaagtcacccccacataccaactcaacttttttcctgtgaacacataaatatatttttatagaaaaacaaatctacataaaataaatctactgtttagtgagcagtatgacttgtacatgccattgaaaattattaatcagaagaaaattaagcagggtctttgctatacaaaagtgttttccactaattttgcatgcgtatttataagaaaaatgtgaatttggtggttttattctatcggtataaaggcatcgatattttagatgcacccgtgtttgtaaaaatgtagagcacaatgggaattatgctggaagtctcaaataatatttttttcctattttatactcatggaagagataagctaaagaggggacaataatgagaaatgttggtgtgcttttctaagcatttaaaactaattgccaattgaaaccctaaatatgtttacataccattaagatatgattcatgtaacaatgttaaattaattataatgggattgggtttgttatctgtggtagtatatatcctagtgttcctatagtgaaataagtagggttcagccaaagctttctttgttttgtaccttaaattgttcgattacgtcatcaaaagagatgaaaggtatgtagaacaggttcacgtgattacctttttcttttggcttggattaatattcatagtagaactttataaaacgtgtttgtattgtaggtggtgtttgtattatgcttatgactatgtatggtttgaaaatattttcattatacatgaaattcaactttccaaataaaagttctacttcatgtaatccaaaaaaaaaaaaaaaaaaaaaaaaaaaaaaaaaaaaaaaaaaaaaaaaaaaaaaaaaaaaaaaaaaaaaaaaaaaancctcggggggggncccggtccccctttggccctttgg

SEQ ID NO: 1873 - DNA, 953 bp, Homo sapiens
ccacgcgtccggaggatttctcttcctgttatatagccttttgcttccccctttcctcattccagctgataccccgagaaaaaactcagccataacatgattatgttgcttaagtaagtccatggtctttttcagtctcttaagttcctgtctacacagttttttcacaggatgcacttgatatggttgtgtgttacaggtttattcatatcagctactgaaatacatgctgtgtgtacatataataggtacattgtctctgcttattgaacttataaaataataataaacagctgaataaggaaagtaatgtaagtgttgttaagtaaaggactttgttgaagaagaacttcagtttttaacaaaaaaatgggagccagaagaaggcggctgaaaggtctgtttctctcatatgtggagtaaagcaaacaaaaatatgttttcttatatgtggagtaaagaaaacaaaaagccacttaaagagtcttgatgtttgagattaaggggtggatggtttgttcttcctttttgtccatagttttttcagagtgataatttttaattcccatcgtcagtaattaaagaaagtgatattttttacactttttaaaaaagcttcagtatttcatgttaacctgtgctaggtttaactgaaaggtttgggattttttagttgttttttggggggtggataatattaaacgtaagactgaatttggccagctgaatctaattagggcaataagttgcattatttcatctctgaattatgaaaataatttgaaattttttttcttatatttcaggcctttttatggttatcatgagaaggaaagacactttatgaagatctatctttacaatcctacaatggtgaaaaggtacaaagataaatgaaaccaaaatatgaataactatcattgaagtattttaataataaaaaaaaaaaaaaa

SEQ ID NO: 1874 - DNA, 932 bp, Homo sapiens
cccacgcgtccgcccttagtcttctgggagggcagtgaccccagaagacgggcacaggtcatggggtgcagagaaactggtaggcagtggtggcactggggggcagaagaggccaggactctgggggtcccagggcagatgtggccaccgtgggggcggtcagggcgggccaccgtgaatccttaggagggctccaccaccgactggcccagtgaacacagccatgtgctccctgacctgaaggaggaggatggcagcctcagcctggatggtgcagacagcactggcgtggtggccaagctctcaccagccaaccagcggaaatgtgagcgtgtactgctggccctattctgtcacgaaccctgccgccccctgcatcagctggctaccgactccaacttctccctggaccagcccggtggaacctggatctgaccctgattccgtgcccgccttccaggagaagttgtcacacttcctacaagcttcccacaggagtttgcccaggatgtgggccgcatgttcaagcaattcaacaagttaactgaggacaaggcagacgtgcagtccatcatcggcctgcagcgcttcttcgagacgcgcatgaacgaggccttcggtgacaccaagttctctgctgtgctggtggagcccccgccgatgagcctgcctggtgctggcctgagttcccaggagctgtctggtggccctggtgatggccctgaggctggagcccccatggccagcccagcctggctctgttctctgtcctgtcacccatccccactcccctgggtggcctgactcccactccctggtggccccatcccccagttcctcacgatattggtttttacttcctgtggatttaataaaaacttcaccagttaaaaaaaaaaaaaaaaaaaaaaaaaaaaaaaaaaaaaaaaaaa

SEQ ID NO: 1875 - DNA, 1812 bp, Homo sapiens
cccacgcgtccgtggaaatatgtttgtcacaggtaaaattgtcacttgggtaaattttatctcaagcaactcctttttagttttaatactttctatgttgcccaaatcaagtcttatttccatgaatcactgttttatgtaataattttcttggtgaggtcaatttacatagttttggtactttcatgtcagatttctaaggtagtataatttagtttagaggaagaatttctacacagatcatgcaattgtctcttcattatatatcagggtaaaatctacaaaaaacaaaattggtttgagaacaaagctgtcattacttgcaagatgaaaacagaaaaattgcatgtgtttattaaaacacagaagtatattcctgtgcaaattaatgcagattctgaagtgaaagacaggacttttgagagattttgagtccaaggattcacctcttcaaacacaactgaaaaaactctattttttttatttttaaatctaatcagtttatatatgcccaggtccagcaaaaagaagctgggttgataatgtgttttgcagttattcaagctagtttgaaagagtacctggcagtgattgtgaagaccaatgattgtgctactaaggtctctcaattgccagacacccaccaagtattttttaaatatgctattctgttttgaaactcaaaaccttgtatttttgttaatctagttacctgccaaatcaaacaggaatccaaagtttcataaccctgctgtattctctggttactagaaataagcatatttttgatgttttaacaaccttttaaaataataatttctaataatgaaatagaatatttctatttaagtagctattgggtatatctttacataactagatgattatattaaatgggttttttagatgaatgatgtgcatgggtagatatttttaaaatgaaatatgttttttccttttttacttaaatttctttttagaacatactgttatgaacattaacatttattcaagtccttgggacaattcttcttcagttacccagtaaaattttcatgatctctgcaaaacatagaattagaaatataaaataagataaattttagaatacagtgagatgacttacacaatttgataattttttatataatattttatgattaaccagttaactgaaacctaaaaacctgtattaactgattaatattgcagcaaaatgtcagttcatgttattgtatcaatcacttatggatacatgattatgctgtcgtgatatgatttctaacaattgtctggtcatttttagctttactattataattttaattaaaatatattaaagtcactatgtcataacagactttatattgtgccatgcagtcctattgctcttttgtttcaaatatcatatagtctaaagcaatgattctcattaaatacatgcatcaaaatcaactgcagttattacatgctaactcaaacttacaaaatcaagctctctgtgatcctggttaatacatctaagtacttgagccgataatccaagtactttggggggtcgaggtgagaggatagcatgtggccagaagttcaagaccagcctgggcaacatagcgagactccatctccacaaaaaagtgttaaaaattagccagacatggtggtgcatgtcttagttctaactactcaggaggctgagaaaggaagattactttagcccaggagctcaaaggtgcagtgagctgtgactgcactccagcccgtctaaaaaaaaaaaaaaaaaaaggaaagaaaagaaaaaaaaaaaaaaaa

SEQ ID NO: 1876 - DNA, 594 bp, Homo sapiens
cccacgcgtccgcccacgcgtccggttatcacctatgttctcatattatttttatctttttttgatcagtatagtttgcagatgataaattttattaataaaatgttaatctttagttttcatcgatgtttttaactgtttttctgtttgttattttatttatgtatgcttttatttttgttattacttttttttttactttagatttacttttgtcttttttgtcccctagtttcttaggtggaaggcaaggtcattgactggagactgttctttttttctattgtgggcctttggtgccataaattttctcataattactgttttaatagcatcccgtatgttcttattttaatttcattcagttcagcatactttctaacttcttttttgagttattctttgattcatgagttatttagaagtatgttagtattcaaatattggacattggacattggacaatggtttttctgttaatttgtaatttaattttgctgtcatcaaacaacatactttgtattattttaatacatttaaatgtatcaaaaaaaaaaaaaaaaaaaaaaaaaaaaaaaaaaaaaaaaaaaaaaa

SEQ ID NO: 1877 - DNA, 909 bp, Homo sapiens
ccacgcgtccggaaggctgctaattggattttggtagttcttacctcaagaaaacttgaattatttgggggaaagtaggctcaaaagagaatatatctttcacattcacattcagaacccagcaacctggagtccaattttcagtattttaactacctcaataatgctatgaatgtaagatattgggatagagatcccaacttgaaacaacagccagtgcctgtggtaacttaatgtcttgtcaaatacttttattgattggtttatatgccattcttgttatagaagaatatgccttttaaaaaagcttattaataacactttcccaatttatattttaaaaagctaaagaacactggattaataatcttttgggagggtagaataaaataattgattactattgctgcatacccggggtgggatggggtggttggagaaccagaactatttttaaaacattaggtttcaatataaatacaactcacaactgctagctttggggggtgggggaacattgtgtgggttttgttttgtttaatttattgattagtctttaaagtaggcttttttttttttttttgagaatactggaccatcattaaatgtgtactgtgaagagattaatatgtatgaagggctttaccaaagtccactaaataaacactactcaagtacagactgcaaaccaaaatgtatctgtgttacgacattaattgcaaatagcaagtatggtgctaaagtctacaccaatggaattagatgagtgctatgcacttaattttaaaataaaactagttttcagtaaaaaaaaaaaaaaaaaaaaaaaaaaaaaaaaaaaaaaaaaaaaaaaaaaaaaaaaaaaaaaaaaaaaaaaaaaaaaaaaaaaaaaaaaaaaaaaaaaaaaaa

SEQ ID NO: 1878 - DNA, 1463 bp, Homo sapiens
ccacgcgtccgtgtatttctaactgcctgagtcacacagaatagggtaagagcctgaccccattctgtaaatcagaaagcaaggatggagaccctttcctgctgctattattggctctctttgaggaagttggaggttaaggaaggaacttgtttgtttccgtatacgactccttcttctctctagttcagtcttcagccagtccagcgctctcttccacacttcagagccccttcagagaaagcattagcaggaatgagacaaggcagagctgcagtgccccctgaggcttccacacatctttctgaatattatttttcaagtaacaagggcagggacagcggaaacagctgcccaccccccccatcccagcagctcagctaagccctgatgagaatgaagccacaggagttgtctgaggtgaacccagccgctcagccacacatggaagccattgcctttgcacatagttcttgggttctttttcctaaaaaggtaaggagctgaggtgtgtggttttttaatattaagaatatataatggaaaacacacgactgacgctcaggcatcttcccctactccccaacagatccccagaagacagcgtggaaggcagtgtagacagtaaatcgggcttcagttctatagccaagaagagatcagctgctgaaaccaccagtgggtaccccaggccacctgcctttgaacttggggatttgccatgtctgatcttgtcacatacttgcttttttacaagatgaactctttgtatttatgatttggggggcaatgaaaggtgcaatgcaggaactgctgctgccgagctcgctggtcacatgggggtgccaggcgggattctggaaaaccagtgcacttaaactgatcctgaagagagctgtcccagcactctggccaccaggagggccagattccccagaaactaccttttgcccaaagaacatgctcagtatttggggcatttcctcccacaaaccctgactgcttctgttacctcagggccttggtacctggatactgccacagaattggggcgggtgggggaggggcctatttttaaataaaataactgttcaaagttgggggtttttttaaaaaattaagaaaaaggaaagctattctgtattgcaccttttcacaatttaatacattttcttacattttcctgtgattttcgaaactaaaccattgtgtgcctgtagtgtcctggttgagctgccgctcagcagcttcctcggggggatttggaacacctgtgtctgtcgccgcactgcctgtgggaggggcccagagggctgctgggactggcgtctgtacacacttgtttggccttttctgtagttgatgctgtaaactctatggctttttaaaaacgatttcatgtttttatttagtattggaaatccaatacacttttttaatccaatcaaaaaaaaaaaaaaagg

SEQ ID NO: 1879 - DNA, 809 bp, Homo sapiens
gggtcgacccacgcgtccgctccttagctgttaaaacaagaaagattgagtgatattatgtttttatttctgagaaaaggtgtgcaaagatgaaagctctcatgattaacgttattatatttgtcatatgaatttctatgtgactctgtacagagtattccctcttgctttttctttgtctctcactctctctttgaattttctaagattacataattccataatgaagttcacgtgacgtctcactgaaaggtacacatactattccttttactgcccgatagataaaagactggattaggacccagagagacctcccttattgaagatagtcaaagaatttgaccttattgccatcttttaatagtatataaccgatattgtgtgttctttcatttctatctgtgcctctctgtagggattagagatggggaattagctttatcaagcctttgggtaaaatgtaaaaactgagctgatttgtctttggcatctcagtaacaaaaatatagatctgattttaacatttacagcactgcctgtgtgctgactgcctataggtgtgcaaagatgaaagtwattctttagaataatattaaagaaaggtttattaaatggcacagtacttctgaagacatagaaacatataaatgatgcaatataggttgctaagcctttttcctcccatttaaaattatcagaacaattttaaatggatttaagccaaaaaaagggactttttttggatttaagcaaaaaaaaaaaaaaaaaaaaaaaaaaaaaaaaaaaaaaaaaaaaagggcggccgc

SEQ ID NO: 1880 - DNA, 1583 bp, Homo sapiens
  SITE (892): n equals a,t,g, or c
  SITE (897): n equals a,t,g, or c
ccccgggtcgacccacgcgtccgcccacgcgtccgaaatagatccccaggcattaactgtaataatgaaataccagagtgaatggaaagatgttattttgcttttacacgttccttccccaagctttcatggtggtacggctctaccaatcttaagctttgtttatgcatggcctattctaagatcatctggggacaaacctgaatgaggaggtctcccaaaagagcaacaggattgccaaagtaaaagttgcatcagggtccaacctaaaagtactagccaagtgtctcaactcttagattggatgctgtagggggtcaacctggmcattaaagtcattaccacaccaaccatttctgtgtattagggttatccttctttattttcagcagtagctattatttcagccaacacctatccaaaccatgccaacaatataggaatatacttgattctcagcaaaggtgatttcttcggacaaaggaaaaaatatctatgcacaatggttagttggttcaaatgcacacatacggacccagcataagatgactgcctgatgtagagccataagggaatcgtgggatccaggtcttccatctgtaactcatcctcccacttataaatattaccccatctttcttacttaggctgctgcttgtctctgctcatccctccacctctgttccccacctgggggcmgctgaacyyggactattgcccagctagatgttaggatgaaggcccattctaatactttgctggtaattctttttaattatccacaaatgtctaaacattttctggcccttacccagtcccaatctggcagctttacctattccagtggttctcaatcaggartgatttgctccccagggaacacctggaaaantctanargaattctgatataactgggagggggtgaggtactactggcatcttgtgggtagagagtasggatgctgtttaacatcctgcaatgcacaggacaggccctgacmacmaacagttatctggccccagatgccaaaagtgccagagttaaagaactttgccttgtacttcatwattgtgtcctccatgctaatgtttctcaccacttaaatattgtagatgttttcaggttgattgtgtccccacccacatctcaccttgaattataataatcaccacgtgtcaagggtggggccaggtggagataattgaatcatgggggtttcccccatgctgttctcctggtagtgagtgagtcttacaagatctgatggttttgtaaatgggagttcccctacataagccctctcttgcctgacaccatgtgtttgcttctcttttgccttctgtcatgattgtgaggcctccccagccatgtggaactatgagtcccttaaacctctttcctttataaattacccagtctcgaatatgtctttattagcagcatgagaacagactaatacaagggctaattttttttgtttgtttgtttcttttgatagggtctcactccagcctggccaacagagtgagactctgtctcaaaaaaaaaaaaaaaaaaaaaaaaaaaaaaaaagggcggcc

SEQ ID NO: 1881 - DNA, 352 bp, Homo sapiens
  SITE (12): n equals a,t,g, or c
ctgcacttgccngccgggacatggcagcctggacgtggggctggggctgtgggcgctgctggcggggttgactcttccagtgagggcagaaccaggctggcaggaggggaggacggtgtacctgctgctcagagcccccaaggctctcctctgagagccaccaagcaggacagagcagctcttgtcccaggtccctcgggctgagcgccgtgtcaccaggagaatagtgctcacagcccaggcagggtgtgtggctcctggatgggctcgtggggcgggakgggacagggcacgggctctcagaaaataaactgctttattggaattaaaaaaaaaaaaaaaaaaactcgag

SEQ ID NO: 1882 - DNA, 453 bp, Homo sapiens
ggcacgagagacacagctgctgccctgcaccagggagcagtaccaccactacccccgtagctctcctgagcccatgccggcatgttttgtgagcttctctgtattcttctgcgccaccgtcccttgtgctgggagcatgcctgcctcttggcaccacctgcagtgttagagagactgcggctgatcgtggggaccctgcatcacgcccctccaccccccgcagtgtcccaggaatccattcctgtgtccactgagcacagcctgcgtgggaggcctgagccccggccccaggttctgtcgctccggatagggatgagtgattggactttggaaagggaaaatcgatgccccctttaagaaatgttatttttaatcaaaataaattctccctttcctgtgaaaaaaaaaaaaaaaaaaaaaaaaaaaaaaaaaaaaaaaaaaaaaaaaaaaaaa

SEQ ID NO: 1883 - DNA, 996 bp, Homo sapiens
  SITE (514): n equals a,t,g, or c
  SITE (574): n equals a,t,g, or c
gcggcacgagcacatctcatcttccactggaacgtttagataaaggagtgtggggtgtaataaagaactaagctaaagcgagagaaacactgaaaaactacgaaatgtcacacaagtaccataaagagagtgattacttgattaattaatgataggaaccctacatttaagtctttcagttatacttgcatcagtcctctttgcctatcagaatgcggtttgtttctgccaacgaataactatcaaaccactgaggcctaactgatgtgtgattaatgtgggctccattaattgtgtggctgagttttatgcatgaagctgtatccttgatttttcacctttaatttcctcctgtttaactgctggtcataaaattgtttcaaatgtatctgctgagtctgagagcaagttttgcaacttgaaaagtgcctgagtcagtttgggcaccttgtttggtaaaaccgacttgggggaactcttaacgctgtaagatgaattgctacttggcttccantcccagccctgctggctcccttcctgccactgctcactggcactgcatctcatctattancattaagcacatgcatagcattgataatggcaaaaggcttaataactttctttctgatagcccatcatatgtggctctattcaaccttattttagacagctagagatgatgacatctgtctttctggtctttttcacattcatttaccatctctgttaatatcacctgattttcttttggggcagcaccccttcccatctctgcttttattttctgtgtttcaagtagggctggtctcatttccctggctccggagctaggcctggacaattagaattccagtgattggttcggggataggcatgtgacccaagctcggtcaactctcggtcaactagagagacaacctaggtcaactagacaggcaaccctaggactttagcaggaactattaggagaaaaaaaaaaaaaaaaaactcgag

SEQ ID NO: 1884 - DNA, 2444 bp, Homo sapiens
  SITE (1655): n equals a,t,g, or c
ggcggaggcggaggcggccccgggctcgggcggctgggatggagcagaagagcgcggacaccggagggcacgcagctgacggagctgcgctgcgttcgcctcgtttgcctcgcgccctccactggagctgttcgcgcctcccggctcccaccgcagcccacccggcagaggagtcgctaccagcgcccagtgcgctctgtcagtccgcaaactccttgccgcccgccccgggctgggcaccaaataccaggctaccatggtctacaagactctcttcgctctttgcatcttaactgcaggatggagggtacagagtctgcctacatcagctcctttgtctgtttctcttccgacaaacattgtaccamcgaccamcatctggactagctctccacaaaacactgatgcagacactgcctccccatccaacggcactcacaacaactcggtgctcccagttacagcatcagccccaacatctctgcttcctaagaacatttccatagagtccagagaagaggagatcaccagcccaggttcgaattgggaaggcacaaacacagacccctcaccttctgggttctcgtcaacaagcggtggagtccacttaacaaccacgttggaggaacacagctygggcactcctgaagcaggcgtggcagctacactgtcgcagtccgctgctgagcctcccacactcatctcccctcaagctccagcctcatcaccctcatccctatcaacctcaccacctgaggtcttttctgcctccgttactaccaaccatagctccactgtgaccagcacccaacccactggagctccaactgcaccagagtccccgacagaggagtccagctctgaccacacacccacttcacatgccacagctgagccagtaccccaggagaaaacacccccaacaactgtgtcaggcaaagtgatgtgtgagctcatagacatggagaccaccaccacctttcccagggtgatcatgcaggaagtagaacatgcattaagttcaggcagcatcgccgccattaccgtgacagtcattgccgtggtgctgctggtgtttggagttgcagcctacctaaaaatcaggcattcctcctatggaagacttttggacgaccatgactacgggtcctggggaaactacaacaaccctctgtacgatgactcctaacaatggaatatggcctgggatgaggattaactgttctttatttataagtgcttatccagtagaattaataagtacctgatgcgcattgaacgacaatcttaagccctgttttgttggtatggttgtttttgttttcctccctctcctctggctgctacaacttcccctttctggtacaagaagaaccattctttaaaggtgagtggaggctgatttgcagctgaagtgggccagccttgcaccagccaggccagaccaccatggtgaaggcttctttccccactgcaggacccactttgagaaggaccgaggargargatttgggttgttttgttaggggttactttcaggggaacatttcatttgtgttatttcttaaacttctatttaggaaattacattaagtattaatgaggggaaaggaaatgagctctacgaggatttcaccctgcatgggagagagcanggttttctcagattcctttttaatctctatttatctggttgtttctgacaggatgctgcctgcttggctctacaagctggaaagcagcttcttagctgcctaattaatgaaagatgaaaataggaagtgccctggagggggccagcaggtcacggggcagaatctctcaggttgctgtgggatctcagtgtgcccctacctgttctcccctccaggccacctgtctctgtaaaggatgtctgctctgttcaaaaggcagctgggatcccagcccacaagtgatcagcagagttgcatttccaaagaaaaaggctatgagatgagctgagttatagagagaaagggagaggcatgtacggtgtggggaagtggaagagaagctggcgggggagaaggaggctaacctgcactgagtacttcattaggacaagtgagaatcagctattgataatggccagagatatccacagcttggaggagcccagagaccgtttgctttatacccacacagcaactggtccactgctttactgtctgttggataatggctgtaaaatgtttaaaaacaaaacaaaacaaaaaagaggcactagtctatctgcaattactcaacgaggcattttcataggaaacagactatgattaatccatttattcttcccacacacttaccttactaagtctttgctttaataaatgagcaaccctgggtatagtcttaaaattctgcacaataaattttgagaaagaaaaaaaaaaaaaaaaaaaaaaaaaaaaaaaagggggggg

SEQ ID NO: 1885 - DNA, 2444 bp, Homo sapiens; identical to SEQ ID NO: 589
  SITE (1655): n equals a,t,g, or c

SEQ ID NO: 1886 - DNA, 895 bp, Homo sapiens
ggcacgagttcctatttccctgccatcatctgctatttctgccacttctcttagactccttgtctgcaaagcccaagctagaactcactgtctatggcagaaggacatccagagcccattctggagttttgttttttccttctgccagatgctttgtgtcctgtcttccttcctcctcatatttctgtttctcatttgtgttcagttttgtgcagcattgctagcactgcttttgtgaccagaaaaggccataacatggtccaggatcatcattcttctgactctagatgggacacttgacagtgacttgaaacatttgcatattcaggaatgcatgagatttcaagagagcctacagtatgaaatcattttcacaaaataagcagcttgcttctgaaatgctgtctttcccagtagctactcacctgcctctggtggctgggattcagatgccacaaaactgtcagtatctatagaccaggtctgtgccacctcctctctcctctgtgctcagtgaggaggcagtaaatgaagttacaggctagcacaatacctaactcatgtttcccagtacacctgtagatattactgtacttttatgttctcaagaaataagttgttgcctattcagtgttacagatttctttgtttctttttaattaaaatacaagaagcagctgaggaaagggagacaaggtattttatttctgactgattttagaaaaaacttgtgtacatgtgtttggaactgttgaaatgccaagttttctgtataagtgtttttgtaattaaactttcagattttctttgttttttaagaagttgatgtgcttgtttgacatttgtctcattaaaacttttctacgttgaaaaaaaaaaaaaaaaaaaaaaaaaa

SEQ ID NO: 1887 - DNA, 1320 bp, Homo sapiens
  SITE (1024): n equals a,t,g, or c
  SITE (1309): n equals a,t,g, or c
gcagggtttcaccattttgggcaggctggtcttgaactcctgacctcaggtgatctgcctgccttggcctcccaaagtgctgggattagaggcgtaagcaccgcgcccagcccctatcctttttgttttttattataaaagtaatatctgaatacatgattgtttaaataaatgctgtgtaagtgtataaaatgaaaagtaaaaggcccccatgaatggacattaagatacttccgatgtgttttgttttctattgctgcagtatttgttactgtacttgtgatggtacatgtgcatatattgctctaaaacaaatttctagaagttgaattccaaacagtgactgttccagatgtcttattttttaggaccccaagcctcttaaattcaggtctttccgttattcccttaccttctcccttatcccttcaaatctttgcccactgccatcacattaatgccttctttgaccttattttatctgttatagtaatgagctgccctgttctttctatctttaatctccccactccaccttgtccttattatctcagctagtttaattcttaaaagtgagtatattaatccttggaatctttcttttttatatatatatatagtactgatatttttcagttagtagcttctgattataactttcccaaattgaggctttcatttccttagaacaaggaactgccctggctgggcagtttagtcaaaggcttgtcagggtgtttagtagacagttgtgcaagtggagctattcacagggactgtattactatgttcctttgttactaaaaaaaaattcttgcagtccctgtagttcgcaacagatactctgactcatatttctctacataggagaaagagtatggactttggagtgatacatctatagctcggttaggatctagactctgctcccaaactggtagtgtattttggggtgcactgctatgtttctgagccttcatttcttccttataaagagtttattagtttgtagccaggcgcagtngctcgcgcctgtaattccagcactttgggaggctgaggttggtggatcgcctgaggtcaggagttcgagaccagcctggccaacagggtgaaaccccgtttctgctaaggttacaaaagttagccggacgtggtggcacatgtttgtggtcccagctgctcgggaggctgaggtgagggggtcgcttggatccgggaggcggaggttgcagtgggctgaaattgtaccactgcactccagcctgggcgacggagtgagactccgtgtcaaataaaaaaaaaaaanaaaaactcgag

SEQ ID NO: 1888 - DNA, 1227 bp, Homo sapiens
  SITE (1164): n equals a,t,g, or c
tataaaagtaatatctgaatacatgattgtttaaataaatgctgtgtaagtgtataaaatgaaaagtaaaaggcccccatgaatggacattaagatacttccgatgtgttttgttttctattgctgcagtatttgttactgtacttgtgatggtacatgtgcatatattgctctaaaacaaatttctagaagttgaattccaaacagtgactgttccagatgtcttattttttaggaccccaagcctcttaaattcaggtctttccgttattcccttaccttctcccttatcccttcaaatctttgcccactgccatcacattaatgccttctttgaccttattttatctgttatagtaatgagctgccctgttctttctatctttaatctccccactccaccttgtccttattatctcagctagtttaattcttaaaagtgagtatattaatccttggaatctttcttttttatatatatatatagtactgatatttttcagttagtagcttctgattataactttcccaaattgaggctttcatttccttagaacaaggaactgccctggctgggcagtttagtcaaaggcttgtcagggtgtttagtagacagttgtgcaagtggagctattcacagggactgtattactatgttcctttgttactaaaaaaaaattcttgcagtccctgtagttcgcaacagatactctgactcatatttctctacataggagaaagagtatggactttggagtgatacatctatagctcggttaggatctagactctgctcccaaactggtagtgtattttggggtgcactgctatgtttctgagccttcatttcttccttataaagagtttattagtttgtagccaggcgcagtggctcacacctgtaattccagcactttgggaggctgaggttggtggatcacctgaggtcaggagttcaagaccagcctggccaacagggtgaaaccccgtttctgctggaattacaaaaattagccggacgtagtggcacatgtttgtaatcccaactactcaggaggctgaggtgagagaatcgcttgaatccaggaggcggaggttgcagtgagctgaaattgtaccactgcactccagcctaggcgacagagtgagactccgtgtcaaatnaaaaataaaaaaaaaacaaaaaaaaaaaaaaaaaaaaaaaaaaaaaaaaaaaaaaaactcgag

SEQ ID NO: 1889 - DNA, 1176 bp, Homo sapiens
ggcacgagaagtgattcttaaatattaagtgataaatgcatttaaaatgtgtccggaatgggctttgtgaattccagaaagggaactaaattctgcttaaaaagagaaggcttctcaaagggagtaatgtttgacttgagacccagagaaggagaaaggaaggaagcttgcagaggagccttggtgacaagaggcatgctctattgtggggacagtaggaataggggagaagccttggccttgtcactttctgctttttggtttatgcagttgtctctgcctaagatttttttctacctttgtttctgcctccagttactccccctggaagtgtcactctcttttaaattcagagagccttgtttatggcactgatgtggtgcccagtgcattctgctttgtactaaatatgctgtatctcacctttgtgtcagcaccaaactgtgttctttataattctgcagcttctagtacatttgtgcatagtagcaactcaatgcacatttgttgaatgttgaatgaatgctagtcaaggcaagacaagcaaaattctcaaataagtcaaaataatccctaattatttccagatggaatggtaatcaatttgcttcaggaataaattagccaatggatgtttgataacataaccgaccctaagtaactcgatttagctgctgaagccagcttttaaagatgcagtttatccactggccatgggatatcggccatgattactggagcaagccctagtaatacaatctttatataataaatataatcttactaaatgtcagtgagaattatctttatataataaatacagtctttaaaattgtatttatatttggcatttatgcctctcagcactatgtaatttcttattagaagtacactttaacttgagaattccattagaatcattaaattttctgaatagaaagcttaacagtgtttaaaaataaatttttagtggcttcatgatgtcaaaacaatcacttgaaagctgaaaaatatgttaaacctacttttgtatttatgtcccagtttgcttttttcaattcacaaaaaaagatttgacttgattacaaagaagaaaacacagaaagagcaaaaaagaaaagaaagatgaaaggaaggaagaaagggagacaaaaaaagaaaaaaaaaaaaaaaaaa

SEQ ID NO: 1890 - DNA, 531 bp, Homo sapiens
ggcacgagctgactgtatacagggttactgttggggttattgtggggcagtgtaaggtgatgaagatctcactgacttagtgttgatggcttgagtttgagtcctggtattaccactcgtttgttgataatcttaggtaaataaactggcattgctaagccccagaaaaatgtatttagtggaacagatgaaatatgattcagtggttaggaagttaacttctgaagacagacaaacctaagtttgaatcatggttcaccccttagtggctttgtggccttgggcaagtttctttaattttcttatctatactgtgaacagtacttacatcataggtttggtctgaagattctgtgagataatgcatatcaagtggttagcactttgccaggcacattgttaagtgcccaataaatgtgggccaaatgtgatagctcacccctgtaatgccagagctttgggaggatcctttgagatcaccctgggcaatatagcaaaatcccatctctagcaaaaaaaaaaaaaaaaaaa

SEQ ID NO: 1891 - DNA, 1221 bp, Homo sapiens
ggcacgagcttttctgagctttccgctcctcgtcgcaatgaagactttgtcctcctgctcacctacgtcctcttcttgatggcgctgaccttcctcatgtcctccttcaccttctgtggttccttcacgggctggaagagacatggggcccacatctacctcacgatgctcctctccattgccatctgggtggcctggatcaccctgctcatgcttcctgactttgaccgcagtgggatgacaccatcctcagctccgccttggctgccaatggctgggtgttcctgttggcttatgttagtcccgagttttggctgctcacaaagcaacgaaaccccatggattatcctgttgaggatgctttctgtaaacctcaactcgtgaagaagagctatggtgtggagaacagagcctactctcaagaggaaatcactcaaggtacagatgcagcctggctaggcagagaatcccttgtagaaaggtgggggagaatcataggatattataactgtaaggaacatgcaagattttccagattatacccttgatagaatagataagttccttaaggctcagatcttgcttaaagtcgtccagcctgttagagacaagtagaacacgaagctggcctctggagtctttattgagtactttgtacaattggtgtagactgggagagccctcctcacttcccctttcttgtgctgtaatttcctgtggggcagaacacctcagaggtttctgtgcatcaaaataagatgcagcaaagacatggaaaaaggataacgagacaaattcccagcaataagtagatgaggttgtgttttttataaaagataacgaggcattccttccagaaatgtggagcctttgtagatttcagtgcataaaaccaagccatgatttcctgcagtgatcacagagcagagaagggagaaagcccttttatcacaaaccagcaggaagtctctgtaaaattggtaaggattctggtttagtgtgaagaaccacattttttgtgtatgtttctgggcccatgggaaggaacagatcatatttgacatacaagaatcaaatgattcaggccaggcatggtggctcactcctgtaatcctagccctctgggaggctgaggtgggaggattgcttgagcccagaagtttgagaccagcttgggcaaaatagcaagacttcatctctatttaaaaaaaaaaaaaaaaa

SEQ ID NO: 1892 - DNA, 1293 bp, Homo sapiens
ggcacgagtcagcctcccgagtagctgggactacaggtgcccaccaccacgcctggctagttttttgtatttttagtagagacgcagtttcaccgtgttagccaggatggtctctatctcctgacctcgtgatccgcccgcctcggcctcccaaagtgctgggattacaggcatgagccaccgcgcccagcctacattcacttctaaagtctatgtaatggtggtcattttttcccttttagaatacattaaatggttgatttggggaggaaaacttattctgaatattaacggtggtgaaaaggggacagtttttaccctaaagtgcaaaagtgaacatacaaaataagactaatttttaagagtaactcagtaatttcaaaatacagatttgaatagcagcattagtggtttgagtgtctagcaaaggaaaaattgatgaataaaatgaaggtctggtgtatatgttttaaaatactctcatatagtcacactttaaattaagccttatattaggcccctctattttcaggatataattcttaactatcattatttacctgattttaatcatcagattcgaaattctgtgccatggcatatatgttcaaattcaaaccattttaaaatgtgaagatggacttcatgcaagttggcagtggttctggtactaaaaattgtggttgttttttctgtttacgtaacctgcttagtattgacactctctaccaagagggtcttcctaagaaagtgctgtcattatttcctcttatcaacaacttgtgacatgagattttttaagggctttatgtgaactatgatattgtaatttttctaagcatattcaaaagggtgacaaaattacgtttatgtactaaatctaatcaggaaagtaaggcaggaaaagttgatggtattcattaggttttaactgaatggagcagttccttatataataacaattgtatagtagggataaaacactaacttaatgtgtattcattttaaattgttctgtatttttaaattgccaagaaaaacaactttgtaaatttggagatattttccaacagcttttcgtcttcagtgtcttaatgtggaagttaacccttaccaaaaaaggaagttggcaaaaacagccttctagcacacttttttaaatgaataatggtagcctaaacttaatatttttataaagtattgtaatattgttttgtggataattgaaataaaaagttctcattgaaaaaaaaaaaaaaaaaaaaaaaaaaaaaaaaaaaaaaaaaaaaaaaa

SEQ ID NO: 1893 - DNA, 908 bp, Homo sapiens
aattcggcacgagaaagggggtcgatgaccacttgtaaagaattgtgcccttggaattttgtgtggttcttttttgtttttgacttgttagggagaatgtcaaacatatataaaagtagactaaacagtgagatgaacatccaaatatccattattcaaagattgcttctgtaataaactcacagccaatgcggtttcatctgtacccacacccctttcttcttttcatatattttttttcattttaagcatttgcaataacttatttacctaaccacctattggtagatatttgagtattaaaccattaaaaaatttttgtaattaataccctttcttgctttgtggtcttgtgtgagttttttaaagataaattcctagaaggggtgttgggtcaaaggacatgcattaggcatgttttagtttttgtaaatttcttccaattttgagatgtcatcacattgctttccaacaaacctgtactaatttacgtttttgctgagttctcactttgtctttcacctagaatcactgtttgctttctctctttgtcttttatatatgtgtatatatgtaatatatgtatatataggcatatatatgtatttatatagtcccctgtgaaacatttgaggctctattgcagacattataactcagtactcttaatactttaatgtacatctctaagaataagacattttcctaatgtaattgtgtgatcacaatacagtgaccacacttttaaaacttaaaaaaattccaaatatcagtttgttttattggtaaatattttagtgtgccagacattaagtcctctttgttgttgttgaaacataaacaaaatactgtttttttaatgctttcaaagaggaaggcattgcaaaaaaaaaaaaaaaaaactcgag

SEQ ID NO: 1894 - DNA, 546 bp, Homo sapiens
cggcacgaggtttttttttctttttcatgattcgtctttgagtacctccaggctgaaagactgttgtaccagtaaaaacttaaaggcacaaattctccttgaagaccttctcccttttatgtggccccatattttatgttgctttatctttgaaattttgcatgaaaaggaaatgaatggattcgaatgaaattgtcctttagagcatgattacttgttcccatggacaaatatttttctccccttgctcttcctggcctgaaacacgggaaaccagagtcaaaagttatctccctctccctgtgatgccttgagatttttttctgcgttgtttaatgcctgaaatccaagtcttcctccatgggaaaatactgttataccaaataattctagatgagtaacaaagatctttttaggccttcattttatgttttttcttaactgttatattatgattgtgacatagattatactactactaatttttggatgtttcaaaaggtcaagaagtaaaagatgttagaaagcaaaaaaaaaaaaaaaaaa

SEQ ID NO: 1895 - DNA, 1160 bp, Homo sapiens
ttaagtggtctgcccttccactgaaagtgtagctttttgacagtctcagccatataaacaggatctcagtttcatccttccatccatccattagaggcacaaggtctcatctcttttccttttgggcattaaaaccaaagttcatacattattgagacaggccgactctgctaaggcagcctgtttggcctttaagttttattgcttattttttgagtatgtatttatttttttgattattattatttttttttttgagctttaagccttcaagtttcctttttattcttgacccctagacatttcctttgcttgtggactcgggtatttgtttttaggtaatatttttwttccctatgacacagccctcaggagatcctgagaacatgtgccctcatttttaggtaattttaattaggaagggttttaggttgtctgatctgccttgttgctagaaacagaaattctcctatkgattgatttttcaaaccacttcttagtggcctctacaactactccagtcaggtcaagaatggctctcacattgccaagtcagtgggtatttttagtcttcatcttagatgacctttatgcacatttgtctttgtctaggaacttctgttggaaacatcttctattttaatgttattttaaatttttttgcttttgtaacattatgcttagcatgtgtgtccaactctttgacaatttctttttagttttctggtggcttccctttatccaaatttagtattgaaattcctcgagccgctgcttttctcactccataattctggccagaatttggtacttaaaatattttgtctaaaatattacaatagctacttaagtcatctccctgactccactctgttgtctttcagggcgtcgtccacactgtagccaaagtgatcttataaaaacataattctaatcatggcactcttctgcttaaaaatgttttaatggctttccgttaggttaaaatttaaaagtcctttgtagcctgtgagactctacatgagttgactccctagcttcatctttgagcatcttatttctttacttattataccatcagttagagttgattgttatataatccacagaagtgaattctgtccgatttaagcaaaaaaaaaaaaaaaaaaaaactcgag

SEQ ID NO: 1896 - DNA, 308 bp, Homo sapiens
ggcacgagggaaaataggcagcatgctaggtgtctttcagtgtctgggggctcgtgaggaccacctgttgttggacagtgagaaaggctaatgtttcttgttcttggttgaatcttgtatttaaaaaagtcattcaaaaacaatgtatttttatagttttgatgtaagtctaagaaaagtggaaaaatatgatatggaataggagtcttcttttggccatttactttctgtgtggccttagacaagttacctatttttctgaatctcctttcttgaacctttttgtaaattaaaaaaaaaaaaaaaaa

SEQ ID NO: 1897 - DNA, 236 bp, Homo sapiens
ggcacgagcaacctcaggacctcctcaagaagtggggttgaggcagaagaaaatgttcaaccctctgtctcctcatccagacctgttccttttgagccatctcatatagtgggggctgcatggatatgttttaagtaacagagttcctctgcctttaaaaaaatgtttgaaaactaagccatgagccaccacgtccggcctaaagacacttttataaaaaaaaaaaaaaaaaaaaa

SEQ ID NO: 1898 - DNA, 2024 bp, Homo sapiens
ctcgagttttttttttttttttttgtgttataataggttctttcactttattgcttattgtaaacactttggccatagcaaatgttagtttttaaataaccgtaattcaaaactttcacatcctatactatttttccccaagaagcatcatctatgaaaacaatcagtgaactccaacagtctatactggtaatgtgcacattgatgctattatgacacttaatacaaatagtaaaaatactcatctattgtaggcttatgggtttgtaaaatgccttaagggaggccataaacaactcaaagaagagatggtgtggactgaactggcttctatttggggaaaatttgcagaatataggaggtacgcaataaatgtttattgatggtgaagatgagaaaaccctatttctgctgatctttcctttccgttttccttaaagaatataaggtatatttgtattcagcattctcagaatcatcacagaaaccctggcactttgagagtcttagccacagtgtaattgggtctgaccacacgcagaagaaaaataaattaaagcatatgtactattaaaattgcactgaaaactttatgtaagtcagggagcccctcaccagaacaggctgaaactcttgaatgctttgcatcctcatatataagaaaatcatcagtgcttaaagatcaaggaactcattcaaaacaaattcagcctttggaccttactggcaggtaggttatatttcagtcagatcaatatctttctaatataggtatttgaaagtaatatatgctacttataataatgatatagtaagcttcttatctgcaagtacaggtactataacttacaccttaaaatgctttgtttgattgtttcattcagcaaaattcttggcactgttttgggatttcactgaattttgatgatgatattggattaagcattttagatttaattgtaaaatgacacaaaaatctaatcatctatttccaatgttcaatatacaatttttataaatacatgaaacaattcatataaaaatataaatgttaaggtcactcacagcaaaatatggcacattagaattatttattaaatgctttatacatataaaggtaggcacttcataaaatttgcattttggtaaaaggcaacaatttgatgtcagtatcttaattgtgtcattaacttttttaagagaacagattatcaaaattttacgwagaagaaaaaaataatagttttaagggaaatctacagaagggaatctgaacttcatttcccactttatttttgcgagtctgttgtgtatcttcatggtcaagttctgagatttttgctccctgacctaaaatcctgtgggaataattgatttctcatcttttacttggaagtgaagtgtctgctacctgtggaacttgatacaattttttttttctccccacagttagaataacctttattctgatccactataaagccagatgatttttaggtggcagtagctggcattgaagagttcttggcttcaagcggctgttgagtctttttggtcttgttttaactccctaattaaataaataagatccaactctttctgttgtattcactcctggacatatagaaattcacttcacacccacctaaaatacgagcagaacttctgaggcccaatgaacccatctactatttgattttgttatcccttctggagcgtgtctctaccaagagcttcacaaagcaatctagtcattgctctttcttgtactaaaaccagagtacccrtcctgtaacttccatcaggacctcaaacagtgctaggcacatagtaaactcttaggcactcaaaatacatttattgatgaatgaaagaatgaacaattctagttctgacttttaaagctatatagaataaagttgcttccttgtgtgggccaaatcattctcccatcctacttagatcttctttttttccaggatcaatactgaaactttcttcacctagcccttaaacaacatgat

SEQ ID NO: 1899 - DNA, 1345 bp, Homo sapiens
caggtgctgacctcgtgatctacctgcctcggcctcccaaagtcctgggattacaggtgtgggccactgcgccggccatgtttctcgacttctgctggcaagcatgttccagtatttgcatggctcctagccctcatctccatttctctgcacagatgttaccttccccatgaggtctgccttatacatgaggcctgtattataaactgcaactccgcattccccaaccccgttgtttcttctctccagaacactaggaacccatctgatctcctatgccttttccttattgtcagatactgaactctcagattacagttccccttcctccctccaggtggcgccatggaacgcagggccctcactggccctggggactgggtgacgacaggggggagcctctggtgattggctccctcaccctgcgtaagatcaaagggactaaaggacagccccgacacccggagccattgtggctcaggcaggttgcgcctgccctcgggccctcacggaggcgggggttccagggcacgagtcgaggccagcctggtccacatgggtcggaaaaaaaggacttttttttatcgttcccaatataacgacaaaacataaagggaggacgccttgataggaagaaatgacatcttcctaagtgtttttaaattacttccatgtgtcttttttttttttttttggggaaccgaggcttgctctgttgcccaggctggagtgcagtggtgtgatcttcgctcactgcaacctccgcctcgtcggttcaagggagtctcctatctaagcctcctgagtagctgggattacagtcgcctgccaagagatggggtttcgccatgttgaccaggctggtcttgaacacctggcctcaaatgatccactcgccttggtctcccaaagtggtaggatgacaggcgtgagccaccgcgcccagcctcttctattcttttagagacagggtctcactgtgttgcccaggctggagtgcattgatgtgatgtgtgatcatagctcattgcagccctgaccatccgagctcaagcaatccttctgcctcagcctcctgagtagctggggccgcagatgtgcaccactgcacctggctaatttttaacatttttgtggagccagagtctgtataaaataaagtgtaaatagtaccataaataaagaatacatagtaccattttatagtagtataaaacggacattagaaactctgaacttaaaggttaaaaaaatacacaaaagtagttctcaagttctagagacttggagaatccaggaatcaacaatgtcgtggaactcctacagcctttcataaagaatggcc

SEQ ID NO: 1900 - DNA, 1376 bp, Homo sapiens
cgcacgggcgcgcgcatgttgacgcgcttcttagctggtgcgcgccggagcccaaattccaagtggaaactgcaggcgcacgagggaggaacgcgtggagcatgaaaaggcagggggcctcctctgagcgaaaacgagcgcggataccgtccgggaaggccggagcagcaaatggatttctcatggaagtttgtgttgattcagtggaatcagctgtgaatgcagaaagaggaggtgctgatcggattgaattatgttctggtttatcagaggggggaactacacccagcatgggtgtccttcaagtagtgaagcagagtgttcagatcccagtttttgtgatgattcggccacggggaggtgattttttgtattcagatcgtgaaattgaggtgatgaaggctgacattcgtcttgccaagctttatggtgctgatggtttggtttttggggcattgactgaagatggacacattgacaaagagctgtgtatgtcccttatggctatttgccgccctctgccagtcactttccaccgagcctttgacatggttcatgatccaatggcagctctggagaccctcttaaccttgggatttgaacgcgtgttgaccagtggatgtgacagttcagcattagaagggctacccctaataaagcgactcattgagcaggcaaaaggcaggattgtggtaatgccaggaggtggtataacagacagaaatctacaaaggatccttgagggttcaggtgctacagaattccactgttctgctcggtctactagagactcgggaatgaagtttcgaaattcatctgttgccatgggagcctcactttcttgctcagaatattccctaaaggtaacagatgtgaccaaagtaaggactttgaatgctatcgcaaagaacatcctggtgtagccagacctctctgagagacatggatatcacaggatgaaggtagaactataatctgcaattctctatgacacagctttaaccttcttctctggccaggacagtcgcaatctttgttttaagtttcacatggccatggagaatgtgcccaagaagaaaaagaatttgaaacagagatacagtcacttcctttgcttagtcttaccagtgattgtcatcatggttaaagctggtctgtgcttcttccatagacagaagcttagtctgttttcagtggaattaattgatgaactgggaaaattttaactgcatggtatgaattcagagtgtgacttaagggtcaattcaaagcagtattttgacttttcatttgtaaaataaaaatttccactattacaaaaaaaaaaaaaaaaaaaaaaaaaaaaaaaaaaaaaaaaaaaaaaaaaaaaactcgag

SEQ ID NO: 1901 - DNA, 1485 bp, Homo sapiens
tacgagttttttttttttttttttatatttaagttttatttctttgagaacttatgatatacagtcatgcatcactgaatgacaaagatgtgctctgagaaagacatcattaggcgattttcttttccttgtgctaacataagagtgtgctaagcttatagcttattgctcctaggctacaaacctatacagcatgttactctactactaaatactatatgcagttgtaacacaatggtaagtatttgtgtatataaacatatctaggtagagtaaaaatatgatactaaagtcttacaggaccactgttgtatatgtggtctgttgtttactacatcatcatctggcacctgacattacattcatttagctaaacttaactgataagacatgagtgtttgaagagcaagattcatctgtagactttacatatacaatactcttttggggaaaataagaatataaagaattaaccttgaaattaagaattcttgcatttccctctagtgcctttcttgaacttttaaattcatatttttaattaaaaatttcttgatctaggctaggcatggtggctcacacctgtaatcccagcactttgggaggctgaagtgggcatatcacatcctggctaacagggtgaaaacctgtctgtactaaaaatacaaaaaattggccaggcatggtggcaggcgcctgtagtcccagctactcgggaggctgaggcaggagaatggcgtgaacccgggaggcagagcttgctgtgagccgagatcatgtcactgcactccagcctgggcgacagagcaagactccgtctcaaaaaaaaaaaaaaaatttattgctctgttcaaaaaatggagtcattttttaaacacatggagcagtaacccataatgaggtataatagacctaaccatgaaacacagaaaacttaaccatattctacttctgctttgtatatagtgatcaccagcagcttgcaaaacttatccaggagtcgccaaccgttgaactgaaagacaagttggagtgtgaattggaggcattagtgggaaggatggaagcaaaagccaaccaaataactaaagttcgaaaataccaagcccaggtaactcagttttccttcactcaagtttctaatgattaagaaaaaaaaaaacactttaattcaatattaatgatgacactaagtgtatcatagataaatatctacaggagatacttctttactgaagacatttgttcattgagaattggtaagtggattaagaaagaagacacttttagtcacttagcatattcatctaagaaacatctttcaaatactgaatatatttaatattctttatgaataagctttaacttctttgatgaatttaaatcggagtttatccaagtaagtttttttaaaagcacctgcgaaattctgtttccaaaggaataagtcatacattaaatatgtgaaatatactctgccgaatt

SEQ ID NO: 1902 - DNA, 486 bp, Homo sapiens
ggcacgagcagctgctaactgtgtgaccttgggaacctaacctctttgtgcctcagtttcctaatctgtaaaattaggctgataacagaatcatagtcttgtaataagggttaaagatataatctatgtacagtgcctagtccaatttctagcacacagaaggtactgcataaatgttagctattattacgtttctgaaagctcacttgggtacacataacatggggcaagaccagagggtggagaccagttagatcgtcactgaggtcccttccagaccagtaaatttctgaataaagctttgaaaactagttgctcacttttaagtagctcacttcctgtcttgtttacattaagagacagcagaataatttttccagataatgcaaatgtgtccagaattagttctaatttgaattaataagattttattatacttttaaatacaaatctctcaatattccccatgaaaaaaaaaaaaaaaaa

SEQ ID NO: 1903 - DNA, 2401 bp, Homo sapiens
  SITE (1263): n equals a,t,g, or c
ggcacgaggctttttataactcttaattattggcaataaaggtgagaaacatgtaaagagccaaataagacaattttatatacttgatatcgttatgacacaaataaaactgggtaatggaaaataaagggccagggtgatgtgttttttgtgtgtgtgatacttcagcaaaggtacttgaagtcatttctgaaaaaagacaaaagaaagctgtgtctatcctgatgctgaaaagaaaaaaaaggcatgtggtgataggtttataaaagtattactggtagcagaaacagtacataccaaactcttatgtagaagaaatcttgatgtgatcctagagaagaaataagtagaataatgtggaatagagaagactaggattgagaccatgaagtaaagtacgtgtaagaattacttttactaaacttaaaaatttttctatatatttgtatttatgtctatatttataaatagatctagaggctttgtatgcctgcatataggcatacagttctaaaaatatgtctttatttaccaaaggttatggtaaaatttamwgacaacaaaaacgagaaaaaaaccccactttactaagaggactccagctacgctgtccagtaaggtagatacacacaaaatgttgcaacttaaattttaattaacagttttaaaaattataaattcaattatttaactacattaactatatttcaatgaatatatagccatatgtgtgtaaagattacttctttggacaatgcaggtatggaacatttaagccacttaagacagttttcttggaaaacactggtgtaaagtcacagccctgaataaatgttaaagaatagattttactcctaaattattttgtttattttgccttgttacgtgatattgagtcagacatgcagttgagagtaatgtttaagaaattgagcaaaatatttccagtcccaagttagatgactaacacagattttaatagatttaatgtgttattccaatagcatatgtcaggtacgaatatactgtaacatctctcaggaaatatttatataacatagatataattaattagtcaataaccattttaattytatttaatacttatcctagttatgtggktttaggttggcagtttaatctataggaatatattaagactgatagaggraaagagaaagawtatgaccctttgataatgacamcagamcatatactattcttcctctttaatatcatattttgkgaaaagyttatgttttncactcagaattttcctcaaagttcaccgattatttcttcaaggaattttcaccttatctaggtttcagtatgaatttagttgattcattatttgagaatagttagggtagaaagcagagaaagatacacagtcaagtatgaaagtattagaatgtttgattttataactcacatagagaaatatctacatttttacattgttttattttgtcccagaaagaatgtcattgacctgttttgtaataagtgtaataagggataattagctcttaagattttatatttttatttgaacatatctattccaggaaaatgtacaaaacatattttaaatatycagctatttttatkgcctycaattattttcatttggaatatcttttttattttaaagttttggtagaagcagaamcaaaataacagaggacatctttaaacaaagcataataaaataatattaaattttattttactaaagatgcaaaggatttccataatttaaaaaataaattttaatttaactctgtaatttataagatatttctaaaatgtgtcctgtttataatttcagttcttgttagtatttctgtcattkggtaggcaataagaacattatttctaatcatgtaatgaatgaatgatatcagggtattagcgtaatttcagttaagaaaataatacttagaatattagtacctagaatattagtaccttgaaactcaatcatacataatacgaagagatgccttctttatttcctttggaggctttatttactaacttcatctttggtggtttccttttaaaataattcaccaaaacagtaaatttactttgtggaaagcataggcctccactctatcctactgtcttttgctatatatcttacacaaattcagtgatgttcacagaataatagagaacaccagcaaatgtactcctctatttcctttaagtaaaatttattttatccttttttatgatcccatcattcattcctttaaacattatgaattcttcattgcatccctgggttatgaawattgtggagttttagaaaattggataacatctctttacaggttataagatggtgaagaatcttaaggattaaatcagtgaactaatttagctcgag

SEQ ID NO: 1904 - DNA, 2970 bp, Homo sapiens
gtggaagcggtcgccatgtccgcggggagcgcgacacatcctggagctggcgggcgccgcagcaaatgggaccaaccagctccagccccacttctcttcctcccgccagcggccccaggtggggaggtcaccagcagtgggggaagtcctgggggcaccacagctgctccttcaggagccttggatgctgctgctgctgtggctgccaagattaatgccatgctcatggcaaaagggaagctgaaaccaactcagaatgcttctgagaagcttcaggctcctggcaaaggcctaactagcaataaaagcaaggatgacctggtggtagctgaagtagaaattaatgatgtgcctctcacatgtaggaacttgctgactcgaggacagactcaagacgagatcagccgacttagtggggctgcagtatcaactcgagggaggttcatgacaactgaggaaaaagccaaagtgggaccaggggatcgtccattatatcttcatgttcagggccagacacgggaattagtggacagagctgtaaaccggatcaaagaaattatcaccaatggagtggtaaaagctgccacaggaacaagtccaacttttaatggtgcaacagtaactgtctatcaccagccagcacccatcgctcagttgtctccagctgttagccagaagcctcccttccagtcagggatgcattatgttcaagataaattatttgtgggtctagaacatgctgtacccacttttaatgtcaaggagaaggtggaaggtccaggctgctcctatttgcagcacattcagattgaaacaggtgccaaagtcttcctgcggggcaaaggttcaggctgcattgagccagcatctggccgagaagcttttgaacctatgtatatttacatcagtcaccccaaaccagaaggcctggctgctgccaagaagctttgtgagaatcttttgcaaacagttcatgctgaatactctagatttgtgaatcagattaatactgctgtacctttaccaggctatacacaaccctctgctataagtagtgtccctcctcaaccaccatattatccatccaatggctatcagtctggttaccctgttgttccccctcctcagcagccagttcaacctccctacggagtaccaagcatagtgccaccagctgtttcattagcacctggagtcttgccggcattacctactggagtcccacctgtgccaacacaatacccgataacacaagtgcagcctccagctagcactggacaggtcccagagtccgatgggtggtccttttattcctgctgctcctgtcaaaactgccttgcctgctggcccccagccccagccccagccccagcccccactcccaagtcagccccaggcacagaagagacgattcacagaggagctaccagatgaacgggaatctggactgcttggataccagcatggacccattcatatgactaatttaggtacaggcttctccagtcagaatgagattgaaggtgcaggatcgaagccagcaagttcctcaggcaaagagagagagagggacaggcagttgatgcctccaccagcctttccagtgactggaataaaaacagagtccgatgaaaggaatgggtctgggaccttaacagggagccatgattatccagccaagaagatgaaaactacagagaagggatttggcttggtggcttatgctgcagattcatctgatgaagaggaggaacatggaggtcataaaaatgcaagtagttttccacagggctggagtttgggataccaatatccttcatcacaaccacgagctaaacaacagatgccattctggatggctccctaggaaacagtggaacagagttttgaccctcagtgactcttcttagcaataatgcatgcatttgatttaacaagactctggggcctgtgctgggaaccatctggacctttgcagaagttagagattcagtgcccccctttcttaaaggggttccttaacaaccacaaaaatccttatttctgcagtggcatagaatctgttaaaatttaattagaatcacaaatttatctcagaagctttttaacagttggtgaaatgtgcttgtccaacaaagcatcctaacagggtcgttcccatacacatttgacctggtcagccttttccaggtgaatagccccagttctgacataaagaaagttttatttgtattttactactgtttggtcaattttgatatataactggttacaaacagagccttactatttattagtggggaaatgattttaagaccgtccttttcagtatttaattctgacagatctgcatccctgttttgttttggattatttctgttttggaaaatgctgtctcatttaaaactgttggatatagctggatcctggataggaaaatgaaattattttttcattgtgttttttaattggggtgatccaaagctggcaccttcaggcacattggtctcatagccattactgtttttattgcccttctaagatcctgtcttcagctgggtcagagaaaacttcttgactaaaactggtcagaactcatcacagaaatgaaatacagtggtctctctctcccagaactggttgcagctaaaacagagagatctgactgctggctataggattttggacttaatgactgaaattgcaaattgtcctttttcttggcattacagattttgccaaaataactttttgtatcaaatattgatgtgtgaaagtgaaggagctagtctgctgaaccaggaatagtttgagatattgaactgtcatttttgcacatttgaatactttgcaggctggctttgtataaacttatcctctggtttcctatatgttgtaaatatttagaccataatttcattataaataaatctataaatattcaaaaaaaaaaaaaaaaaacgggaggtt

SEQ ID NO: 1905 - DNA, 2184 bp, Homo sapiens
gcgcggtgcggacttcgagcacgagccctaaagacgctcagcactcgtcgcttctcctagcagaccctgcccggcttggcgatggagtttccggacctcggcgctcactgttcggagccgagctgtcagcgcttggattttctgccgcttaagtgtgatgcctgctcaggcatcttctgcgcagaccatgtggcctacgcccagcatcactgtggatctgcttaccaaaaggtgagggggcgatcctcagggtgaaagcaggcagatggagaatgcgtgcagaatcccccaaatctgtgtctcacgtttcttctcccttttgtccttctgaggctgtcagtgctgggaaacactgtttttttgcgtgtttgtggtgggtcatatccaagttctttcaggaccagagatttgttggactggagtgggccacagactgacccttgctccttgactacaggatatccaggtacctgtgtgccctctctgtaatgtgcctgtgcctgtggccagaggggagccccctgaccgtgctgtgggagagcacattgacagagactgtcgctctgatccagcacagcaaaaacgtaaggtaaacattgtaggggtcagccacaacccagctgggactacggatgcctggaaacccaaacagctaatcagagtctcagcagagacaaccttctcacttcacctcagatcttcaccaataagtgtgaacgcgctggctgccggcagcgagaaatgatgaaactgacctgtgaacgctgtagccgaaacttctgcatcaagcaccggcatccactggaccatgattgctctggggaggggcacccaaccagccgggcaggacttgctgccatctccagagcacaagctgtggcttctacaagcactgtccccagcccaagtcaaaccatgccttcctgtacctctcccagcagagccacaacccgatctccgtcctggacagcccctccagtgattgctttgcagaatggcctggtgagttgggcagaggttggatggacagaaacaaacacacagagagtgaagtccaaggacgctggtcttctttctccctttgtagagtgaggatgaagctctgcagcgggccctggaaatgtccctggcagaaaccaaaccccaggttccaaggtaccttaccctcttgtgaaagagagcgcaagctgtgggcaagggcttggtctggaggcaggtaggtgggaccactctgacacaatgcaagataatcgctggcaacttggtctcaaaattaagatgaactatatgatctttgacaagttatttaacccatggagccttcatttcctctataaaacggggacaatactaatacccaccttgtagtgttgctatgaagattgagataatcctcagcagtgctcagcaccatgaggcccaacacacacagatcagatgttcaaatttcagatcttaccatcatccaacttaaactgtttctccctcccagttgtcaggaggaagaagacctagctttagcacaagcactgtcagccagtgaggcagaataccagcggcagcaggtatgaggctgggctgaagatatatgctgcagtggaagggaggaagaagtcagggatgggggttcttcctagtggtgcagagttttggaatggtggttatcgtctggttttcagtatgactccagcccatgctgagctctgaaatgagggctgtccctcatttccttgacgttgcactgtgtcttcccctccttcccctctctttgctctaggcccagagccgcagctcgaagccgtccaactgcagcctgtgctagggccctgggcttggggagggaggttcacctgaggaggactgtggccctcacacctctagggtacacagggagaggaggcccggagcaccctggagggcagagacaagcgggagtgatgtggaggtcgccctgggagcctctggaaggccttgctagtgctccagctgcatggaagagagcggctagcaactgttccctggttgggccctcagtggatgctggccaggccctactcttagccccttcatcatgtcatctcccttatgctggagctgccccgatgtggagtgggcaggaaggggcctggaaaaaataaaggatcttggcagttgataaaacgtaaaaaaaaaaaaaaaaaaaaa

SEQ ID NO: 1906 - DNA, 3852 bp, Homo sapiens
  SITE (2098): n equals a,t,g, or c
  SITE (2111): n equals a,t,g, or c
ggcacgaggaaaaaccagaggaaaaagcttaataagttacctttagcttttcttttctctgaaatgacacttcatgttagtatctcccaggagggtctattttctagacttgacatgttttgtggcttttcttctgcttgtacaatgcagtgtcctaactgtgtgcccacaggtcactgaggaagagtagggagtacagctctcagaccttttttttttttttttcaagttctttcctcttggatccatctggtccccattttcttcaagttggctttcagggagctgcatcataatcttaggatcaacaacagcttagggtccacggtgaccttctgaacctcgtctgtctgattcatgccttgctagtcagtcgccatcttggatgtgtgcttcacccagctttccttcattggctggcttccaacttattcctggtcagtgtcccgcattgccagtcttcttggattccaggcctgtattttgaggcataagccccttttcccaatgttggtgttctgccaatggatagaacttaatccttatttatgccccctagttactcatggagacactgaggatgtttatctgcctttcacacctcctgggccctgaagggaaaaaactctgggttcttctgaagcttttagtgcgtagttcttcttttcctactaaattgtttccgtatggaacaaccagtgtgggagatgatttcacctcttgtcatctttcctaagtcttccttgaagtgggtaagttccttctggctgttactggttccttggtgctgccacctccactgccccccactcccccttttttatagatccctaaatcacatcaaattgttttatttttcaaatcactaaagttgcctttctgccttagatcgtcagccagctctttgcagttaatgaggatccaattatgaaaggcagctgctcagctcctccatcttctatcccccacccccagaaatgtttaggatgacttctggctggtgaatatcagctgttgtggttgtctcctaggaatggcatggctgagggctttgtggtttatatctgagcagttaggggctcttttgcagggggaggaaagacagggggacttttgcttctacaaaggaaagactagtgccttgtctcctgggtgaggcttgtcattgggatggattcacaggcgagcagaaatggcaaaatttatggggcccgtgctcccagggggtggccgctccttcagggggttccacagtagcagaaaatgcattatattttgggatcatttgttagtgtctcatttctaccatctgtatgagaataaacagaagctgcaaacagagcctatcattcccggaacagaatggggtctggcttccatctcccagagatggaaggcttaggcagggaaatacacagaagcctctggagtgtttttcttggggtctactgtgggaatgaataacttggaggtgaaattacagcctgataacgagcatctaagcttccagagatggattcttacaccatttgctgaattttgctctgctgtgaatttgctgtcatttgttcattcatttattcacttagttattatttcaacaagtattattgatgatgctttctgcgccagaaatgatgtaagcactggggtcacccgggcaacaaccagccctgactgctgcttaccacctggaatcacagcgctgctggccgcgtggccacatggtttgttcccggcacagttttgctacaaggaataggtcttcctgctggccccttccctgttctccttagaggaggccaggggagacgtgcagctcatctacagggccctggagcggcctcctagcgtggcaggctgcagccctctctgcattgcaggttccattccagagggctgagagggagctctcttactgccactaggctccagtccagctcagagtttgggggatcagagaacattgaacacccacatgcgagaggtctcaggggctatttctgtgtctgggctcccatgcaggctaccgtggagttattcagggaacttcctaaacctggatctccatggggggtggagggtcctctgtgcaagncaatgaccctctnctgtgggctggtgtctgaaagcccaccgtgagaaagtcattccttctgctgaaggcgtcgttacctattggaccccagaaagggaaacaaagaaggaagggtgagaaagctttggtctagaaccctgggaccaggagtcgagccctggctccaatcctctccagctgtgtgaccttggggaggccatttagcctctctgagctttagtttcctcctgtcaaaatgaggatgtggtttagatgagcacagggcctccttcagctctaaaactgtaactcaatgtgattgagcctcagatctttttctgatggcccaggggacacggggtgaaggaaggagagaaaggatgtgagtgggaaggagtgctaagaggaccgggtatgggaggcacagtaggtagagcacagttagaggagcctgaggacaccaaataaaaactctggggcaagccagggagctatgggcagaggctttatgacagatgcagcaggcatgctgaggatgaaatggcgggtccacttcccattcccaggcacctcgctttagacaccttgctttagacaaagtgatggccagtggaaacctttgtgcttgagggtgcaagttactcacatgctttttctcttagagaaatagaacttattgggaaatagactctggacttggacagggaaccaaatttcaccttcaaaagtgaaatgtagatggagaatatggcttgcactcttggccaaaacaggttcacaaatgcccctctctggaatgatctagacctgggaagctgaatgggggcaggtggttgtgggtcaccctccaaggccactcctgcaggagacagagagcccaagaaccatgtggccatctgagtacattaactgcccaacggagaagtattgtccgatggacatcagatcttccctcttctgccaaatacatctctctccatgggaagagacaggtaaagatggaaggataggccaaagattttccctcaggagtgctaagccagcgaatattttgattttatggccctgggcagaaaggtgaaaagagggagaaatgatttcctttccaggactagaatctaagagcagttttgtactaacatgctacttaaaaggctgcttcaaagctaagactgcacatctgacctccatattcctagtgcctgctggcctatagtaggtggtcagtaactggatggatgggtaggtaggaggagccctttaagggactggctttattggcagaccagctttcttcactgccatctgtgccttgaaatgaccatttcttacccatgagcttcccccagtaaagggaaggaagaattcccttggtgttgacctgtctaatttacatccttcttccatgtctgaatctgtcttcccttgtacacctttttggttgggcagagctggaatatgtgtttgctctgagaatgaagagaacatggaggtagccgggcgcagtggctcacgcctataatcccagcactttgggaggccaaggtgggcagatcatttgaagccaggagttcaacaccagcctggctaacatgatgaactcctgtctctactaaaaatacaaaaattagctgggcgtggtggcaggtgccctgtaattccagctactcgtgaggctgagacaggagaattgcttgaacccaggaggcggaggttgcagtgagctgagatcgtgccactgcactgccagcctgggcaaaaaaaaaaaaaaaaaa

SEQ ID NO: 1907 - DNA, 2604 bp, Homo sapiens
  SITE (1286): n equals a,t,g, or c
  SITE (1350): n equals a,t,g, or c
  SITE (1369): n equals a,t,g, or c
gagctaatcccctataaatgattaataattctttacattaacatttcctcttcaaattactgtgttctttctgtctcctgactttgactgatactaggacaggaagccgaagaaagaattagtgttctgcatgggaccaagctcacacatgaacatcacttctcatcagcctcctcatcacaattttatgcttcttttagatatcatttttgttctagcatggattttgatgttgcttacaaacatttcctgagtacatattgtgtatttgagaactaatcataacatctaaaagcagtgcaaaatgagcaacacacatacacgtgtatgtgcacacacacacacacacacacgactactcctattgggagttgagacaacaggcttcaacatcaactgtgtccttaactagcactgagaatatcagagagaaagccctctgagcttttctctttgaggcttgatgagataaattgaagatattttctgctcaaaaaatcgataatatttgatttgagtggtgtgaatgtcaaacagcaaaatgttagtgaaacaaaaggacagttttgaaggctagccatggattctggggctggtgagaggcaccgtgagagacatatggagtgaccattgagagcaagaaaagatgttctgggctggaagttgttctccttgtgccaaatgcaaggaaatctatgaaaaccctctcaccacatagaagaagccattcttttctttttttcttttttttttgagacggagtctcgctctgtcacctagggtggagtgcagtggcgcgatcttggctcacggcaacctccgcctcccaggttcatgccattctcctccttcagcctcctgagtagctgggactacaggcacccggcactgcgccaggctacttttttgtattttcagtagagatgggatttcaccatgtgagccagggtggtctcgatctcatgaccttgtgatctgcccgccttggcctcccaaaatgttgggattacaagcatgagccaccatgcctggccagaagaagccattcttaggcaactacataacagacatatttttcaaagcaggaaaagatacacagaaacacgtggaagcaaatgtaaaaccataaatctacatagacatggtagatttttattttaaagtctgaattttgggcatttgcagattgaacaactgggaactttttctattaacagtcctgcattctataataaacagaccaatgggaattaaattaggttagtattcaaaaaaaaggtcagcangtgataaagagccagggcagctgtcaaatgaaaagacttggcgcaggtaactattctggatagntaatgtccttagacctagngactcacttctaacaaagacactgcagcaaaagtgataggctatcatttctgagattaagtttaaaaaggtgttgacttccaccatcgcacacacacactctctctctctcgatcactgtcatgctcattctgatgaagtcagctgctgtgttgtaagctgttgtatgaagggacacgtgtgacaagaaactgagagtagcttctgtccacactcagcaagatttgaggccctcagtctactattatgcagcactgaatcttccttagatccttcttcactcaagccttgagatgagaccacagcctctgccgatatcttgattccaaccttgtgagacaccttgagggacagacaccaaactaagctgtgcccaggttcctgacccacagatactgtgggataacacatttgctgtttaagtaactaagttttgtcacacagcaatagatacataaaagatgctgggtgcagtggctcatgcctgtgatcccagcactttgggaggacgaggtgggcagatcacttcaggccaggagtttgagaccagcctggctgacaaggcaaaaccctgtctctacaaaaatacaaaaattagctgggcatggtggcacatgcctcccagctacttgggaggctaaggcacaagaatcacttgaacctgggagacggaggttgcagtgagccaagattgagccactgcactctagcctgggtggcagagtgaggcactgtctcaaaaataaataaataagtaagcaaataaataaataaagagtatcgttacaccggttttctgtggctgctgtaacaaactaccacaaagttggtgggttaaaaccacagaaatttattttttcatggttatggaggccagatgtccaaaatcagtatcactaggctgaaattacggtgttagcaggaccacactccctctgcaggttccccctgccagctgctgacattccttcgctcgtgataacatcattgtagccttcgtggatggcacttttaaatctctgtctacccccatcttcacatggccccttcctgtgtgtgtgtgtgtgtgtgtgtgtgtgtgtgatctccctctgcctccctctttttttttttttttttttttttggagacggagtctcgctctgtcgcccaggctggagtgctggagtgcagtggcgcgatctcagctcacccaagtccgcctcccagattcacgccattctcctgcctcagcct

SEQ ID NO: 1908 - DNA, 3033 bp, Homo sapiens
ggcacgagttgctttcagcagcatggtcaccattttcaacatcatcaccaccaccaccatactccccacccagctgtcccagtttctccttcctttagtgatcctgcttgccctgtggaaagacctccacaagtacaagcaccttgtggagcaaatagtagttctggtaccagctatcatgaacagcaggcattgccagtggacctgagcaacagtggtatcagaagtcatggaagtggcagttttcatggagcatctgcatttgacccctgctgccctgtttcttcctcccgagctgcaatctttggccatcaggccgctgctgctgccccaagtcaacctttatcatcaatagatggctatggatcaagcatggttgcgcagccccagccccagccccctccacagccctctctctcatcatgtcgacattacatgccacccccttatgcctctttgacaaggccacttcatcatcaagcttctgcctgcccgcattctcatggaaacccccctcctcagactcagcctccgcctcaagtggattatgttattcctcatcctgtacatgctttccattctcaaatatcttctcatgcaacatctcatcctgtggcacccccaccaccaactcacttagccagtacagctgcaccaatccctcagcatcttcctcctacacaccagccaatttcgcaccatattccagccacagcacctccagcacagagactgcatcctcatgaagtgatgcagaggatggaagttcaaaggaggaggatgatgcagcatccaacgcgggcacatgaacgccccccaccccatccacataggatgcacccaaactatggtcatgggcatcatattcatgtgcctcagactatgtcctcacatcctcgacaggctccagagaggtctgcctgggaactgggaattgaagctggagtgactgcagctacttatacacctggtgcattgcatcctcacttggcccattatcacgcacctcctcgacttcatcacttacaattaggagctcttcctttaatggttcctgatatggcaggctatcctcacatccgttacatttcatcaggattggatggaacatcattcagaggtcctttcaggggcaattttgaggaactgattcatttggaagaaagattaggcaatgtcaatcgtggagcatcccaggggacaattgaaagatgtacatatccacataaatacaaaaaggtaacaactgattggttctcacagaggaaactgcactgcaaacaagatggggaagaagggactgaggaagacacagaggaaaaatgtactatctgtttgtctattttagaggaaggtgaagatgtgagacgtcttccatgtatgcaccttttccaccaagtgtgtgttgaccaatggttgattaccaataagaagtgccccatatgcagagtggacattgaggcccagctgccaagtgaaagttgacaccatgtttcagaactcttgccctccctctcattcccatccttcctggtactgcagtcaaccaaagatggcatgacttacctgcgcagatttggaagcattgaacttagagtgctggctctgctatatggtacaactaatgctagacctacagtttatgtatacagttgattttgatgtatttataaaagcttttttttctagatttgacatttttctgtatcattttactgtatttttgcatggttccttgtattgcatttctttgcacatattatgggcttgtgaccctaaacttgcaggcaaggttagctgctttagtaagtagaattttgtggtctttttgttttttacatagtaccaagccttgataattatgaattttttatccattactaacctttaatttaatcaatcatgtactttagtttaatgtataaagatcctctagaaaatgataatattgtgtattaagacattccttaattaggacaaaatggctgctgtatatttactatatggagttctgagttaaataccatccttaatactgggaacagaatacaacccatataaatcagatgcaggtggtagtcacatcaccagagtgatcagtataaattttcttggtgtatccttttcctttcaacacagtgcagataagagttgaatattgatatcatacatttagactgctgttctgattgcatttatctttttcctacatcatttagaattttatttccctgattcagtttttgctgctgtgaaacagctctgatgaacactaaatattaatttcaattagctagattgtacatacttgcagatttaacaaaattttagggaaattgaaaaagacatgtagaatttgttgtcttctgctaagcacgaaaagttaagatatctgcttacattgattttgtagacacattaagtcaagatttggaatttaagtcactggcaggtatctgtgcattcatagaacttataaaggtcccaggatcacttttaagggatttttattagtttaaaggtaaataaagtcagctgaatctacatgtctcttgttttatttctctctaaacttgaaaacagtaaatctgcagatactgtgaggcacaaattatactgtcaacctactgttgctatggttatatactcccacttcatacattaccaagagtcgatcactgatttaaaatttttaatttctatagttaagatttactgcataatatagaatataaagttaagttaacatactaacatttctcctttggaggaagttttaatctacttcaggatgcatattattatcaagatactttcatatacaggatagcctaattttatttgtttaaatatgcttaatatgccccagattgcaaatgcatccagtcagtaatatcactgtctgtatgtggaggacatgttcccatggatcatatgtgaagatgtcaataagcttgcattaagccacctgctttgtaagtggattgattaataaataacttatatttctattgtcaaaaaaaaaaaaaaaaa

SEQ ID NO: 1909 - DNA, 2003 bp, Homo sapiens
ggcacgagaagaaatcgccccgggacatggactcagtggtctttgaggatgtggctgtggacttcaccctggaggagtgggctttgctggattctgctcagagggacctctacagagatgtgatgctggagacctttcagaacctggcctcagtagatgatgaaactcaatttaaggccagtgggtcagtttctcagcaggatatttatggagagaaaatacccaaggaatctaaaatagccacgttcaccagaaatgtttcctgggcctctgttttaggaaaaatttgggacagtcttagcatcgaagatcaaaccacaaaccaggggagaaatctcagaaatcatgggttggagagactctgtgaaagtaatgatcaatgtggagaagccctcagccagattccacatcttaatctgtacaagaaaattccacctggagtaaaacagtatgaatacaacacgtacggaaaagtcttcatgcatcgccgcacatccctcaagagtcccatcacagttcacactggacacaaaccatatcagtgccaggaatgtgggcaggcctacagttgtcgttcacacctaagaatgcatgtgagaacccacaatggagagagaccctatgtgtgtaaattatgtgggaaaacctttcctcgtacttcctccctcaatcggcatgtaaggattcacactgctgagaaaacttacgaatgtaagcaatgtgggaaagcctttattgacttctcaagtcttactagtcatctcagaagtcacaccggagagaagccatataagtgtaaggaatgtgggaaagctttcagttattcctcaacgtttcgaagacacacaataacacacactggcgagaagccatataaatgtaaggaatgtgcggaagcctttagttattcctcaacttttcgaagacatatgatttcacacactggagagaagccacataaatgtaaagaatgtggggaggccttcagttattcttcggcttttcgaagacacatgataacacacactggagagaaaccctacgaatgcaaacaatgtgggaaaaccttcatttatctccagtcctttcgaagacatgaaaggattcacactggagagaaaccctacgaatgcaaacagtgtgggaagaccttcatttatccccagtcctttcgaagacatgaaaggactcatggtggagagaaaccctatgaatgcaaccagtgcgggaaagcattcagtcacccctcctcctttcgaggacacatgagggtgcacactggagagaaaccctatgagtgcaagcaatgtgggaaaactttcaattggcccatatctttacgaaaacatatgagaacacatactagagagaaaccctatgaatgtaagcagtgtgggaaagccttcagcttgtctgcttgctttcgagaacatgtgagaatgcaccctgaagacaaatcctatgaatgcaagctatgtgggaaagctttctattgccacatatccttacaaaaacatatgagaaggcataccgcagagaaactctataaatgcaagcagtgtgggaaagctttcagttggcctgaacttttgcaacaacatgtgagaacgcacactgtagagaagccctatgaatgtaaggaatgtgggaaggtcttcaaatggccatcatctttaccaatacatatgagactgcacactggagagaaaccttatcaatgtaagcattgtgggaaagcattcaattgttcctcatccttaaggcgacatgtgagaatacacactacagaaaaacagtataagtgtaatgtaggacatcctcctgcaaatgaattcatgtgcagtgcttcagaaaagtcacaccaggagagagatctgatcaaagttgtaaatatggtgttgcctttatgagttccttatcctgaaagtggacactcaaggagtgtgtctgtagttcatttgcaaataaacatttagttgaaaaataaaaaaaaaaaaaaaaaa

SEQ ID NO: 1910 - DNA, 1417 bp, Homo sapiens
gaattaatggaactcgcctatcagactttactagaggcaacaaccagtagtgatcaatgtgctgttcaacttttctactcagtgaggaatatcttccatttgttccatgatgttgtaccaacatatcacaaggagaaccttcaaaaacttccccagttggctgctattcatcacaacaactgtatgtacattgctcaccacttgctgaccctcgggcatcagttcagattgcgtcttgcccccattctttgtgatggcactgctacttttgtggatcttgtacckggcttcaggagacttgggacagaatgctttttggcccaaatgcgggcacagaaagtgaacttctggaaagattatcaagtgctaggaacttttcaaatatggacgatgaagagaattattctgcagcaagtaaagcagtccggcaggtactgcaccaactaaagagacttggaattgtgtggcaggatgtcctgccagtgaatatatattgcaaggctatggggactttactcaatacagcaatttctgaggtcattggcaaaattactgccctagaggacatatctactgaagatggtgataggttatattccttatgcaaaacagtgatggatgaaggaccccaagtatttgcacctttatctgaagaaagcaagaacaagaaatatcaagaagaggttccagtctatgtgccaaaatggatgccattcaaggaattgatgatgatgctacaagccagcttgcaagaaattggggatcggtgggcagatggaaaaggacccctggcagctgcgttctcttccagtgaagtaaaagctttaattcgtgccttgtttcagaacacagaaagaagagcagctgcccttgctaaaattaaatagctccatcttcttaagaaagctatgtcttgaatatgtggattcttcccttggcataattactcccttaaagacttctttgaatcgcccattggttttggtgaaccagtacatcttggaagtttgactttacagaagaacgtcttacctcctggcctgtacgaggctttgtttaagaactgtttattaagataaattgtcaagtaaagcacctcaattcattgactttctagccatcttcctttgattagctaacaaactgtcaggcagcattatttcatgctgcttccagagccctctgggagctatatacattgtaaatgcaggccctagctttggaacgaggaattgggagattccaggagtcagggtagagaatttctgagcaaatcggagatattttaggggtgtggaggaggggaagggaggaatgggccaccatatttggccttacaggaattaaggagacttcctgtaatatttctttccaataaatattgctttttacaaaaaaaaaaaaaaaaaactcgagg

SEQ ID NO: 1911 - DNA, 1146 bp, Homo sapiens
  SITE (1141): n equals a,t,g, or c
gcaggaaatgacctgattcctttctaatacttgctccacggggtctggtcagtcttcacagcaccaggcagacaaagggcctggaagtagaggcaggaggtcccagatctaccgacctgccaagtcacagcctctctgggctgctggagaatctgtaagcaagaccgaattgtaaaagtaaagcacagcacagctttgagacccagaagccgttgctgtgaacttactgtttttgagctgcattctggagaattgcagctccaagtttattttacccattatgtatcaaagaagaccccatatagttaatgttgccatccgcccttggacccgggtctcatgtttagaccctggcatgggctgctgcctggcagtcgtctcgtgccctgggggcttgttagacttgtgggagctcccaatccgtgtgcacactgatgtgtgacagcttgactgtagaggscccagctgtgccctccccacagggcagaggccgacccagascccacactctctggacctcactcctgtactctccamcctgggatttcctgctcaaagggaccaagcctgcttccaggacctgtattggcctcttcccccaagccatggtgccccaaccccaagggatggccaaagagtgactgggggagttggcaaggggctgttgcgggtgtggggtggagcttggacgtgagggcttgaaggtccttgcttgtgtgcacgagactcctcacattgcaggatggagttgtggggagggtggaaagagaagagtacagacactgtcggctacaagcgttctcttttacttgtcctgggtcctaaaattgtcagagtggcctatgcgattttataaaataatttttctaggtctgtgggaatctacaattccactgttaaggtgagagagggataattagaaagttttcttagaggaggggcattggagctgggttttgacagatgcgtaggagttcagtagtagaaacagagggaattaaaactatgtaaacaaaaatatggcagaagggaagtgaggtatttgtgggaaaagatgtgctttttgctacagtctccacagtttgggatcagatcacgagggtcttgaattccagatggggggtttggtgggagggagccntcgag

SEQ ID NO: 1912 - DNA, 1465 bp, Homo sapiens
ggcacgagggcagattgcccattacaaattatagatttcttatttctttggaaaaatgaagtctgaagcaccaagtacattattacttggcaacaaccaactgcagttgggtagcagccttctcctttaaacccgcacccacctggcttcttaatttatgttcatagcctgtcttctgcagtcattatgtatttgactgttctacaatctccgcttctcgctaagggaggacacaatctttctaccaattagaaatatctagctagggcttacaaatttcataattgattttagtcctgtctgctgaactacatttttaaaagatagaggacaagatacacaatatattatagacttcagccacattttcttctttgcatctccactaattcctattattgattttcctttgagcacattggtttgtgcgcctgaattataagtagtgacaggttgaacttcctccactcctgtatgtgtcagagttgcaattaacaatcatgtaggtcagataatagtgatgacaatataaaggaaaaaatacttcctcctaacttagtctcggaggttttctgtagtgaatatgttcctttacctacaaagaatatttgctttcaaaataatttctaataaatgtcatatgtcaactcactttccatgtaactatttctatttctagaaatctgtttaaggtcaagaactaacattagttactcttcttttataagcctctgtcgatggcgttcataaattctacaggtcttactaactttcagaataagttagcaatattttgaaatccattatagataatctgaaagrttaacatgccttacatctgaccataaatttgatactaatataaaattctattcaatctttcaggcccacagtacatttttaacttgtttcagaaaaaaatctggcccaggccagagtatgtgagtcacttgagataccttcctttactgacagcttttaagttatataccctrcaatctctagtacaaacatgcccttcctaattattttccccttgcccctcacatgaacctccttttcccttccaagatatatctcatattacctctttgtgatgttcagacattccctagcatttgtattctcacccctttccagtctattcaaatcctacccaagtttcatggaccttctgaaatgcacgtcctccataaaattattcctgctcactctacctctctgattcaatcatctggcaaatatcatgtgctagattgaaatattatttatcttatcaagtcaatatgktttaatacctttagcaatatgcttacaaaaatgtcctatattccatgkgtttttwaatccaataaattacytttcataagaaaaactcwtaaatattcatcagtggctaacctagttctgagatctaatagcttaaatcaaagatccagtatcatcaaattttctctctctcgag

SEQ ID NO: 1913 - DNA, 1817 bp, Homo sapiens
  SITE (1796): n equals a,t,g, or c
  SITE (1797): n equals a,t,g, or c
ggcacgagggattattacatgccgataaggtatgaattggagatgggatccaaaattactgtacttagtgtaatttttaagctaattacagggttggtggtgaatattttacttctgcaaaatgaaaacagcatttcatcagaagttgttttatggtctttcagacattttattgtatatctttggtgctttttgcccatgaagtatctcttttgtgtgtttgtgtgtatgtgtattgatctgctgtaaatttcacagcactcattgtcagggatcagcagaatcaggcctaggcagagagctgagcagtactctcagtacgtctctgtgtccttgttgccacattatctctgttgtttatttataagttggagaactctctgacctgtaacaaaggttggataggtcagagacaattgggagaggaatcctctgctctattgtcacctgtgcctcactccaaaatatgctctgaaatcaatatttaaatattaaatttgtatggtgaatgtatycttttttaawgttaattaaakgattggtcagcccacttaatatttacaatgcaggacttactttgcgtattctctgtcttgtatttttgctttatttaagctaggctagcctccaagctggaagctgaattgmcagttgaaaaataatgmcatgtatmcaaggtatgtttgaaggattgcagatgcaggggcaccatatgctaaaggagtgttggaagctcactgcagaagatgacaaaagcagactgatatgtattatttgctgaaatataagctggaggcacaggtgaagattgccaaacctaatgaacagtttggcaaataagacaggctgtcaggccatggcagttcamcagtgggcgtgctgcctgtgaaccaagtcatttgttccagaggactacacttaaataccacaaataaaatcttccttgtcactgatatcacagtgaaatagatgttgtctttcagatttctggttgaattaccagccattaacatctggtgatttgggttgtaaaattatttttagttttgcctgttcatatttcatccagaaagcccaaacaagatatattttcccacataagaatgtaagcagtataatgccccgtccgggagggaggcggggggcagcccccrccyggccagccgccccktccgggaggtgaggggcgcctctgccyggcygcccctactgggaagtgaggagcccctctgcccggccaccaccccgtctgggaggtgtacccaacagctcattgagaacgggccatgatgacaatggcggttttgtggaatagaaaggggggaaaggtggggaaaagattgagaaatcggatggttgccgtgtctgtgtagaaagaagtagacatgggagacttttcattttgttctgtactaagaaaaattcttctgccttgggatcctgttgatctgtgaccttacccccaaccctgtgctctctgaaacatgtgctgtgtccactcagggttaaatggattaagggcggtgcaagatgtgctttgttaaacagatgcttgaaggcagcatgctcgttaagagtcatcaccactccctaatctcaagtacccagggacacaaacactgcggaaggccgcagggtcctctgcctaggaaaaccagagacctttgttcacttgtttatctgctgaccttccctccactattgtcctatgaccctgccaaatccccctctgcgagaaacacccaagaatgatcaataaaaaaawaaaaaaaaaaaaaaaaaaaaaaaaaaatgtnnaaaaaaaaaaaaaagggggg

SEQ ID NO: 1914 - DNA, 1953 bp, Homo sapiens
  SITE (1362): n equals a,t,g, or c
tttttttttttttttttttttttttttcaccaatgaaaacatttttttaaaattaacagacatcaactggtataaatacactgtctaaagcatttaatggtctttctttaacacagccaactcccccgggtttgaaacagtgttaaattctctcttgcttgtggcaaaagaagctgtcaagtccaacactgaaaaattggtaccatttcctggccagtaagcacagaacagaggggctaaatattttatggttttattyatttactgtgttctcatgctgtgtttttcttttctctgtctctccctcctgctcgtgtctgcccagggctgattgttgtgacattggccgtatgctggatgcccaaccagattcggaggatcatggctgcggccaaacccaagcacgactggacgaggtcctacttccgggcgtacatgatcctcctccccttctcggagacgtttttctacctcagctcggtcatcaacccgctcctgtacacggtgtcctcgcagcagtttcggcgggtgttcgtgcaggtgctgtgctgccgcctgtcgctgcagcacgccaaccacgagaagcgcctgcgcgtacatgcgcactccaccaccgacagcgcccgctttgtgcagcgcccgttgctcttcgcgtcccggcgccagtcctctgcaaggagaactgagaagattttcttaagcacttttcagagcgaggccgagccccagtctaagtcccagtcattgagtctcgagtcactagagcccaactcaggcgcgaaaccagccaattctgctgcagagaatggttttcaggagcatgaagtttgaatgtcaagcgagggagccttgagtgggaactggccctccagccctaagaaaacgtcactctcactctgcagtctcaaactatgcccccatcagggatggaatggacactggaggctttacaaaaggcagatgcccacctcagtgacttctaaggactgactctgccagcctggccttgactccggttacacagacatgggggtgaactttcactccacctccttccttcaagtacatactgaaaattcagtcargctgaatttattcagaatgctttaccgagctctttcattatttgcacaggaacaaaagagaacacggactcccgctccctacccagaataaaaggacacccagaagaaactcactcagggaggtggggggttgggggcgagggctggaagaacaatgcaggagggggtggcatctccttcagcttcagcagtgtgccgagaagagggctaatttgaggaacaggatggtggtgcggagccctgcctgagggccgaggcagaacttccccttttcttnggccttggcccgttacaaagaggggtgttgcagcagctgatgcaaactgagttcagtttccctggggagcagaaggactggtacccggcagaggcgatgagacaggccgctgatgatgcacaggacttgcggtacatgatcccggcactttgctccatcacttctttctgacacatgtcttgaacgttcaccgtgcaattcacaatgaactcgggggaggagcagtcgttgttcagctggaattcttcacactggtagcactggatttgcagcgcaaagcctggaagcaagaacaatccgcaaaaagttgccgcgatgcctaggacccacattctcccggagtcccggggccgggagagggcaagcgcatcagaggaggcgacagcagcggaggctgccccggctgcagcggctgtggctgccgaggctgctggggcccgcgctgctgccgcggagacgacggtcgtagcttagaggagccgcaggtgccgctcgcggagcctgcatcgcccgcgctcgggctcccggctgcgggtctctgctcctcccgctcgcgctcccgggccgagcaccgcgcctccggagttggcg

SEQ ID NO: 1915 - DNA, 1956 bp, Homo sapiens
  SITE (1362): n equals a,t,g, or c
tttttttttttttttttttttttttttcaccaatgaaaacatttttttaaaattaacagacatcaactggtataaatacactgtctaaagcatttaatggtctttctttaacacagccaactcccccgggtttgaaacagtgttaaattctctcttgcttgtggcaaaagaagctgtcaagtccaacactgaaaaattggtaccatttcctggccagtaagcacagaacagaggggctaaatattttatggttttattyatttactgtgttctcatgctgtgtttttcttttctctgtctctccctcctgctcgtgtctgcccagggctgattgttgtgacattggccgtatgctggatgcccaaccagattcggaggatcatggctgcggccaaacccaagcacgactggacgaggtcctacttccgggcgtacatgatcctcctccccttctcggagacgtttttctacctcagctcggtcatcaacccgctcctgtacacggtgtcctcgcagcagtttcggcgggtgttcgtgcaggtgctgtgctgccgcctgtcgctgcagcacgccaaccacgagaagcgcctgcgcgtacatgcgcactccaccaccgacagcgcccgctttgtgcagcgcccgttgctcttcgcgtcccggcgccagtcctctgcaaggagaactgagaagattttcttaagcacttttcagagcgaggccgagccccagtctaagtcccagtcattgagtctcgagtcactagagcccaactcaggcgcgaaaccagccaattctgctgcagagaatggttttcaggagcatgaagtttgaatgtcaagcgagggagccttgagtgggaactggccctccagccctaagaaaacgtcactctcactctgcagtctcaaactatgcccccatcagggatggaatggacactggaggctttacaaaaggcagatgcccacctcagtgacttctaaggactgactctgccagcctggccttgactccggttacacagacatgggggtgaactttcactccacctccttccttcaagtacatactgaaaattcagtcargctgaatttattcagaatgctttaccgagctctttcattatttgcacaggaacaaaagagaacacggactcccgctccctacccagaataaaaggacacccagaagaaactcactcagggaggtggggggttgggggcgagggctggaagaacaatgcaggagggggtggcatctccttcagcttcagcagtgtgccgagaagagggctaatttgaggaacaggatggtggtgcggagccctgcctgagggccgaggcagaacttccccttttcttnggccttggcccgttacaaagaggggtgttgcagcagctgatgcaaactgagttcagtttccctggggagcagaaggactggtacccggcagaggcgatgagacaggccgctgatgatgcacaggacttgcggtacatgatcccggcactttgctccatcacttctttctgacacatgtcttgaacgttcaccgtgcaattcacaatgaactcgggggaggagcagtcgttgttcagctggaattcttcacactggtagcactggatttgcagcgcaaagcctggaagcaagaacaatccgcaaaaagttgccgcgatgcctaggacccacattctcccggagtcccggggccgggagagggcaagcgcatcagaggaggcgacagcagcggaggctgccccggctgcagcggctgtggctgccgaggctgctggggcccgcgctgctgccgcggagacgacggtcgtagcttagaggagccgcaggtgccgctcgcggagcctgcatcgcccgcgctcgggctcccggctgcgggtctctgctcctcccgctcgcgctcccgggccgagcaccgcgcctccggacggcacgagc

SEQ ID NO: 1916 - DNA, 4161 bp, Homo sapiens
atagatttttgtctttcaataaaactttttactttttctctatatttcaactaaatgtcttcaatatgccctatttttgtgctattgcaaatgatatcctttatgacacttattgctttggaatagaaattataaattgatcttctattcaccagtgttattcaactagtattaattcttgttgtttttctgttgccatcctcaagtaatggcagtttattactttttccctaatttcttattaatacaatcttgtaccagcaagagtctcatagccaatgctggattatgtagtgatgatgtctgttttgatcctgatttaaaagcaatgtttctgagaactcttctttacatgtatttagccattgattttggatagtctttatcagattcacttttgtttctgtatctcattttctaagactaattatgaataggttttgatttttaaaacaaataaattgaaaatatctattgagatatttttctgctttaatctgctaatgtggtcaattgtgtcgatattcttatctctaaaacattttgtattcattggacaaatcttagtcatgatgtatttttaaaataaatcaatagatacttttgccaaaactggtttaaaatttttgattccatgttcatgcataaaatcatttggtgattattccccatttttcttttctctgagagagtttgtataaagatagaattatatgttttccaaaattttagtagaacatctccagtatctccccttctcgcagaactcttaaccctattttttaaatcctatgtcgtactaagagagtatagatgtgtgcttctggaactaacatttcccttgaaggatatttccactgttttattaatcctttgtttcttctattatatacatctttttttcaaaaccacatatattatcatttctgatagtctgttattatctccactaccttattttgcttaccttgctgtaacagaatacatgagactgtgtatttataaaagaaacaagtttatttggctcatggttgtggaaactgggcagtcttaagagtatggctgtagcctctggtgagggtttgaattacatcataacatggcagaggagaagagaaagcaggcagatgcgaaaggggcaccaatgaggtagttaatccagtcctgagagaatgagaactcactcccaccagaactaacccaatctcctaagagtagcattcattccttgtaaccacctaatcaccttttaaaggccttgtctcccaagcaccaccacaccaatgaccaaatttttaacaccaaggattctgggtaataactcaaaccacagcattcattctgccttccctttattctatcttaagatctaatttgtttggttatttatttattggggggagcaataaagacatttcttaaatatttcccttccatcaaactcatcctaatttcaagtagtgccagaatgtctctgggattgggagaatcaggccaagaggaagttgagttgggtacatgtagtttgggattaataggatacaattaattagcttaaacagtcaatttcatttaagttatgttattgctacacaccctggtgtatgactagccccccagtatactgctaccagtgattgtgcccatctactcatcattgtaagtcaaaggtgcgagttcacaagttattctatgaagtgaatgttcccttcagcaactggcactgggggcatgttagcagtgagagaaaagcaatatttaaaagcacagagcaagaaattgatctgttagaaattattcccatcattaggtaggtaaaattataattaaatgtctttgtttctcctgaatacctaggaaaaaatgaagagttgttttcccagaattatagaagtatatccagtaaagcaattatagatacaccatacttttttactgttgggaattacacaaaatagagttgactaatctctgtgctttagtgcacagatctgtagtgagactagaaagagtcatacatttgcatgagaatatgtgtgttgaatgtaccccaacgtatgagattgtattttagcaagtgacatattttgtcttgttgaagtctaattgtcccgaacagagtggatttctagaatgccacccacatagtaaactggcctaaagataaatgatttctagtgaccaaaatctaatgtataccaattagtgagtcaatgtgaaaaaggagtaacttgattatacaatctgcagttattagaatgtagaagcaatttcaaaatgcacttaaattgcctgtgtatgtgttaatttcaggttaaatttgtatgtgactttttcataattattcatcataccaaaatgcgaatgtaatagaaagccaagaatttactccagaaaagaaaccttgtacctttaaaatatcaaatcattctagtttttcacaatgagtgctagttatccacaacttttgatgctgtaagaaactcaaacttaggtttccattccaagatggctgaataggaccagctccagtctgcagctcccagcgtgatcgatgcagaagacaggtgatttctgcatttacaactgaggtacctggttcatttcactgggactggttggacagtgggtgcagcccacggagggcaagccaaagcagggcggggcattgcctcacctgagaaatgcaaggggtcaagggatttccctttcctagccaagggaagctgtgacagactacctggaagaacgggacactcacgcccaaatactgcacttttcccacagtcttagcaactggcagaccaggagattttctcccatgcctggttcggcaggtccaatgcccacagagccttgctcactgctactgcagaagtctgagatttaccagcaaggctgcagcctgtctaggggaggggcatccaccattgctgaggcttgagtaggtaaacaaagtggccgggaagcttgaactggggcagagcccactgcagctcaacaaggcctactgcctctatagacaccacctctgtgggcagggcatacctgaacaaaaggcagcagaaacttctgcagacttaaacgtccctgtctgacagctctgaagagagcagtggttctcccagcatggtgtctgagctctgagaacagacagactggctcctcaattgggtccctgacccctgtgtagcctaactgggagacacctcccagtaggggccgacagacacctcatacaggtgggtgcccctctgggatgaagcttccagaggaaggatcaggcagcaatatttgctgttctgcaatatttgctgttctgcagccaccactggtgatacccatgcaaacagggtatggagtggacctccagcaaactccaacagatctgcagctgagggactgactattagaaggaaaactacaacagaaaggaatagcatcaacatcaatgaaaaggacatctacaccaaaaccccatctgtaggtcaccagcatcaaagatcaaaggtagataaaaccacaaagatggggagaaaccagagcagaaaagctgaaaattctaaaaaccagagtgcctcttctcctccaaaggatcacagctccttgccagcaaaggaacaaagctagagggagaatgactttgatgagttgacagaagtaggcttcagaaggttggtaataccaaacttctcctagctaaagaagcatgttctaacccattacaaggaagctaaaaaccttgaaaaaaggttagatgaatggctaactagaataaacagtgtagagaagaccttaaatgacctgatggagctgaaaaccatggcaagagaacttcatgatgcatgcacaagcttcaatagctgatttgatcaagtggaagaaagagtatcagtgattgaatatcaaattaatgaaataaagtgagaagacaagtttagaaaaaaaaagggtaaaaagaaacaaacaaagcctccaagaaatatgggactatgtgaaaagacaaaatctacgtttgattggtgtacctgaaagcaatggggagaatggaaccaagttgaaaaacagtcttcaggatatcatccaggggaacttccccaacctagcaaggcaggccaacattcaaattcaggaaacacagagaacaccacgaaggtactc

SEQ ID NO: 1917 - DNA, 1211 bp, Homo sapiens
gaattcggcacgaggtgagctgacaccactccactgcactccagtctgggcgacagagtgagactccatctcaaaaaaataattaatatatgtgtgtatatgcatacatatatacttgtgtgtatatgcatacatatatacttgtgtgtatatgcatacatatatacttgtatgtgtatgtacatatgcatacatatatacttgtatgtgtatgtacatatgcatacatacatatatacacacacgtacacacatgcatatttcttctctcaacttggcaagggcaggatttgcagattataacctagatctcattcatgctgcattttttcactcaccctattgttctagttttcttggattccaacctgggcttatctccaatctgcatttttttttgtttctcctccctagctgaatatatttgtggaaaactcacaaagcaactgggttgccaggtctggtctctatcttcctgtccagtgaaaagaaaatgacatttagaaaacctagtcacaaatgtctgtttaataaattttgtttgttgccctgaaactggattttaatatttctgaatattcagtgcctggaagctagcacaaaatggctatctaaaactgccagaaatttgctttatgtggttcttaatgtgaaactggaaatgcaccttctggatggtgtcacttcttttgagagggatcgctttggtggggtattatggttgtgtctacttatattaagtaactactcactgcccctgaggtgtctcaggacttgggataaataatctaaaagcaaatactttataatggaatatcatgtattctgtttaataatataaaagtgtgtcccaacatattcagtgaggaacatctctgtagaattattttttttctttaacgaagtgtttagtattttctctggcagacctggacacagggtttgagcctagtaggttgagtctgagactgacggatcaaacagatgagagaaaggacttatactggaggataataggctttgaaggttcaaatctttaattagacagtctagtgtttgggatgtatttccaggggtaggggggcctaccattgagacattagttagcttactaatgtccttgggcacgctctatgcacgagtcagccaaattgttgtttgaaatttctgctgtagctctgtagaaaactgaggggcaatgcattttccat

SEQ ID NO: 1918 - DNA, 1703 bp, Homo sapiens
ggcacgaggaaagttaagcaactacaggaaatggctttgggagttccaatatcagtctatcttttattcaacgcaatgacagcactgaccgaagaggcagccgtgactgtaacacctccaatcacagcccagcaaggtaactggacagttaacaaaacagaagctgacaacatagaaggacccatagccttgaagttctcacacctttgcctggaagatcataacagttactgcatcaacggtgcttgtgcattccaccatgagctagagaaagccatctgcaggtgttttactggttatactggagaaaggtgtctaaaattgaaatcgccttacaatgtctgttctggagaaagacgaccactgtgaggcctttgtgaagaattttcatcaaggcatctgtagagatcagtgagcccaaaattaaagttttcagatgaaacaacaaaacttgtcaagctgactagactcgaaaataatgaaagttgggatcacaatgaaatgagaagataaaattcagcgttggcctttagactttgccatccttaaggagtgatggaagccaagtgaacaagcctcagtgacacaagtcaaattcatagtttcactctgggttttttgttgttgtgtggttattattctcactacagaaagactgagtttcatgctcctggctatgtcagatgtgaattttcatgggaataataatcaaccttgcagcaagccaaagcaatgcctcgcttgggttcttcatgttcttactacccagcgttttttaccacctagatgggcctctctaagtctatttgctcaatgaaccttatcccaaacttgttgttttcatggtgtctgaaagaatgtgagtcagcttttagaatgaaatcagtgttaaggtacctccagtgaaccaaacatgtgtttaaattaagccactgaaaacagaagggaatgtccaaggcaaatacaaatcatacacagcttgtaacaacatacagccttttatgtgaaataatggaataaactaaagagtttctgaagactgaagctatctggatatcaagtctggagtaggcaaagcatttccatttctacatggattataaaactttgtgttggactccattggtccctaatgcttttgttcatcacttctccagttatcaatggaattacctggtgaccattcatttggaccgaaatcctggaagtctcctactgaataaaagtctacaattggccctaaaatagaaactgaaaaacaggacatagaattttttcaccagaccacagcatgtggaaactttctttatcatttttgaacacttgttaacagatttgcacatagagggagagaaaaaaaatggagtaacagtcaaaataataataatcagtatccaggccaggcgtggtggttcacgcctgtaatcctagcactttgggaggccgaggcggatggagcacctgaggtcaggagtttgagaccagcctggccaacatggtgaaaccctgtctctactaaaaatacaaaaattagctgggcgtggtggtgcatgcctgtaatcccagctactccagaggctgacacaggacaatcacttgaacccaggaggcagaggttgtagtgagccgagatggcaaccctgcactccaacctgggtgacaagagcgaaactccatctcaaaaaaaaaaaaaaaaaaaaaaa

SEQ ID NO: 1919 - DNA, 3121 bp, Homo sapiens
cggcacgagctcgtgccgcttcaactttcttctgaggaatggatgattctagagttttcccagctgggcttcattggtaagaaaagtgtcacacttacctacttttcataaataactgtgactctcagaatctaaaaccaagtagctacttgtcctaaagatgtctttttttcctatggaaatgggttgttttagagaaaacttaagttaggtaaacctctttgtatgacatgatgaaagtcaacccagaatagaatttggagacttctaagattattgtatttactgtagcgttcttcacaatgccaaccgtggtgctggtgagcatgtttgattttttcttctctggcatttccagctcctttgttaacataagattgcagttcttttaaaaacaataccacaaagagttttctcatataaattcctagtattttcatgcaatgcatgaagtcctaattcagtgattaatttttattcgtttttctcttaactagttggggcactcatttctaaatggtttttggctgatgtttcaaaattagccagcttaagaatatgtttaaagttagccaggcgcagtggctcacgcctgtaatcccagcactttgggaggccgaggcgggtggatcacctgagctcagaagttcaagaccagtctggccaacatggtgaaaccctgtctctactaaaaatacaaaaattagcctggcatggtggcagacgcctgtaatcctagctccccgggaggctgaggcaagataattgcttgaacgggggaggtggaggttgtagtgagctgagatcgcgcccctgcattccagccttggggacgagagtgagactcaatctaaaaaaaaaaaagagtatgtttaaagttgaagaattgaaggaaatttacagggttcaaataatattgagaggttaacatttcatctcctatggtactttttaacactttaagcatttagaggctggacctttgacaatcttgatcatttaactcaaaacttaaaagtcaaaaaccatctttacttgcaaatgctttagtgaaaacaaaattaggagtccttattttttgcatttattgattcagataaaattttttacctaaacctctcaatgttaaatgggaagaatcttagtaagacacgaagggaaaatctctgacttgctttttgaatgctttgggccagtaggtatacgatagattattatagtaacatcgggaatttactatatctgtttacacccaggtgacagctcaagagaaagtttagccgaagcaactttgtttaattttgataatacaagtggggaaattgtttatgatgatttatagttgaaagcgcaagcctcagtgtatgtcgtgggcaagatttcatgaatgtaagccattttggtgcttggtttcttcattgcagctattgactgggaatatcttttcaggtaaaatgtttcaagcgccggatcttactctgattgtagaattcatattcatgttttacaaggagaaacccattgattggctcctggaccatattctctgggtgaaagtctgcaaccctgaaaaagatgcagtaagttaattcctcaccagagtggagggagtttcacttctgtatttcgtgaaagtgacttttagagattttgcaaataaatagttaaataggtaggtgatataaaacttctttcctgagctgataaaaagtttctatattagaagaacttttagatagcagtggaagatcctgtaaagcaggaagctgttacaagatgacgtacattctttaaattgctgataaatgtttctagtgtttgtaagccctggtggtttactaacattggatgtagatgttggtcatatctgttcttggcatgggataccatttcagtttgttttcttcatatttcctgttcactctctttttccttgtatactggggacgatattagaccctaacacatctgtaaatgaggaataaaatagaagtaatattttataccaaaacaatgagacgttaaagtacctttcagcgtgttacaaaaagccagtgttcataataatatgattacctttgggataatagttgcagtcaagtaagtgaataataatttttgctttgatcattcagatagcatgttattaccatagagatcttattgttaagagtaattaggccaggtacagtggttcacgcctgtaatcccagcaccttgggagcccaagactggaggatcacttgagcccagaagttcaggacaagcctgggcaacatatcaagacccatctttacaaaaaaacaatgatttttttttaaaaagagtaattaggtatgttttccttgtccaatttgaattgtgtctctgaaaaaaaactatagcttttaatttatttgatgtaagcataaacaatatgtaaaagtacaaattctttaaaatgtccattttgatgtgtaatgataagtattactgtaagaacatgtcattatagagttgacttaccattcattgtaacaaataagcattagtttgacttcatgaccttctactccctagaatagttggatcctcatacctgctaggttttaggatactaccttctggtgtctgtaggctatcattgcattctgtttaaaaaaaaccacaaaaattttaaaaaaccccaacacattcttagttagaggaaatcatggaatctagcaatggcagagtatctgttttccgacaattagttgaacatataaattgttttaaacaaatcattttttagagatctcagtccttatgcacattttcactgtgacttatagaaatttttattgtaggacacagaaaaagttaacgtcatctttaacctcctacaatacacttgcattccattcgtcctgtgcaattttatttaatatgtggttaggttctaaaatgagcctgtgaggtgaaaacatctatagtagaaattaaaaccacaaaaaccctctaaatcctccataaatttgggtacatgaacttttggacgatttcatccattccttcactcttctgtagtccatgtttttgtgtggcctctaattcttcagttgcttcccctagaatctcgagggggggcccggtacccaat

SEQ ID NO: 1920 - DNA, 1501 bp, Homo sapiens
gcagtcagggctctggccagccctcatggttcaattacataaaacagcaaatggcatttcctgttgtccaaattattacataccgtactaaaaacactaatttttacattatatcttttccactctttagaccccaaccaataattatctcaatcacattttaactaaagaggggaaaaggcacatggttactcatgcagttggtttatgtgttgtggttattaataatcaaagtcaccaaaggcaaagtggaaaaaataacagctatgcaatcaagaacagagaaagaagcaagctcaatatagtttccaataaaccttaaaattgggctttgcaaatattaacaaaatatgagaactaaatgatgtgattgtttgtctcttttttatctaaagtggaccagagaaagttttgtgcagcgcagcaagacttcttcatcctgattgaatacagggtcacacaacccagaactcatttctgtgtatgatttctctttaagtgtcttgccctgtaaccctccctctcccagatattttagttgcaaattgagctcttttctaaaattgacaaaaataaaatattaataaactttcaactactggaactataaagaaaaagcatgacgtgtgatattggtggaaggtagagctcattcctcaggcatccatcatggtgccaggcttttcaacagcctgaatgcagaattcttagatcatttcaaacttacaatcttggcaatgacatgacagctggtgcacgtggcatattaattcagcaaacatcaatgccaactgtgtgccccatggatcaactcaccaccttttcttcaacaaagcagcagctgtctggtttttaaatgcttagttacaggggaaaggggtaatattagacatacttatggaagcataaaatcatgtatataagcacgaattgatgtgaccatcgtgatggaataaatttgcataatcaaatcattccgaacaattatttaactctttactagttaacttttagtccttacagtttgaaaatgtaattataaacaaaatctcctcctaacccrgaaatgttcacaaaagtggaagaaacagaaagctatttttattgcataagcattaaattagaattcaatgcacatcacatgcattttgctaagagattacaaagcagaaagaaatcttaccaagcagaaacaaatcattacatacatgctctcaagacaaactataactagtcctcatgtaagaggacatgatggcacagtttgtcacacrgaattcattctaaattcatttggtaattgggtgaccatcttgttagctaattgactttatccaaaggaaaaataaatttctaatatctttatcacaggaggcagttttgcaacttggagcaaggcatctaccaaagataagcttctcccctcccactgaaactggtagatagggatgctgtcttccttaatgattgcatttcaaagaaatagttcccaggtcctcga

SEQ ID NO: 1921 - DNA, 2203 bp, Homo sapiens
gtttctgcctctccccactagaaggtaagctcaatgaatgcagtgaccttgcctattttgttcacttttgtaagtccagtacctatagtggtgcatggggcagagtggccattcaataaatatttgctaaataaatgaacagtttgagtataaatcctataaagcatatccagctacttgaggaggagatataaagcagtgactgtagagccctccatttaactacaaacaaaagcaaagctactgttcatcaaggatcaattttgaaattcccagccagctttttttttttgtcatatgcaagtgacgataattaatggcttaaagtagggtgctatagcaggaagggaatgaataaaatgtactaaggctcctatacacgatcagattatagctattatggatattaatatatgtatactatacgtactcttagacgagatcgggcgcattcagggtggtatggccgtagacattatatatacttttaaaatgaaaacaaaaagctaataaaataattatggtcccagaatctctttaaaggccaggcctggtggttcatgcctgtaatctcaacactttgggaggccaaggtggaaggatcccctgagcctgggagtttgagaccaggctaggcaacagagtgagcccttgtctttacaaaaaaatttaaaaataagctggttatggtggcatgtgcctgtggtcctagccacttgggaggctgcggtgggagatttccttgagcccaggaggttaaggtgcagtgaactgtgattgcaccactgcacttcagccttagcaatagagatctgtctcaaaggaaaaaaaacataaccctttaaggataagattccatggatataggcagattaattgggacagaaccaataaaattctagattcttactagagtatcataaacctacaagtattccctcaacaacatggcacacatgtaataaatcactattgataatggaaaccgcaaatattttaatttttctgctacactattagtgagttattgctgctttgtccttcacacattaattatctgctggtgtaacactctgaatccagctactatgtaaccttcactcaatgatgtaaaatctcatgattgtttttgtgttttcaggatgtttccctacccagaacacaatttttgtagaagaaagaaaatgatctgcttatttactttaatatggagatagtttggtttacaaagcaagtgataacatacttccccatgatcttttacattttcacaatagttatagtcctttgatttctatttgtatttcacattggtcttgtccccattgttatactataaatgccttaaaaacagagactaacccacttattctttaatttcccaggtcaagtgaaatgtggctggtacaaagtaagcatttaacaaatattttcaaatctgaattaaatatatcattcattcaaaaaacattaaaaagttatggctaggtgtggtggctcagggctgtaatcccagcactttgggaggctgaggcaggaggatcgcttgagcccaggagtttgagaccagactcgccaacatggcaaaaccctgtctctacaaaaaatacaaaaattagccgagcatggtggtgtgcacctgtagtctcagctgctcaggaagctgaggtgggaggatcctcctccgggaggtggaggctacagtgagccaagactataccactgcactccagcctgggtgacaagagtgagaacctgtgtctaagaaaaaaaaagttattattatgctattcatcaaggttatcatcatgaaggttatgagcctggtatttagaaagattatactccagtagggaaaactgatatccatatactaccatgtgttaagggatataatagaaggatgcccatagtatcagtcatgtagccttgatgaattcagcctggaccagagatgacatcaagacccctgtgctgagttttgaggagtcaagagttaatcaggcagagtaaaagaggcagtggatggtgagaaagttctaggataaggaaatatatgtcagaggaggtaatattttaagaactaggagattaactggatgtgggtgaaggaattgggaaaagagtagacaactcctagatttataatttgagcaattaactggtagtagacgatggctattaactaaaaaaaaaaaaaaaa

SEQ ID NO: 1922 - DNA, 2971 bp, Homo sapiens
ggaattcggcacgagctggttatagtttttaataaagaaagatcctcagaatgaaaaatagagttataataaacttatctaaaataatctacctttgggttcctttttgccttggggcctcttgtcttaggtcaagaacctgagagtccccaggctctgtccggggtcctcagagggaccatacctgttcacactgttggactctgcacacagttgtgttaagcagtgaattctgtggctttaagaagtctttgaaaatcactaacctggtgacggcctgtgccactgtcatcatcgaaatcagagtgtgtctcctgtgagctttattgtacatacagcgtacagggccaggcttgagaaagacagatctgctatactcatctcccctgcagaggacaccatggaatccgcattctccaaggccacatgttctgcccagtgcctcctgtcaccatgactgtaaccatctttcctctttttacctgtttgtttgaatgtagatttcatttgtgttgtatatgttcttatgcaggaaatattacctcctggttctcacacaggcttttctggattacatttgccattcattggttttacattcacaacggaaaggtatgtctggatttatcattccccagggagacacttcccctgtggtagatgaacagtcagacaccacagtctgtccctgggggcgggctagtgggtggtgtgtgcgctgggaggccattacttaagggagatggagatgggtttttggtcttaaaatatgcacacctgatgactacaggggataccatagcaaggttgcaggctttttctctacagatatccaggtcgtaaagaattcaggtttcatggcctttgttgtatgttcttctttttacaaccctttaaaaatgttaaaaccattcatgctcgtgatggtgcagaaacaggcctcgggcaggatttctcccagaggccaggggggtgagatttctcccagaggccgtagtttgccaacccctgaccaataggccgccagcattggcagggttagctctgatccagtcggtggccacagcaagcagagcagttgccatgcgcactcagctgagagctggcttccatcagagcactctgctggcttttgtaaggattgtgtgttgtgggcccctgtcccaaatgggcctctttgcaaagttgtgtcgcctgagatggtccacctcgattttaaaaggaaactggggccaagaggagaggggttaggaagaaagagaggtgaaatgagacaatggaagctcccactgtgccacagaatctgattcctggcgtcctctggcagctggaaccacagttgaaaatgtcttgggagggagatatccccatgcttctttttttttttttttttttttggagacggagtctcgctctgtcgcccaggctggagtgcagaggcacgatctcagcttactgcaacttctgcctcccgggttcaagcgattcccctgccgcagcctcctgagtagctgggactacaggcgcccgccaccacgcccgactaattttttttattttagtagagagagggtttcaccatattggccagatggtctcgatctcctgacctcgtgatctccccgcctcggcctcccaaagtgtcaggattacaggcgtgagccaccgcgcccggctgatatccccatacttctgctcgagcttggaagaaatctcttttggtgtgagaggccagggttaaacagcccataagccaaagtggcagctgctgtcttccagcccacaggaggctttctgggtgggcatattgatttaccagcccccagtgcagaggttcttgatctttctaatacatgccagctcaccaaatgcttgtcacacttgcaggtcccaagcccatggctgtagtttggccagataggcctagagctctcctcttgcagatcccgcagggctggagcagcccagcaccctcagaccacctgtgaagaaacactgaccaggtcttctctaaagggggctgggtgccctttatggaactctgcgtaggagctcaaaatttccctgacttcattgtcacataaagagctaagcagaactaagtaactcctaaagcagcccaagaattaagctattaaatgagagccatcctgggcttcagcctgtgcctcggctgtgtgcgtcatcgagtggtctggtccttggtaaggggcttagtgtgctggtcagtgctagaattggtggcttagcctgcaggggaagaagagttgaaagagctgtcctggattgcttggccagttggtggccaaaccaggaagctttcagtggtccatgcgtaccgctgacctgcagacgagctggggctgccccctaagccttgctttacgcaggatccatgccttctggttttgcatttatagttaagtgtgggggatgatttagaaatgccatttcccctcctttgcagaggcgctttctttgaccagcgatggggagggcccttgtcagtgtctccttgaccatctggtcacttgtctaactttggttccataaccataaagtcttatcccaggtgtttttgtttgctgatttaaaaagactatctttcacctcaggaagattgaaaatgctaatgaaatcgctaaattttcagtagatcaaaaaaacctgttgcttggtttcccagctgtttttctgatcgaggctctctgaagagcataatgcagtccaacacattaaccaaagatgaggatgtgcagcgggacctggagcacagcctgcagatggaagcttacgagaggaggattcggaggctggaacaggagaagctggagctgagcaggaagctgcaagagtccacccagaccgtgcagtccctccacggctcatctcgggccctcagcaattcaaaccgagataaagaaatcaaaaaaaaaaaaaaaaaactcgagggggggcccggtacccaatt

SEQ ID NO: 1923 - DNA, 5065 bp, Homo sapiens
  SITE (2531): n equals a,t,g, or c
  SITE (5063): n equals a,t,g, or c
tttttttttttttctttttctatgggttattttttattwtttttawttttatttwttattatactttaagttttagggtacatgtgcacaatgtgcaggttagttacatatgtatacatgtgccatgctggtgygctgcacccaytaactcgtcatytagcattaggtatatctccyaatgctatccctcccccctccccccaccccacaacagtccccagwgtgtgatgttccccttcctgtgtccatgtgwtctcattgttcaattcccacctatgagtgagaayatgcggtgtttggttttttgtycttgcgatagtttrctgagaatgatgrtttccaryttcatccatgtccctacaaaggacatgaactcatcattttttatggctgcatagtattccatggtgtatatgtgccacattttcttaatccagtctatcattgttggacatttgggttggttccaagtctttgctattgtgaatartgccgcaataaacatacgtgtgcatgtgtctttatagcagcatgatttatartcctttgggtatatacccagtaatgggatggctgggtcaaatggtatttctagttctagatccctgaggaatcgccacactgacttccacaatggttgaactagtttacagtcccaccaacagtgtaaaagtgttcctatttctccacatcctctccagcacctgttgtttcctgactttttaatgatygccattctaactggtgtgagatggtatctcattgtggttttgatttgcatttctctgatggccagtgatgatgagcattttttcatgtgtyttttggctgcataaatgtcttcttttgagaagtgtctgttcatatccttygcccactttttgatggggttgtttgtttttttcttgtaaatttgtttgagttcwttgtagattctggatattagccctttgtcagatgagtagrttgcaaaaattttctcccattytgtaggttgcctgttcactctgatggtagtttcttttgctgtgcagaagctctttagtttaattagatcccatttgtcaattttggcttttgttgccattgcttttggtgttttagwcatgaagtccttgcccatgcctatgtcctgaatggtattgcctaggttttcttctagggtttttatggttttaggtctaacatttaagtctttaatccatcttgaattaatttttgtataaggtgtaaggaagggatccagtttcagctttctacatatggctagccagttttcccagcaccatttattaaatagggaatcctttccccattkcttgtttttstcaggtttgtcaaagatcagatrgttgtagatrtgyggyrttatttctgagggctctgttctgttccattgrtctatatctctgttttggtaccagtaccatgctgttttggttactgtagccttgtagtatagtttgaagtcaggtagyrtgatgcctccagctttgttcttttggcttaggattgacttggcratgcgggctcttttttggttccatatgaactttaaagtagttttttccaattctgtgaagaaagtcattggtagcttgatggggatggcattgaatctataaattaccttgggcagtatggccattttcacgatattgattcttcctacccatgagcatggaatgttcttccatttgtttgtatcctcttttatttcmttgagcagtggtttgtagttctccttgaagaggtccttcacatcccttgtaagttggattcctaggtattttattctctttgaagcaattgtgaatgggagttcactcatgatttggctctctgtttgtctgttrttggtgtataagaatgcttgtgatttttgcacattgattttgtatcctgagactttgctgaagttgcttatcagcttaaggagattttgggctgagacratggggttttctagatatacaatcatgtcrtctgcaaacagggacaatttgacttcctcttttcctaattgaataccctttatttccttctcctgcctrattgccctggccagaacttccaacactatgttgaataggagtggtgagagagggcatccctgtcttgtgccagttttcaaagggaatgcttccagtttttgcccattcagtatgatattggctgtgggtttgtcatagatagctcttattattttgagatacgtcccatcaatacctaatttattgagagtttttagcatgaagggttgttgaattttgtcaaaggccttttctgcatctattgagataatcatgtggtttttgtctttggttctgtttatatgctggattacatttattgatttgcgtatrttgaaccagccttgcatcccagggatgaagcccacttgatcatggtggataagctttttgatgtgctgctggattcggtttgccagtattttattgaggatttttgcatcaatgttcatcaaggatattggtctaaaattctcttttttkgttgtgtctctgccnggctttggtatcaggatgatgctggcctcataaaatgagttagggaggattccctctttttctattgattggaatagtttcagaaggaatggtaccagytcctccttgtacctctggtagaattcggctgtgaatccatctggtcctggactytttttggttggtaagctattrattattgccwcaatttcagakcctgttattggtctattcagagattcaacttcttcctggtttagtcttgggagrgtgtatgtgtcgaggaatttatccatttcttctagattttctagtttatttgcrtagaggtgtttgtagtattctctgatggtagtttgtatttctgtgggatcggtggtgatatcccctttatcattttttattgcgtctatttgattcttctctcttttyttctttattagtcttgctagcggtctatcaattttgttgatcytttcaaaaaaccagctcctggattcattrattttttgaagggttttttgtgtctctatttccttcagttctgctctgattttagttatttcttgccttctgctagcttttgaatgtgtttgctcttgcttttctagttcttttaattgtgatgttagggtgtcaattttggatctttcctgctttctcttgtgggcatttagtgctataaatttccctctacacactgctttgaatgygtcccagagattctggtatgttgtgtctttgttctcgttggtttcaaagaacatctttatttctgccttcatttcgttatgtacccagtagtcattcaggagcaggttgttcagtttccatgtagttgagcggttttgagtgagwttcttaatcctgagttctagtttgattgcactgtggtctgagagayagtttgttataatttctgttcttttacatttgctgaggagagctttacttccaastatgtggtcaattttggaataggtgtggtgtggtgctgaaaaaaatgtatattctgttgatttggggtggagagttctgtagatgtctattaggtccgcttggtgcagagctgagttcaattcctgggtatccttgttractttctgtctcgttgatctgtctaatgttgacagtggggtgttaaagtctcccattattawtgtgtgggagtctaagtctctttgtaggtcactcaggacttgctttatgaatctgggtgctcctgtattgggtgcatatatatttaggatagttagctcttcttgttgaattgatccctttaccattatgtaatggccttctttgtctcttttgatctttgttggtttaaagtctgttttatcagagactaggattgcaacccctgcctttttttgttttccatttgcttggtagatcttcctccatccytttattttgagcctatgtgtgtctctgcacgtgagatgggtttcctgaatacagcacactgatgggtcttgactctttatccaatttgccagtctgtgtcttttaattggagcatttagyccatttacatttaaagttaatattgttatgtgtgaatttgatcctgtcattatgatgttagctggttattttgctcgttagttgatgcagtttcttcctagyctcgatggtctttacawtttggcatgwttttgcagyggctggtaccggttgttcctttccatgtttagygcttccttcaggagctcttttagggcaggcctggtggtgacaaaatctctcagcatttgcttgtctgtaaagkattttatttctccttcacttatgaagcttagtttggctggatatgaaattctgggttgaaaattcttttctttaagaatgttgaatattggcccccactctcttctggcttgtagrgtttctgccgagagatccgctgttagtctgatgggcttccctttgwgggtaacccgacctttctctctggctgcccttaacattttttccttcatttcaactttggtgaatctgacaattatgtgtcttggagttgctcttctcgaggagtatctttgtggcgttctctgtatttcctgaatctgaaygttggcctgccttgctagattggggaagttctcctggataatatcctgcagagtgttttccaacttggttccattctccccrtcactttcaggtacaccaatcagacgtagatttggtcttttcacatagtcccatatttcttggaggctttgytcatttctttttattcttttttctctaaacttcccttctcgcttcatttcattcatttcatcttccatygctgataccctttcttccagttgatcgcatcggctcctgaggcttctgcattcttcacgtagttctcgagggggggcccggtacccaattcgccctatagtgagtcgtattacaattcactggccgtcgttttacaacgtcgtgactgggaaaaccctggcgttacccaacttaatcgccttgcagcacatccccctttcgccagctggcgtaatagcgaagaggcccgcaccgatcgcccttcccaaaaancc

SEQ ID NO: 1924 - DNA, 1592 bp, Homo sapiens
taaaaataaaaataaaacactttaattagaatctatttttacctattttctaaatttatttaaatgcttagcaggaagcataaggaaaagccatcggcctccaatacccatgatgacagagggagcacttgagccttgccttccctcctcttaaatcagggtgtgttccgagattacagaacatcacaccttggcgtgatgaaatcatgccaagattctgactctccctttccggtgatactgctcatgatttctcctaatacgcttcaagcaactgttaccacaaaaaatacagtttccgcagggctttaaaggattgagtttagcatgtatatcatgcgttattaaagttcacgtgattcatgtgaaattaactgtcctttttgctagtgccaaaacagtgccttctctgcacactttacttgtttataaagttctcccacatgtccttaaatatcaagggggaaagtatggatattcgcgtagcaataatgccagcaaaggtcattttcattttttagtcatatagatatgaaaataagttcatatagatatgaaattgcttgactttattgttttggggagattttttttccttacatgattatattaaacactttaaaatagccttccggtttctggattttgagaagcctgatctgttattgttgtggttgttggtgtttgtaatattcattattgtttgtatatacacggtttagtcttactgatttcaaatgcattttgttattgctcaacccaactggtaacactgtttgctgggagcattatacttaactttgattcaccatggttgatgccactgccatgatcgctgggtcttaaagagctttccctagccactgacagccccgtggagatcataatcagggccccaggctggttccaggatcaggcagcctatagagtgtgagcatctatgtgtagctacccttgttgggtgggctcttagactgatggggtaggatatgaagtgaaagacttcaaatgcaagtaaggtagtttgggctccttaattccaaacatcccatgagtatatcaagatgaataaggaccaagggacctctgtgactcatagaagggctggctgaatcctgaagtagcatagtgggacctggtctacaatttatgcacatgcactgacagccttgctgtgccacgtgtctcaccaagacccagttgggaaagagcgtcatattgccaacaggttgggtttctctggcctacacctgattaatgggccctttatctttggtgtcccctaggagtgtccagttgttttattgctgtattttgttattgcagtacttaataaaaattgttgatagggcccaaaaccctacagaaattctatgtctgtaaaaaccaacaaaggcattggacttgtgtgaatgtacagggtttttttagtagtaattttaaatttaaatgttttaagtgatcatcagtgttcctttttacttataaagttggattcttttttagaatttgtaataaataaaaactgctgctttaccactgtaaaatatgctttctgatgtggtgtatttttaaaataaattttaatatgt

SEQ ID NO: 1925 - DNA, 270 bp, Homo sapiens
ggcacgagcatacgctggacgagtcggaccgaggctaggacgtggccggcgctctccagccctgcagcagaagaacttcccgtgcgcgcggatcctcgctcgttgcacgggcgccttaagttattggactatctaatatctatgtatttatttcgctggttctttgtagtcacatattttatagtcttaatatcttgtttttgcatcactgtgcccattgcaaataaatcacttggccagtttgcttttctaaaaaaaaaaaaaaaaaaa

SEQ ID NO: 1926 - DNA, 1045 bp, Homo sapiens
ggcacgagccttggttgcattagacctctagcaatcgaaggccagttccagcctggaccaaggcctgcctctggttctgcacaatggcaagtcctattaggaggactaggagctttgtccttgaagtaaagacctgcatggtaactggtttcagttaggttggctcactgggatttgaagctgggatgaatggattccacactgacctttatcccatgggcctgttggactggctcttggggaactcataactgtaccatgtgtttgagcttcagtgagctcaaatgcagagtcaagtgggaagagatgcaagattgctaagtaggtggtcagctatctgccaggggtcttctcctaatggtagaccagctagcctgtcaatctgaagtctgcttttgtaaagctttgtgctgggggctatgatggatagtaataaaatgacattgtcctctcagagcttaggatctgccaaattaggaagcgtgttcaaagaaacccctagagagcctgagatgagttaagggtgaggttctaaccaaaccaggtgtagctttagcggtacaacctctgtaaatcactcaacttgtctgtaagtcagtttgctcatgtgtgaaatgatctcaaaaattccctctgcctctggctttataatctaggtggaaagatgaagcataaacacagtccatttgtagtttcccgggcctctgataacatctccaatctgagttacttaagctttagagccacctgttagcagcattcaaagcaagattgttgaggttggtgacaggtgcactgcacagttgtgccctgtgggtgctctgtggccatgaggtgagccagaaagacaaactgcacatgagtaggccaaccgctctgcagaacgtgcagaaaggttcattgttcatggtcagaaaataacattttgtattgtggtaaaaagagaaataacattctgtctcctattgtcacaatttataatgtaagattttaaagatgtaataaaaagttatgcacatcaataatgaaaaaaaaaaaaaaaaaa

SEQ ID NO: 1927 - DNA, 838 bp, Homo sapiens
ggcacgacttagccttagtgaagaattgaaaatgcattatccagatttccctgatgtgagttctggggtttatgtatgtaaagtggttgaaggaacagctgctcaaagctctggattgagagatcacgatgtaattgtcaacataaatgggaaacctattactactacaactgatgttgttaaagctcttgacagtgattccctttccatggctgttcttcggggaaaagataatttgctcctgacagtcatacctgaaacaatcaattaaatatcttgttttaaagtgggattatctaaaaaaaaaaaaaccagttatatcacgtggtttgtattggagatgtgccaaacatggcaagaagtttttggatctttttcttacaaagaaaaatggatggttatcaacccaaatgcccatcaatgacagactggataaagcaaatgtggtacatatacaccatggaatactatgcagccataaaagcaacagtcctctgcagggacatggatggagctggaaaccattatcctcagcaaactaacgcaggaacagaaaaccaaatactgcatgttctcacttataagtgggagctgaacaatgagaacacatgaacatagggaggggaacaacacacactggggcctggcagtgggtagggtagagggagggagagcattagcaaaatagctaatgcatgctgggcttaacacccaggtgatgggttgattgataggtgcagcaaaccatcatggcacacatttacctatgaaacaaacctgcacatcctgcatatgtacctcagaacttaaaaataaaaataaaaaaaaaaaaaaaaaa

SEQ ID NO: 1928 - DNA, 1367 bp, Homo sapiens
gcattgacctacatggttcagagaacaccccacgggctgtttgtccacgacccaggctggacgaatgcctggtcagagggtgacctgaaccagagctggagtgaggatcaaacaggcccaggagcctgaggaaatacccagtcagtcctcccagccgcgatggagaggggcctttgcaggcgttcggaatctcggctgaattcaggacctgggaatacagggttcagagaggagaggaggaagatggtgacatgatttggttagaagcacaagcaaactgatcagcctcccagacctgccagcagatgctgtgtgagggtgatggagcacggggtcacacccctgccccaagggccactggtctccctgggcttgcagtgcagaggcctcagggtgtctgggattgctggggaggcctgtgctgccccctggtggcgcttcctggcgctgcgccctgtccacagtcaccttaggtccctttggaaacattccatttgacttttccctgttgtttgaaatcccatgtttccctaaacctctagcctgattgttctttccctaattcattgcacaagctcctttgcttttagtgttaccgctcattgcctctctaatcctgcctgattgtgtttacagaagcttctgatttgcattgaacatgctctaactggcctgtgctacttattaccgggcttgtaatagcggttcttgtctccatagcctgttgagtgttcccagatgtgactcacctttctgctgccctcttcatgcaggcctactgactcataattcacttgtcccaaaagccaccccacaagcctgagccaacctgctgcctgacgccacagtcattggcagaggtctgggcattattaatttataaaaatccatgctttacacctggacagtagacagggacttcagagattgcacgtttgaatacattctcccaagactgaggttgttyggttttaattcctgtagtccaatcacacaatttcttatggaaaaccttttgtgtttctggtatttaataacttgaagggatagcaaaatatactgtgtattcagagggcctctctgcagctgctagctcagacaccaaaggggtaaggcccaggacattcatatctttaaaagctgcaaacctggtaacctttaaacttttaaaacaaatgtcatatggggtaacactgaccttttataatttgatgtctcaaatgtagagattatctaaaaatcgtaacttgaataccttgtaatttttctcttaaaaaagaagacttgtgtaagtctctgcatcaacgccaataaacatgttgcttaataataaaaaaaaaaaaaaaaaaaaaaaaaaaaaaaaaaaa

SEQ ID NO: 1929 - DNA, 915 bp, Homo sapiens
ggcacgaggctgttcaacggtcagaggcccagcgacgggtccagcccagacaggccagagaagagagccacgtcctaccagatgcccttggtccagtgtgcctcctcttcgccgagggcagaggacctcgcagaagacagtggaagcagcctgtatggccgggcccctgggaggcacacctggtccctgctgctggctgcacttgcctgtcttgtccctctgctgcattggaacatccgcagatagaagttttagaaagttctatttttccaaaccaggattccttactattgacagattttctttaccaaaagaaaagacatttattcttttgatgcacttgaatgccagagaactgtccttctttttctcctctccctccctcccagcccctgagtcatgaacagcaaggagtgtttgaagtttctgctttgaactccgtccagcctgatccctggcctgagcaacttcacaacagtaattgcactttaagacagcctagagttctggacgagcgtgtttggtagcagggatgaaagctaccaaatttttttctcttaattattattatatttctgagttaaacttagaagaaacaactatcaagctacaacttttcctgccattttcctgtggttgcagcctgtcttcctttgaaattgttttactctctgagttttatatgctggaatccaatgcagagttggtttgggactgtgatcaagacaccttttattaataaagaagagacacaggtgtagatatgtatatacaaaaagatgtacggtctggccaaaccaccttcccagcctttatgcaaaaaaaggggagaatcaaagctttcatttcagaaatgttgcatggaaaagtatctgtaattaaagtttcgaagtaatttaaaaaaaaaaaaaaaaa

SEQ ID NO: 1930 - DNA, 2509 bp, Homo sapiens
gttccgctgcagcctactccgccccgtttgcggtaccaccagcgtggtatccttcgtgcgctaatgggagctgctgtggcaggtgcccccagagtgaacgggagcccctgctgtgggaactttgtgaatcctggagcatctcagacttgaacacacagcatatttggaagagaaaacatgcctttctttgttgaatcacattagtatgatgagtgagtcatccctgcccatctgctgagcttctcacatctctcagtcacacgtggacccagtggtcaatcctgcagagaattcggcggaggttaggtttgggagtggagctagcgtgctaaagccagagccttcacgtgaaggtggcaggcactggggcggaagccaacactcaacagatgcaagcagtgtgggtgtgcagcagaacagtgatcttgggggaggaagaggatgttactrgagtcagatgatttgctgtattctcctgaaaggtcgtaggctgacaggcgctcacattccttggctgcctcggttctgagggcagctaaggagctgtttattcctcaagtcatgctccccgatctccttcctctaccactctgtcaccaggagtttaattacaggcttgaggagaagaaaggaagaaaagatatcttgatgctttgaaaactgtgttggcagtgtggcatgactgtttaaagtagataaaaccttgtcattttaccccatccctgcatgactgtgaagctggcgaggaaggaggaagaagggcaagttcagatgcaggctgggtggctgggacaggttggctaagggactactctggagggctcttctgcctggcattgcccacttcggcccagccacgtgtttgcagcgaccagagtccctgcaaaggtgtggctggctgtggtcagggtgctactagcaccatcagcgcactcccgccattggctcagctcctctctgccagtccaactaagagtgctttgtcctgggtgggacataggggctgagagagatggggggagacataacacccaggaatgaaaatacagatttagagaaggaaccagtaagtaggagacagatgtgaaggaaatggaaatgaggcaagaggacrttggaagagagaagtttgctgtccaggagccaggtctggagcatcagtgtgagggagttcaggtaggctgggcctgtgcctctaggtagggacaagggaggctgggtagccagggctggtgcttaaaacccctgaggccatgagctcattggctgcctttgtagcatcctgtcttcttctgtgctgcctggtttgayctcatctcacctggattcaaagggtaaggtgggcatgggtcttgggcctgacacccaccaaggatgacctgtggactgccatcggatgctgaacagggagatgaaaggaggtcctcttaccatacccctctgccaaccccccagtaggccactgttctgactttgtttccagaatatccagaaatccaaaggggctgttgctgaacagtctgcaggaccagtgacagcacctacctgttgtcccaaggcatacaaaggaggcctcaacgctcatgcttctctaatcaagccctaccaagacagacagaaagacagacagaaaaaaggaaggggtagaggagaaggttgaagctgtggagctagactctgcttcacttcctgaagcttcaacttcatgtcgaagattcactgggacccaattcctgcattgttaatatttgtgaggaaaagtgaaacaagtgatctggttttagcccagatgatgaaagtggatatggcacattttcacacacgtgagataattacagcttgccccacaacactgggtgttggagaaagggagagatagtcataagtggaagaaaaagccaagcatagtgagtgggaaagagagtgagagcctgtgcaggctgctgacgagccccaggcagcccacaagtttctcgtggggagatggaggcagagcccagggtaggggacagagctgctggggcctttccttgcctgggaatctgtcccaggaagagcttccccactcccatcccccaaattggaaaaaccgtacattcaagcctgtttggccctgaaattcttaagaatctggttaagaattaactcactaatgtcaaaagtcaaaacctcctaggggttgtcctgggagtcaggttcacgggtacagaagatgaatctcagatgtcactcaacctgagccgtcattctctgtggcagggctgccctgggtttctcttactcaatccctggagtgtaagcatttggattgtgtcacagattacctttttaccttttctttctttttttttctttttttcaatatcagtgcccacaccttactgagtattgagttttagagctttcgcttgatgtgcttgaccaagagacttcttttgtatccttttcttgtcctatgatgtaaataaaagcctcgatttatgtaaaaaaaaaaaaaaaaaaactcgag

SEQ ID NO: 1931 - DNA, 921 bp, Homo sapiens
ggcacgagctgtaccagggctggcctccagagcgggtgaggacagagcagctgtgggcttttcattctgaggtcttggcccccctggccaccgcaagggactctttgcttgtcagggcttgcaaaaaccaaccttcgagaaagaaaagggaactcttcacgttgaatgttgactttgtgtgtatgcgtgtgtgtgtgtgtgtgcacgcgcgcgtgtgcgtgtttacttcatggaattttgttttgtgaaattcccctccaatcgtgtcagaatttacctccatgccccagtcacactgttggttctgcgctctgaacctgggtgtagctcatttgaaggactctcttctgcgtttcctaacagttatttggtggtctcaagagttgaggttgtggagggttgggagaaactgaagttctatacatttccatagagtttacatcctgcagttaaaaggcagggagggctcagcccgggccccacagctccaggccatcccctacgggctgcccacagtgcccccttttctctagccgaatctttttcgaacagcccgggaaaggaaaacggattcacttgctgattttgttcacggcggaagcaccatgttccgttcctttttcaggttcagtttgttgtgtaaatggcggttttttctggtgtgagctttggtgatggtggcagaagagatggttccacctcgtggtctgaagaacaaaccagagaagagtctggtttgccagaggccccctccggcccacgtcaccctgagtacacccctctgattgctctgctgtcaagaagcacgtttccaccagctgtattcaacactacaatgcattttttaaactatatttgcatccaagacaataaagacaccttattttttttgaaaagccaagaaaaaaaaaaaaaaaaaaa

SEQ ID NO: 1932 - DNA, 1723 bp, Homo sapiens
gcttaagcttccaaggctaaagttggaggtaatgcttgaagataatgtttgcttgcccagcaatggcaaattatatacaaaggtaatcaactgggtgcagcgtagcatctgggagaatggagacagtctggwwgwgctgatggaagaggttcaaaccttgtactactcagctgatcacaagctgcttgatgggaacctactagatggacaggctgaggtgtttggcagtgatgatgaccacattcagtttgtgcagaaaaagccaccacgtgagaatggccataagcagataagtagcagttcaactggatgtctctcttctccaaatgctacagtacaaagccctaagcatgagtggaaaatcgttgcttcagaaaagacttcaaataacacttacttgtgcctggctgtgctggatggtatattctgtgtcatttttcttcatgggagaaacagcccacagagctcaccaacaagtactccaaaactaagtaagagtttaagctttgagatgcaacaagatgagctaatcgaaaagcccatgtctcctatgcagtacgcacgatctggtctgggaacagcagagatgaatggcaaactcatagctgcaggtggctataacagagaggaatgtcttcgaacagtcgaatgctataatccacatacagatcactggtcctttcttgctcccatgagaacaccaagagcccgatttcaaatggctgtactcatgggccagctctatgtggtaggtggatcaaatggccactcagatgacctgagttgtggagagatgtatgattcaaacatagatgactggattcctgttccagaattgagaactaaccgttgtaatgcaggagtgtgtgctctgaatggaaagttatacatcgttggtggctctgatccatatggtcaaaaaggactgaaaaattgtgatgtatttgatcctgtaacaaagttgtggacaagctgtgcccctcttaacattcggagacaccagtctgcagtctgtgagcttggtggttatttgtacataatcggaggtgcagaatcttggaattgtctgaacacagtagaacgatacaatcctgaaaataatacctggactttaattgcacccatgaatgtggctaggcgaggagctggagtggctgttcttaatggaaaactgtttgtatgtggtggctttgatggttctcatgccatcagttgtgtggaaatgtatgatccaactagaaatgaatggaagatgatgggaaatatgacttcaccaaggagcaatgctgggattgcaactgtagggaacaccatttatgcagtgggaggattcgatggcaatgaatttctgaatacggtggaagtctataaccttgagtcaaatgaatggagcccctatacaaagattttccagttttaacaaatttaagaccctctcaaactaacaggcttagtgatgtaattatggttagyagaggtacacttgtgaataaagagggtgggtgggtatagatgttgctaacagcaacacaaagcttttgcatattgcatactattaaacatgctgtacatactttttgggtttatttggaaaggaatgcaaagatgaaggtctgttttgtgtacttttaagactttggttattttactttttggaaaagaataaaccaagaattgattgggcacatcaaaaaaaaaaaaaaaaaaaaaaaaaaaaaaaaaa

SEQ ID NO: 1933 - DNA, 2310 bp, Homo sapiens
ggcacgagattgagtggggtccatctcggacataggctccaaatggaaaagaagctgatgcttggcgactcctctctggccctggtctggctgggcctctgcctgcctccctggggcaagcctgggactccactccttcctgcgctgccccggcccctttctcttgggggttggtagcatctgctgtcctgggtagaggtccttaaggacactgcttgcgtgctggttttcaacccccaagctgtctttgtgggtcacacagtatcactcaaataataggttacttgagaagttcggtactcccttttaattgttgtcgatacgtatttacttaagatatgtaaaatattttcttattttcttttaggagcttactccacgggaacagcctctagataatctgagttgttgaaaatacgaagcctgttactcgtgaacagtggctgacaacagtgttgttgtgagcctggctgtctgcttggacccagaggtttcgtctgccagggtttttggttgtatttaggatttcagggaaaagtgtccaagctttcagtgttggagcaggtaaggtatcaacactgttagtagcaacaaaattttaacttaataagtctgtatttgctatttataaagtggcatttgtaaagaaactgatagtagaatgtagtattcgtattcatttgaaatacattcagccatttgtatcagcagtctctatagcagcagattctgcatctgtggattcaaccagctgcagattggaaatatttgggggacaaacaataaataataatctgacaataaaaaataataaaaatgttataaaacagtgtagtacagcaactgtttctatgatgttatctaaaatgatctaaatatttgagaggttttgcataggtcatgtgcaaataacctgttctctctttaatgaaaacccagttttataaactaaaactcttcctgtagaaagctaccagcatggatgcgcagcccttttcagctgggttggagcttcataggcccccagaggcagaggcgactgcaactttgtgcccttctgggcaaaggctagtgcgagcccctcagactacatctttactagaaactccaagtgttgcatgaaaacgagagcttgaccctcttttgagatgacagtcatatttcttgcaaatattttggcttgcacaacgaaaacttcttctaaatgtaaaatttccaatgagaacgaataaaccattttaactgatgtggtttaataattgctctaccatatatatttgttaagcagcattctctgctttgccttaatcttgaagtcagcatggctccggatcagagcggttccttgtgacttgctgggtcactggctggtgaaggaagcccccctttctgtttaccacgtctctagtgcccccctcacacagcagctccagagtttgcaccctgattgagttgagctgtgtcctttaacaatgggtcacttcaggtgagcatagaagtgatgtgtcccttatctccaaggcttccgtggagtgccctggggggtgtgggtcatgtttacagagcgtggaggccacggccaggcagcatctttagctggacaggaaaatgagaagtgacagcatttagagggaagcaaaaagaacaacacaggttacaggttgcaagtaattttccattttgtattttcgttctttttcttttttttgagactgagtcttgctcgcccaggctggagtgcagtggtgcgatctcggcttactgcaacctccacctcctggattcaagcaattctcctgcctcagcctcccaagtatctgggattacaggcgcctgccaccatgcccagctaatttttgtatttttaatagagatggggtttcaccatgttggccaggctggtctcgaactcctaacctcaagtggtctgcctgcctcggcctcccgaagtgctgggattatgggcttgagccaccaggcccggccccattttgtatattttttaaggctttcattttatgccagtccttcccccaggatggaacatggcataaaatcagagtcatcattagcattgaaatgtaattaaagcttggacagcttggaaaagaattctcaaagtatctactgtctttttcagatttttgtcatttcaacaagagtaaaagtttcataaataagattctttagtaatgtattagaatgaaagtgaaaaataatacagaaaaaaaaatatactggcctggcacagtggctaactccagcctggggacagagtcaagatccgtctcaaaaaaaaaaaaaaaaaaa

SEQ ID NO: 1934 - DNA, 1541 bp, Homo sapiens
gaattcggcacgagctgccttgagcttgccgccattctagcttaggctggatcacccacccccggcacagagaggagctgccttcaagacggattttcctgcatgatggaaagtggagtttgcacaataaaagagagagtccccattctcccatcaccaagagcagctcttcccatcttcacgtggtttattttggtcttttccagattggcattcatttaggattggctatgatgcatggggctggggagaattactgcttattgtaaaaaattcactcggtgctagtgacctgatgcccagcatcctcagtgggttttccctgtaaaaattccagtatgtgtcgctaaaatacaaatctttttaaaagcgtaaccacaataccatactgtttgatatgtaaaaatgaacggtaattgcttaatatctcaaagtgtccagtcagagttatatttccagttgtctcatgtacatcataatgttttgttgctcacttgaacaggattcaaataagttttgcacaatttcatttttaaattttttctttttcttttgccattaaatactctcctatccaaacacatgtattttaatctgtagcttcccccatttttattttttcccttgcagtttgttgaagaaacaagtcatttgcatctgtgtggcgttgttgaacatggtcctctctcctggccactacatcacattcagagttgattctcccctccctgttcagagactggtggtgggtgttctttatccggcatctctctgtgacagcagcagcatttgtggccataattggcctaaattcatgaactcattagagagtgcagaaaggtcacagcctgatacattcatgagatgcaattcattaaagagcaacttctccccagcaacttttgggttgactcgtggtatcatctgtaaaagaaaagtaggataaatgcttctttccccttttcatgccatttttgaaaaccacacattggttctccattctcttccaatgatgattaattcattaaaaaagttattacccttcctcacaccatacacaaaagctcactccagggccaggcgcggtggctcacatctgtaatcgcagcactttgggaggctgaggcgagtggatcacctgaggtcgggagttcgagaccagcccggccaacgtgacgaaaccctgtctctactaaaaatacaaaatttatggctgggcgtggtggctcacgcctgtaatcccagcactttggaaggccgargcaggcggatcacctgagatcaggagttcgagacccgcctgaccaacatggcgaaaccctgtctctactgaaaatacaggtgtgtttttagctaggtgtggtggtgcatgcctgtactcccagctactcaggaggcaggagaataacttgaacctgggaggcggaggttgcagtgagccgagatccacactattgcactccagcctgggcaacaagagcgaaacgccatctcaaaaaaaaaaaaaaaaaaactcgagggggggcccgtacccaatcgcc

SEQ ID NO: 1935 - DNA, 2074 bp, Homo sapiens
  SITE (2019): n equals a,t,g, or c
  SITE (2043): n equals a,t,g, or c
  SITE (2048): n equals a,t,g, or c
  SITE (2061): n equals a,t,g, or c
cttccgacatgcctccagcctccattttctcccttcccagttattccttagcccagccatctctgtctttagctcctacaattttcttaggatattctgggaaagatgagcggagactgcccgccttgtcaaatctagtgtctttttttcagtcctcacactgcttgacctatgtataacctcctatacttccctctttgcatactcctctgggttttctgtggtagtcaagattcctccctgagatttatttcccatgagtcttgacccctcccctcagttggtgctatttccccctacccgccctccgatgatcttatcagagcccacaggttcagttttctttcatgctacctgaatgtcctgataaactggctcrctctcttctttaccttccataatggcattaccatttaccacgccacccaagatacttactaggaacctcaaagtattgtattctttttctccatcacactcatacttaatcatcaagyccttttgagcttgtctcctcttgaatatgtcccttcttaattcctgctgccttcttagtaaaggcyttcattcttttttccctagtaataatcttttccatatgttccagttaaaataccatgttctccctattccttattacatagctagcattccttgaaaaaaaacaattctctcaggcctccatacctttagcatgttacccactctgcctctgctcttctggaactagaacactcatccttgaaggctgggcttctgtatgaaggttggtcctgcctccttacttgaggtgaagctttgtacatgcctgtattacggacatcctcttatttaagtgtttgtctctttcgtcattgggactccagcacccagcatagtccctagtatactagttggtgccgaataaatagtagctattattagaaaaggaagggtgaaattgacatgggagttagtaaaatgtatatggaaatgatttttaaagggaaaggtaatgattttctggcaggaaaagcagcaatgacaagattacttaagtcttgtgaaataacacttctcttccttgacctgctgcttcccttttttaccacacacacacgcacacataccacagccctttgagactgaaagcagctctattgagaatagtagtgtcaactgtattatgtagaaattctaaagtttttgggattatttcatagccctgaccttgctacttctctccactttatgtggcaggtttaatctcaggtctccctcatacacttctcagcctcagcacctaaccctcacacaacactccagtattgatgcagtcaatcttgtataacattttttgaatgtccaatgtgcaaagcacgatgttggaaattatacagaggtgaataagacaaaaactcttgctctcaaagatgtcagtctttttctttgcaaggataacacatgtagagtaaaatgcataaaggggactaattttaaatgtacagcttaattaatttttatgtatgttaacacccatgtcaccaccatgtttaggacatttccagcacccctgaaatttccttcatgccccttcccagtctgtacctacacctctaaatctattttcaatcttaatggccttttaaataactgggcttctcacaaccatagtgaacagaaacagctgggttgtcaacgtctaacctaatacttcaggaaaactcatgatggtttccatgttaagagagacatggagcagggcactggcatggyggatggatcacgcctgtaatcccagcactttgggaggccgaggtagggggattgcttgagcccaggagttcaagactagcctgggtaatataaggaaaacctgtctctgcaaaaaaaaaaaaaaaaagaggatacaaccaaatggaagaacattccatgctcatgggtaggaagaatcaatatcgtgaaaatggccatactgcccaaggtaatttacagattcagtgccatccccatcaagctaccatgcctttcttcacagantgggaaaaactactttaaagttcnatggnaccaaaagagccntatcgccagtcat

SEQ ID NO: 1936 - DNA, 2288 bp, Homo sapiens
  SITE (603): n equals a,t,g, or c
  SITE (2113): n equals a,t,g, or c
  SITE (2158): n equals a,t,g, or c
  SITE (2279): n equals a,t,g, or c
  SITE (2280): n equals a,t,g, or c
tgtgcacagataaaattagaataaatgcagagatgctataacaagatgtcttagaaaaaagaaaaacaaagaataaatgcagagagaaagagaaatgtataaaaggtagagagataaacataccacaagttcatagaaaagaaaggttgtgtgtttatctgtggctgggatgatcaagaaatgcttcatggataaagagcctttgagccagacattgaaagaaaggtaatgttggacttgaggtcttggagtatcctcgttgaaggaaacatgagcaaaggcataggtagggatgggaaatgccggggtgcagagtgggcaggawtcgatttgtagttgctgggcaatgatgtgtgtaaaccactaaaggagaagwtcaggtagcaaaggtccttggaggccagaacccagagggccttgaatggcaygtgactaaatgatttaaacttaagttactggggagcawtggaagaatttgagtggctagagtccccatcctgaagaggccttgcggggatcagcatgtgggtgcctctggactgtgaaatagccagagctgggaagccttttagagctgctgttgtggtccaggagggaggtggngagggcctgggtgaggggaaggccactagatggagaaattgaatttatgagatgggatttaggaactgcctagataataggggttggccgatgggaagcaaaaatgcccccagagctttgaacccaggtgccattcattatttctatgccatctgccaggcattgcatagctattatctcatttaatctcctcctaatcttgtgggttggtattttcatccttatatcagagacgagaaaactaagggtcagagaaaattagcaattggtctaaaattgtacagttgtaacaggatctagaacagggacttcagtacaggcctccctgacccccaagcctgtgttctttctactgtactaggcttggaagacagcgtacgtgagagcaaagacaagctctgtccactctgtgcatattcagtgtaggtgctggtgagattcccgccttcaggtgtccagcaagtggttggagacatggagccgaatctcaaggacattgggaggattgaaggtcaaggcttaagaaccatctgcatcctcatttatttattcagcagctatttgttgtgtcttcgtggaccagcttggcagcatgaatgctgtgaccamcaagagaggtgtgtccttcacggagctgccaggctgggagggagccctgatggcgtggcttgagtgtaaggcaggaggtgtgcagattggctgtgggaacttactggcctaaccttgtcaggtcagggaagctctctagaggcagttgtggttctcaacatgagactcaaatgatgaggacccagataaaaagtgggaaaacagcataccccaggccgtggaagtagcgcgtactcaggcagagcaagataagaacacagtgtctttaaaccaaaaaccacgtgtggctggaatggagggaagagcaaggagataagacaggtgagcaggaaccagaacaagaaatgccctggaagctgtgagacgcttggaattcacctgtgaagaaaagagtagcctcatctgaattccttgcctcgattatggtctccaatagaagattaaatggctgtggagtctagaggttttttccttcggtgtgggcatcaccccttctgaaaggatggtgtartggctaattgtatgtatcagcttggcgaggccacagtacccagatacttggtcaagcaccagtctagatgtcgctgtgcaggtatttttttagatgaggtttaacatttatatcagtagaaggagtgaagcagattatcctttgtaatgtatgtaggcctcatatatcatcagttgaaggccttaagagaaaaagattgaagtccctaaagaagaaggaactctgtctccagtctcccttcagactcaagactgcaacatcggcctggcacggtgctcacgcctgtaatcccagcactttgggaggctgagatgggtggatcgcttgagatcaggagttcaagaccagcctggccaacatggcaaaaacctgtctctatttaaaaacacnaaaattagttgggcatggtggcaggcgcctgtagtcccagctacntgggaggctgcggcatgagaatcacttgaacccaggaggcagaggttgcagtgagctgagatcatgtaactgcactctagcctgggcgacagagtgagactctgtctcaaaaaaaaaaaannaaaaactc

SEQ ID NO: 1937 - DNA, 1156 bp, Homo sapiens
ggcacgagggagaaactcctcctcataccttctgcaaagttgacaaaaacttaaattgtggaatgtggggttccagcgtgtttctgtgttataagaagtctgtacctgcttcaaatgcaatagcatataaggctggtttaatttttagatatccagaagaggactatgagtcatttccactctcagaatcagatgtacctcttttctgccttcctatgggagctactattgagtgctgggatcctgaaaccaaatatccacttccagttttttcaacttttgtcttgacaggttcttcagccaaaaaggtatgtttttgtctcattgattaaacacattttgtccatgtttttatttcataaaaaggttaatacaagttttatttgaatgttaggattatttggacatgatacattttggtttaaatttacactgtcatccccaaggtgagaaatcaacatgaaaattgctatcaggatattgatacctctggaacttctacagaagcaaagataaagtctctctggatagacaccttcaaaacccaggtgtcaagatgagatgattatgacagatcaaggacataggtaccatagaaagaatcgacagacacaattaaaaagcagggttagaccctcaagacattgaaatgacagaatgacaatataaaggatgttataaattaaaatatcattgagatgacctaagaactaatggaggggctcaaaatatcaaggaaggaacaggatattttgaaaaatgaatagattgggaaaagaatcaagtgtttagaaatgaaaaatatggtccttaaaattaaaaattcagtgaatgggttaaacagcagagataaggccaggtgcggtggctcacgcctgcaattccagcactttgggaggctgagacaggtggatcacttcaggccaggagttcaaggccagcctgggcaacatagcacaactccgtctctactgaaaatacaaaaaattagccaggcttggtggtacacgcctgtaatcctggctactcgggagggtgaggcatgagaattgcttgaacccgggagacagaggttgcaatgagctgagactgcaccattgcactccagcctgggctacagagcgatactctttctaaaaaaaaaaaaaaaaaaaaa

SEQ ID NO: 1938 - DNA, 2488 bp, Homo sapiens
gaattcggcacgaggaagactcccatcgttttcgaaccaaggttcttccctaaagtgagttttaggtctccttttatttttccatatgtaaataatgcagaaggttactacattaagacacatagagaattgtctagctggcaaatgttaatagtggcttttactttaacattttttataaaggatctggaagcagttttcagttcaacactgaatttttctgtattatgaaatgccatgcttagaataacctatgtaagtgaaaaaaattggaaatagaatctggaattgggaggttattcaattgtcaatacggaaaaaaaggaggctcttcatatagcctttgaagacatgtggccatatattactgtattcagacaggactataggtaaacagaaggtatccccatagtgactggcgtcacagtttcgatataaatattgaattaaatgcatgagttatggaagggtttcatagactgtaatgatattaatgttgatacaccttgggtatatcaagctaaacaagtcttagagaataatgaaaatgatccagcagrtacaatagcatgtcataagagaattagctgtctttatttttatttgagaaggattagcataatatagaaagactatgtatatgagttccttaagacatggcaggacccttgccttttaatacatatttgaaaattataaccatgttgttcaaatcccaaaatactctgggaggagataggggccaaaaaaagaaaataaatcctttttcatggatggtagaattaggatgtttccagaaccagcactgtgcccatcgtagtaggcactgaatttttttttgtaaaagaacattaggatagctcctcaagagaggatgttgttttccataatgaacttcttctggtgctgctgtgagacctccaactccagtaggccactgatgtgtttgagctgttctgaatattctcttctccccagggagcagggggctcttttagcattgacagtgaggagtatgaagcgatgcctgtggaggtgaaactgctccccaggaagctgcagttcttctgtgatcctaggaagagagaacagatgctcacaagccccacccagtgagcagcagaagacaagcactctgagaccacactttaggccaccggtgggaccaaaagggaacaggtgcctcagccatcccaacagtgtcgtcagagggtccccagggcattttcatggcaagtacccctctgcccccactccagcagtgcttcccaaagtgtgctctgtcacctgctttgcaatcggcttccattagcgcatgttttattttggtgtgacggttggccctcctaaacacggactttcctcaggctggttcaagacggaaaaggactttcttctgttttcttccaaagtgcaaccacagtggagagcccacggtgggcttagcctgcctaggcccttccatttctcttctttgaccgtgctaggaattccaggaaagtgcattcctgccctggtgaccttttcctatgtctaggctcctccacaggtgctgctattttgtgagctccggctcctgtttagcttttatttcagttctaacctcagtccagaaacatatgtgaggttgtttccctcttcagccacggctacaataccggaaaatgctagtttttatttatttttttaagtagtgcttcctaaatggtttgcatgagagccacctggggtacatgttgaaaacttatttggggtctaccccaaacctaataacccaaatttggggatggggcccaggaatatgcatttttaaaaagtcatctgcccttcccaggtgattctgtaagttgtccctcaactgtacttggagaaatcgtgttttaaagcagtagtccacaaagtattctgctcatgtgcccccaaaagtattttgaaaaatcatgtataccctcacccatctaagttgatatctaaaattttatctaagttggtatctaaaatttttcatgggaagttaaatagttgacaaagtatgtatttgctggtgtcgtgtaaatattggtattttaaaataaaaactgttacatcactattttaaacatatccagtacaatttaaatatcacaacaatttgacacccttcattcatttataaaaataaatgagctagttctttagtagttaaacatttcaaattggcttttctccttctgtatttccataccacttttcagccaagaatcctatcataatgtaatctattatgcccgacatcttttaatcattcaccccattacttcttgtcaacaaaaaatataaatggaaattttttttttagctcttgctttaagtgtttgtttgttatctcagtccagaaccaatattatcgtaattaattattggtatataatgaaaacggtattaattcttggatgattaaaagtttttttattagaatgttaaaaaaaaaaaaaaaaaaaaaactcga

SEQ ID NO: 1939 - DNA, 1640 bp, Homo sapiens
ggtcagagtgtgtgagctccctagtaggtgcagtagtaatagtaggcaccctttgctgttattgttatgaaaactgtcagctccaggatggtgctggaggtgacgatgatgttgatgacagggttgttaggaatggagttagtggcaagtggagctacagatgggcccacgggtatgagagctactaacaggaactttgactcaatttggcagaatcgtatttcaaatctaaattctctttccaccagctccttttgctataagggaaagccaagtggaaacgtagaggcatgtgcacccagatctcctgaaaagggcaataggagagggtagcagggaggagacaatcctctactgagctgaactggaaacgcctgattgtcatttcttccctgctttgccactgacgcccgcagcagctgatcaggaaggtatcagatgccttcactagctgtcactaacacctgcctcctgaatcctgatcggggagatggtgtcatcgggccctccacataaaatatttagtggcacttgcttcccaaagaggcaagcgtggcctctccttggcatcaggaacgctccgagttacatgtgctgggagactctcttgttcaggcgagagtcctggagcagcatacctggtttgagacttggagtaggagagagggaaactggtagaacagagactaggcaagttttggctcttgagaatgcatgtgacaagtgacttcatgcactaaacagagagggatgtgacagaaagaagaaagcatcattattaagagaaaactcctgaggttgacactagcagaaaattggggataggaggaagtcacactgggtatgcaaagtcaaatgcatgtttgtttaccagtgtctaccaaactgaggatgggaaattcattctaagacagatgatgggatggatggaggtgaggagctggaaataatgacaaataaattgctaataacaaaggctaatgtatcttaaacacttaagatggccatgaactgttctaagtgcttttatatgtattaactgatttcattgttataatcctatgacgtagctactagtactaaacctattttatatagatagttagataacatcatagaatggctaagtaccttgaccaagtgtacacagctataggctccatttgcgtccaggcacctaagttcagagctcatgcatttaattgttatatcgcactgcctctcaccagaggcacaaaggtgggctccatcctcccttactcagaatgtggataggagtcctgatctttgcccactgggctctgcttggaacagccacttagtcacatcaatttggcatagaaagatgaaggctctcaacgtgcccttgaagtcagctgtcttcatgaaggccacactcccaaggtggggtgcaaacctcccctcactgcaggagactgtgcctcctcttgactccagtgtccaatgacagctgctcccaggcgggcagtccctgagtcctgtgagatgaattcacttggctggttatcaggagtggcctgtcccaaagcaaatgctgcatgagggtgagaggaaaacagcccagctggagtggtctgtttagaactactggcctgaaaaaaaaaaaaaaaaaaaaaaaa

SEQ ID NO: 1940 - DNA, 1996 bp, Homo sapiens
  SITE (2): n equals a,t,g, or c
  SITE (3): n equals a,t,g, or c
  SITE (7): n equals a,t,g, or c
  SITE (75): n equals a,t,g, or c
  SITE (78): n equals a,t,g, or c
  SITE (906): n equals a,t,g, or c
  SITE (1973): n equals a,t,g, or c
  SITE (1988): n equals a,t,g, or c
  SITE (1992): n equals a,t,g, or c
annaganttctcacacattcttatggttcctctatgtttgctccaactgacacttcagatatggaagcagtattnttnggaggcaaaaccggaagaccttatggattcaaaacttagatgtgtgtttgaattgccagcagagaatgataaaccacatgatgtagaaataaataaaattatatccacaactgcatcaaagacagaaacaccaatagtgtctaagtctctgagttcttctttggatgacaccgaagttaagaaggttatggaagaatgtaagaggctgcaaggtgaagttcagaggctacgggaggagaacaagcagttcaaggaagaagatggactgcggatgaggaagacagtgcagagcaacagccccatttcagcattagccccaactgggaaggaagaaggccttagcacccggctcttggctctggtggttttgttctttatcgttggtgtaattattgggaagattgccttgtagaggtagcatgcacaggatggtaaattggattggtggatccaccatatcatgggatttaaatttatcataaccatgtgtaaaaagaaattaatgtatgatgacatctcacaggtcttgcctttaaattacccctccctgcacacacatacacagatacacacacacaaatataatgtaacgatcttttagaaagttaaaaatgtatagtaactgattgagggggaaaagaatgatctttattaatgacaagggaaaccatgagtaatgccacaatggcatattgtaaatgtcattttaaacattggtaggccttggtacatgatgctggattacctctcttaaaatgacacccttcctcgcctgttggtgctggcccttggggagctggagcccagcatgctggggagtgcggtcanctccacacagtagtccccacgtggcccactcccggcccaggctgctttccgtgtcttcagttctgtccaagccatcagctccttgggactgatgaacagagtcagaagcccaaaggaattgcactgtggcagcatcagacgtactcgtcataagtgagaggcgtgtgttgactgattgacccagcgctttggaaataaatggcagtgctttgttcacttaaagggaccaagctaaatttgtattggttcatgtagtgaagtcaaactgttattcagagatgtttaatgcatatttaacttatttaatgtatttcatctcatgttttcttattgtcacaagagtacagttaatgctgcgtgctgctgaactctgttgggtgaactggtattgctgctggagggctgtgggctcctctgtctctggagagtctggtcatgtggaggtggggtttattgggatgctggagaagagctgccaggaagtgttttttctgggtcagtaaataacaactgtcatagggagggaaattctcagtagtgacagtcaactctaggttaccttttttaatgaagagtagtcagtcttctagattgttcttataccacctctcaaccattactcacacttccagcgcccaggtccaagtctgagcctgacctccccttggggacctagcctggagtcaggacaaatggatcgggctgcagagggttagaagcgagggcaccagcagttgtgggtggggagcaagggaagagagaaactcttcagcgaatccttctagtactagttgagagtttgactgtgaattaattttatgccataaaagaccaacccagttctgtttgactatgtagcatcttgaaaagaaaaattataataaagccccaaaattaagaattcttttgtcattttgtcacatttgctctatggggggaattattattttatcatttttattattttgccattggaaggttaactttaaaatgagccctatcactgagaaatacgtgtttcatgatttaactctgtgtgtgtgtgtgtgtgtgtgtgtgtgtgtgtntattttttttttggntgtnttca

SEQ ID NO: 1941 - DNA, 2067 bp, Homo sapiens
cgcccccgcctcttagaacctagtgggttccccccgggcctccaggattcggccgaggctcagcctgctttgagcctcagtgagaagtccttccgacaggagctgactcatgtcaggatggcaggcctggtatcttgctcgggccctggctgttggggttctcatgggttgcactgaccatactgcttacgtcttagccattccgtcctgctccccagctcgctctctgaagcacacatcattggctttcctatttttctgttcattttttaattgagcaaatgtctattgaacacttaaaattaattagaatgtggtaatggacatattactgagcctctccatttggaacccagtggagttgggatttctagaccctctttctgtttggatggtgtatgtgtatatgcatggggaaaggcacctggggcctgggggaggctataggatataagcattagggaccctgaggctttaagtggtttctatttcttcttagttattatgtgccaccttcttagttattatgtgccacctcccctatgagtgacgtgtttgatcactagcagaatagcaagcagagtatcattcatgctggggccagaatgatggccggttgccagatataactgctttggagcaaatctcttctgtttagagagatagaagttatgacatatgtaatacacatctgtgtacacagaaaccggcacctgccagacagagctggttctaagatttaatacagtgctttttttcctctttgaaatattttactttaataccagtgccttttcttgttgaacttcttggaaaagccaccaattctagatcttgatttgaattaatacacacaatatctgagacacttacacttttcaaaagatttgtgtatgcattgcctaattagagtagggggagaagggcaactattattatccctattttacaaaactgaggcttagtgaggttcagccacatgcctagacttatatactagttagtggtgcagccagggagaggactcagatttcctggaggcaaagtctatctctgaaactccatgaagacttttgcagccagttcccaccaatatgccccagacgtgagacaaacaaggacttttttttttatatagagccatccataaaatcctaagcccttttattaacgtataaccaggagaacatctgtgccaacggttggactttttatggctgagattcgggaggaagtgtgacaccaagcaggagaggaagaatgattttctttgtacttaggttttctaaggacattgttttaatctgtatcgtgccaaagttgtatcactgttaaacttctgaagacataaccagttgagtcttatttcaagatatgttctcaagccaattgtgtgcttctcttgtttctgtgattgctttctagccaaagcgaagcttgtacaggttgagtatcccttatccaaaatgcttggaaccagaagtgtttcaaattttagattattttcagattttggaatgtttgcatatacataatgagatattttgggaataggacccgagcctaaacacaaaattcattgatgtgtcagttacaccttatccacatagcctgagggtaattttatacgatattttaaatagttgtgtacatgaagcatggtttgtggtaacttatgtgaggggttttcccatttgttgtcttgttggtgctcaaaaagttttggattttggagcatttcggattttggatttttggattagggttgctcaacccatattattggctgtacatcctggtcacttctgacttctgtttttactaatggaagctttgcaaattgaattctcagtgagttgtatatttatacacctggcttgaagccttaattgtatataatgatgctttttaaaaaatgctatttggaagactatttatttctcgtgtatataatgtatataaaaaaatatggttagtgtttacctaaggttaaccaatttcaagattaaaatttttaaatagtaaaataataaaaaattataaagttaaaaaaaaaaaaaaaaaaaa

SEQ ID NO: 1942 - DNA, 2226 bp, Homo sapiens
ggttagctgtacgcctgcaggaccggtccggaattcccgggtcgacccacgcgtccgggggcggcccggccsggcccggaagctacagcagcggcgcggagactgcggggcgggccatggcggcgaacctgagccggaacgggccagcgctgcaagaggcctacgtgcgggtggtcaccgagaagtccccgaccgactgggctctctttacctatgaaggcaacagcaatgacatccgcgtggctggcacaggggagggtggcctggaggagatggtggaggagctcaacagcgggaaggtgatgtacgccttctgcagagtgaaggaccccaactctggactgcccaaatttgtcctcatcaactggacaggcgagggcgtgaacgatgtgcggaagggagcctgtgccagccacgtcagcaccatggccagcttcctgaagggggcccatgtgaccatcaacgcacgggccgaggaggatgtggagcctgagtgcatcatggagaaggtggccaaggcttcaggtgccaactacagctttcacaaggagagtggccgcttccaggacgtgggaccccaggccccagtgggctctgtgtaccagaagaccaatgccgtgtctgagattaaaagggttggtaaagacagcttctgggccaaagcagagaaggaggaggagaaccgtcggctggaggaaaagcggcgggccgaggaggcacagcggcagctggagcaggagcgccgggagcgtgagctgcgtgaggctgcacgccgggagcagcgctatcaggagcagggtggcgaggccagcccccagaggacgtgggagcagcagcaagaagtggtttcaaggaaccgaaatgagcaggagtctgccgtgcacccgagggagattttcaagcagaaggagagggccatgtccaccacctccatctccagtcctcagcctggcaagctgaggagccccttcctgcagaagcagctcacccaaccagagacccactttggcagagagccagctgctgccatctcaaggcccagggcagatctccctgctgaggagccggcgcccagcactcctccatgtctggtgcaggcagaagaggaggctgtgtatgaggaacctccagagcaggagaccttctacgagcagcccccactggtgcagcagcaaggtgctggctctgagcacattgaccaccacattcagggccaggggctcagtgggcaagggctctgtgcccgtgccctgtacgactaccaggcagccgacgacacagagatctcctttgaccccgagaacctcatcacgggcatcgaggtgatcgacgaaggctggtggcgtggctatgggccggatggccattttggcatgttccctgccaactacgtggagctcattgagtgaggctgagggcacatcttgcccttcccctctcagacatggcttccttattgctggaagaggaggcctgggagttgacattcagcactcttccaggaataggacccccagtgaggatgaggcctcagggctccctccggcttggcagactcagcctgtcaccccaaatgcagcaatggcctggtgattcccacacatccttcctgcatcccccgaccctcccagacagcttggctcttgcccctgacaggatactgagccaagccctgcctgtggccaagccctgagtggccactgccaagctgcggggaagggtcctgagcaggggcatctgggaggctctggctgccttctgcatttatttgccttttttctttttctcttgcttctaaggggtggtggccaccactgtttagaatgacccttgggaacagtgaacgtagagaattgtttttagcagagtttgtgaccaaagtcagagtggatcatggtggtttggcagcagggaatttgtcttgttggagcctgctctgtgctccccactccatttctctgtccctctgcctgggctatgggaagtggggatgcagatggccaagctcccaccctgggtattcaaaaacggcagacacaacatgttcctccacgcggctcactcgatgcctgcaggccccagtgtgtgcctcaactgattctgacttcaggaaaagtaacacagagtggccttggcctgttgtcttcccctattttctgtcccagctcatccgtgtctctgaagaacaaatatgcttttggaccacgaaaaaaaaaaaaaaaaaaa

SEQ ID NO: 1943 - DNA, 1758 bp, Homo sapiens
  SITE (26): n equals a,t,g, or c
  SITE (27): n equals a,t,g, or c
ggtcgacccacgcgtccgcttttttnnttttttttttttttttttttttttaagtctataagctttattgatactttgcttttacagttcacaatgcattccacagatttagttcagtacagcttaaaccacaatggtataaatcttcattttgtaattaataatttcttgcataacaatgtttgatatttgcaaacaaacaacatttttggaagcattagattcagtccatagattctgtgacaaaattaactacagtcagtctgtgcaatgaaattgatgttggagttctatgtgtgtggcatttcatgttgaaaacagatggtagtgctcctagaaatatttcttcttctagcttatgtgctttggaactacacatgtataaccaatgactgactctgaaatatcaagcactgtggggtggctggaaggtaaaggtctaagctttgtgaaacactatacatatataatctatatttacttatattggcaattaatataacagtaaaagtcacaatacacctagaacataccagaaaagcaagctttgtcattcctgctttaccggtatgatctcgtctaaacaaacatttcatttcagaaaatctgcatcaatctacacggaccatacacagtgcacaaactgaaaagggcttttttttttttttttctagctccaccatctctgcaacttgccaagatgcggcaagactatctgcaacaaagtaaaatatacaggttttttattccaccagtgcctcagataggaaaaagatatgattacggtttaaatccatacatagcagcttacaatacttaagatgatgaacacatggcagtcaagacaggtaatttttcctcacaacagtgcatggctaaaaataaagatctaacaacgatctgtgaaactgcactgcaacgtcaaggttcgttcttccctgaccctcccccgtataatcaaatgaatatcccctttaaagatgaactcctactaattattttgggcgttttcattcagctttgcgcttcaatccagggatttttgcttggattttagccatagcatctttaacattcttatttgcaagtcctagataatgatctatctgtgcctgatgccgttcataaataacaggaacactgaagagtgaaatgagagccaaaatcagtagtgtcagaccattaaacaaggcaccaacataggtaaatacccacatcaacactgcaaacttcagagaatcaactaaatcatcaactaagaagaggcgcctgagttcctttatcgtgcagttcacatgaccaagagcagaattactgtacttctgaaccaactcctcagatatagcaacttcagattccagatatgccctgaatgggtggccttcatctgatttctggatagcttggatcacacccttgtatatcctaaagctgatggtcacagagagcagggccaaggcaatgtaggctgttacgctcacaatgctgaatactgtcaatgaaagcagcaggaataggctggcaccaaacaccactccagtcttcttaatgtctctccagtacaggaggtcaacaactgcagaggagcgtatcacaggctcagatgcagcaggaagagcaaaaagggtctcatccactgagcccgaggagcccctgcgcttgggcgcggccggggtggaggggggcgcggcgggagccggggctggcggggtccacacgggctctgcctgggggctcacgctggccggggctcgtgcc

SEQ ID NO: 1944 - DNA, 1575 bp, Homo sapiens
ggcacgagaaagtgttgaatatctcatatagtttattgaatacctgcatccaaaagatgctggcaacacagcacactttagagcattggttgtttactctcttgatggtatggctgcccagcatcaagagttatcatactgcaaatcgatagcccaggaaaagagcaaaattcaaagttcaaagtagagtttttactgaatgcttgcttttgcaccgtcgtaaagttgaaaagaatttaaattgaaccatcataagctgcagactgtgcattttatattgaaaagttaatatttttaatttttaatgcagagaagtacccaaagcataagaacacaacacattttcacaaagcaaacacagccatggaaccagcacccatatcaactaacaaaatactagtttgggcttttttgtactttatacaaatggactcatataatgttcatcttttgggtctgcctgctttcattcaatattaggtttgtgggttcatctctgctgtgtgtagttctttcctgttctttatacagtgttccaaagtatagtatattacagtttacccattctactcttgatagtaaatgttttcacatttgggctattacaaatagtgctgcagtgaacattcacatacacatcttttggtgaacatgtgttacatttccaagtacaattgctgggtgatgagtatgcatactcttaaaacatggttgtaccaatttacacctctacgacagtggttccatacccttgccaacttcattttgttcattgtaggcattctcttgggcgtatagtgttattgcattttggttttaatttgcatttccctaatgactaatgcagttgaacacctttccaaatgataattggccatttggacatcatctttcgtgaagatcaagtcttgctcatttttccaatgggtcgtttgctatttttcttactgattcccaggaatcctttctatattctgaataccagtcctttgtattacaaatatgttgtactctgtgacttgttttatttttcaattttccagtttatgttgttgattgttttacttcatcccagaccaacagattctaaagcttaattaagctttttgatcagaaaaaaacccaacttggatacatcggagtaaaaactgcttctctcacctgctctacttatttcccttcagcatttctagtgagtcttactacatgcacaagtaagaaatacttttatgctgtttaatgttcaggttctgactaataagaagacgaccttctttggtggcaattctatctctatgattgattacctcatctggccctggtttgaacggctggaagcaatgaagttaaatgagtgtgtagaccacactccaaaactgaaactgtggatggcagccatgaaggaagatcccacagtctcagccctgcttactagtgagaaagactggcaaggtttcctagagctctacttacagaacagccctgaggcctgtgactatgggctctgaaaggggcaggagtcagcaataaagctatgtctgatattttccttcactaaaaaaaaaaaaaaaaaaa

SEQ ID NO: 1945 - DNA, 549 bp, Homo sapiens
ctacatagcgaacaagatcttttcagagtggtgtttctaaaagagcatgtacaaaagtggcctgtggacatttaggcctgggtgatgcatttgctcttcctgtttgtgccaatgtatcaatgtagagttgctctgttttcttcaactgtatttattgctgcatttctcagcataaacttatcccattgtattttttataaataaatattttttttaaatgttctctacagaagatttaaatcaacaaaaagatataaaattgcaaaggttgctcagtcaaaaccatgattatcaaggaagcaaagcttctggttccaaatttggtaatctgctacccatgttaagtttccagtttttatctggttgcccttcagtttagggaccactggcccagaacacacattactggcttagataccggcctgacataggaaagagagtggtagggtgaagagagtcattctctgcaggctcagagatgtgtaggcacaagggactcccgctatgtagggaatcgatatcaagccttatcgataccgtcgacctcga

SEQ ID NO: 1946 - DNA, 1397 bp, Homo sapiens
aaccaatcgagtacacggcggtcttgccaccagatagacggcgaaaccagcaaataatggcggaatcgttcggggcaggtgaacagggaatagaggccgtacaaggcgccgaacgaatggccgaagacggcttggttttgggtatcgatgcggtatttgctgttgagcagggcggagagttcgtcatcgagaaagcggctgaagcggtcggcttggccktattgtttgcgttcggattcgggcgcgttgtctggcagtggcggcgtgtagtcgagggcgcgttggcttaagtcgcggatggtgctgccggtgtagccgatgccgacaatcaggcaggcggcatggcttttggtgatggggttgatgagcagggattgcgccatattgaggatggcggggaaaaaggcatcaccgtcaaggatatacagcacgggatagccgcctgtcggacgctcgccgagtgccgcggcttgaatgcggtargtgcggccggtgtkggcggaagtaagggcggtttcttcggcttgcagcagagtggcggcttgccagttggggcggatgggcatgatggggtgctttaatcaatgggttgtttaagtaaaagggaaaaaggccgtctgaaaataggtttcagacggccttattgtaccgattcttgtctttttaacaatacgcgcgattagcgtacgtcaacgtaggagctgctgtgcagttcgcgcaggargttggtggtcgcctgttgcgctttttgttgggacaggtattggcggacggcgttttgttgacgctcttcaggcgtacctgcttcgcggacgtcgttcagcttgatgatgtgccagccgaattgggtgcggacaggggtgctgatttggccgggtttgagtttgtggacggcttcttcaaatggggcaaccatcatgccgtcggcaaaccagcccaaatcgccgccattgccggcgctgctgtcttgcgaagtattggcgtgccaaaccgccgaaatctgcgccgctgcgggcttgtgartagattttgcggatggtgctttctgcsccgacggcggcattgtcgttgtcggctttaatgaaggatgtgttgggcatggtattggcgcacagggtctgcttcaggcagggtgacgccttgttgtttggcctgctcgatgtagcgtgccacttcggagtsctcacgcggctgttttgcatgatggcttgttggcgcactttttcaacaataatgctgtcggcgatgtcttgacggacggcggcagacgggtttttgatgttggggttgtgcgcgataayggcttcgatttcgctatcggtcgcttggatgttgcggcgtttgcctgcttggaggatcagggattggttgaattcgatatcaagcttatcgatacc

SEQ ID NO: 1947 - DNA, 1285 bp, Homo sapiens
  SITE (315): n equals a,t,g, or c
cttgatacatttgttgaaaatgaattgatcatatatgtgagtgtttatttctacattctctattatattccattggtctatatgtccatccttgtgtcctagagaccacattgtgtcagtaccacattgttttgattactgcagctttgtaaaagttttgaaaatggcaggcctgagtcttccaactttgttctttttcaatatgattttagattgtttggggccctgggaaaattccatttacattttaaaatcagtttttacatttctgcaaataaaaaggcccttgggattttgataagggttgcattgaanctgtagatcactgggtaatatcgccaacttaacaatatttaatcttccaatctgtgaacacaggatgtatagttctatttatttaagtcttctttaatttttgtcaacagtgttttgtagtctttagtgcagaagtctttcaccttcttgttttaatttattcctagctattttactctttttgaygctatygtaagtggaattttaaaaattgacttccttcttgggctgttcattcctggtatatagaggcacaaatgattttcttaaaataaatgttgaacatgtaccctgcaattttgctggacttgtttattagctctactagtttgtggattctttgattttctagatagaagatgtcattattgaataaagagttttactgcttcctttccaatttggatgctattcatttacctgtttgtttatttatctgcctaattgtcatggttaaaactttcagtacattgttcaatagcactgggtaaagcatacagccatatcttactctttgttatgggagaaatttttcagttttttttctcattaagtatattagttgtggatttttcacaaatcctctttaacacattttgaaagttccatgtttttatcctgaaaggttgtagaattttgtcaaatgcttgttctgagtgaattgaaatgattgcatggattttttatccttcattgtattaatgtggtgtattacattgattgatactcttgkactgaaccacccttgkattcttgagataaattccatgtggtcatgatatataatcctttttaatatgctgctgaatttggcttactagtactttgktaaataaaagattttagtatctagtttgtcttttcttgtggtatatttgtctggctttggaatccatgtaatactggcctcatagaatgtattgcaaagttttttctcctctgttttttggaagagtttgagagggattgg

SEQ ID NO: 1948 - DNA, 985 bp, Homo sapiens
  SITE (372): n equals a,t,g, or c
  SITE (386): n equals a,t,g, or c
  SITE (391): n equals a,t,g, or c
aaccaatcctaatccctcctaaccccactcatagtccagagaagataaaaagttcagggacatggtgtactgctctccagatcctttcccagctgaaactctatacccatttagcactaatttcccattttccctagcccaagataaccaaccaccattctactttctctttgaatttgactcctaggtacctcacatatatattcctatttagtggaattgtagactatttatccttttgtgactggcttatttcacttagcactgttttctaggttcatccatgttgtagcttctgtcataatttccttcccttttaaggctgaataattttccatgtgtatatgtaccatatttgttcatccattcatncatgatagatactngagtngctctaccttttggcaattgtgagtgatgctggttatgaacatgggtgtacaaatgtctgttttgagtcctkgtttkgctttcgtgcattctattaaaaatgttaaggttcttkgctttttacttttttttctcttttatccaccttttgactttattcttaaagtttwatcttggtataataatttatggtatgttgcagaattaggagcaaagtcccgtgtgtccttcactcagtttcccccaatggtaacatttttcataattacagcacaatgtcaagaccgggaaattgacattgatacagtccatatacaggtgtcccttggtatctgtgggggattggttccagaaccctcgatgataccaaaatccatggatgcttgagtttattagataaaatggcatagtgttttcacataacctacacacatcttcctgtatactttaaatcatctttcgattacttataacacctaatataatataaatgccgtgtaaatagttatattgtattgattttatttgtattttttttattgttgttatttttcattgtgttttttccctgaatattttctatctgtgattggtt

SEQ ID NO: 1949 - DNA, 961 bp, Homo sapiens
  SITE (539): n equals a,t,g, or c
gcattgtgttaccatagattagttttgactgtttttaaattttgtgtaaatgaaatttggcaatccatacttttctatgccttgtttctttcaatcaacaaaatactactgcatattatgtttttgtatgtatcagtagtcttcctcattttattattgaatagtagtcaattgtgtaaatacaccgcaatttatctatacacctacttttgaatgttgcttttttcccaagttttttcatattatgtataactaccatgaatattcattacaagtctttgtgtggacttaattttttaggagtaaaatcggtgaataatatagtaggtgaatgtttaatttttcagggaattgcaaaattatttttatagttgttataccattttatatctccaagagcaatgtttcatacttccgtttgctctctatttttgaaaaccattgatgttgktagtatttatawttawttttgccatyctatgagtatctttctcaatatggctttaatttggatttkgagagtctatagtctttgctgntttatgtgcttattggtcctttttatatttttctttgtgaaatatatttgtgaaatatttactgttaattaacctatatctaagcttttaacttaatatctttatacatatgtttgtatttataggcataatgcagtgctagattttcttaattataaatcatgtamgagtacaaattgtaagcatttgtagccaaaatattaggagtattttgtggtctactgtaataaaatactgttctgaaagtcactactgttattttccaacttaaaaaaatggcaattgtgctatttctgagaccaaaaaatttttgagttcagatggctctatgctgaccaacagatggatcaggaaatagcagatggttttatgagcagttctgtcatctcagcatctgaaatgctttacatgccaatgctata

SEQ ID NO: 1950 - DNA, 1017 bp, Homo sapiens
tgacacattaatcaaagaaaatgtccatcccacatctttggtgtcatttttttaccttcttacttccttgcattaagaggcaaaagatccatatcaaattatgccatgtcttttgataaatacatttatgtgaaaacatataactcataactcttgatttttttcaccaaagaaagtagctgataataaaaaatgttccatttttcgtagcacaagctctatcaatttgagcttgttgatgcatttaagtgtgatgacattaattacactggcaaacactccaaaagcgcactttcttttatagcaaaatgccttttaaataaaatgttttcaaatctggcgaagaaagtttagaagggagataagcctcattattacttgtgattattataaatattaaacccttttatgtcataaattatagaaccttaaaaaagaattatcagcttcaagctaaatgctaaaataatttttcttcatagcaatatatctcaaagcaatgtgtgcataattataacttctgatatgttattagagctaaattttgatatgagaaatttttaaaactttatattttaatacaatttaagatttttccaatttttttaaatattgcatatttgatcaaagtggttgtgatttaagatgtaaaaattccccatttttggtaaacaaagtcttgtcaaaggatgagtagaaactacgtagctatgaaaaggttaattcatatattaggaacagttttactgcagaaaatttaaatcggcttaaaatgtttataccctcccactttctactgcaccaactctataatgaggtaggtcaattgagctttttacctgctttcaaaaatagcacaaaaatagttcttaagaattacgttgagtgagaatcagagattgaaaattatctgcaagaatatgtataacttccttctcccggcaccatcaaacgtgtttctctcctttattccccagattggttgaattcgatatcaagcttatcgataccgtcgac

SEQ ID NO: 1951 - DNA, 822 bp, Homo sapiens
  SITE (47): n equals a,t,g, or c
  SITE (799): n equals a,t,g, or c
  SITE (809): n equals a,t,g, or c
  SITE (815): n equals a,t,g, or c
  SITE (819): n equals a,t,g, or c
acccatggatttccgcccaaggctcggaaattaccccttcacttaangggaaccaaaagctggagcttcacgcggtggcggccgctctagaactagtggatcccccgggctgcaggaattctcggtcataggatatgcatattcggtttagtaaatactgccagtttttgaaagtgattgtactagttttacattcccagcaatagttgtataagatttcccttgttttgcatttttaccaatacttaaaatggcctgccttgagttgttgatacttgtgtcatttttgacatctgtcatccagactcaacctcctagggagcttgacccttcccttttttcagttttctctctagcctaggttcagtcagcaagacctatcagatttttcttttatattgcctttgtccttcctccattgccacagctcaaatattagtcatatatggagtaaatatcaggtgatttggatatcaggattatgacagtagtctgccagttggtgcatcttctagtatttctgcttttccaataaatcctgcacagccaagaaaatgcttcatgaaacaccgcaccattgctctgctcaaaagccgtcaacaacccttcattgcccattggatatcagccttcctccccctcttccttttccacctgtacctctcttccttcctcccttcttccgttctttttttttaattaaagtgtaatatatatgaagtgcactatgaccgagaattcgatatcaagcttatcgataccgtcgacctcgagggggggcccggtacccaattcgccntgggttccanagaagntcantag

SEQ ID NO: 1952 - DNA, 822 bp, Homo sapiens; identical to SEQ ID NO: 1951
  SITE (47): n equals a,t,g, or c
  SITE (799): n equals a,t,g, or c
  SITE (809): n equals a,t,g, or c
  SITE (815): n equals a,t,g, or c
  SITE (819): n equals a,t,g, or c

SEQ ID NO: 1953 - DNA, 1087 bp, Homo sapiens
tatagcattgaaaatcaaataatctaaaagaaaaaaaacaaacaaaaaaataattaactgaggagaaaagacaactactatcagagaacaggtcataacaagatacttcttttccccaaagccattgctagctagtatatatatattcccttcccctgtagtttgttccaaatttcaagtgtgatgatagtttatttgcacaaacgagacagacaaaagttattctaactagaatgcatgctctctgagagcaagactaatacctctgattcttttagagagcctaggtcatgtattttgggtgtgggaggccagattgtgccacccccaaatatgaagtattactgagctaaagacaattaagggaagcaaatgcaggaaagctctctactcttcctctctttgtcttaaagcaggacatagatttataaggacaaaaggcatcccacccctctttctccaagtagaacaaaggttaaccactaaagacaacttttgaccctgattgtctagagatggtactggaagaattttcatgcataagtttcactaaccagcctttatctgccattgttttgccttctcacaacttgctgctcctgggagactcaaagttcttttcctttgtcttgtcacttctctaaaatgtacggttctttgttgaagatgttgttgggacaactaagcttctcctcaaagactcaacctcctggtcataagttgcaaaagttgtaaatcaaccctacccactttcttccccaccttcttcttttcacaaatcacatgtttaccttatttggaaaagtttaagtctcagccaatcaggatcagcttagattgtgtggtccaaccccagccaataggcaaaggacacagaaacaggaactgcactagggttaaaagctccttcctcctttgttcagtgtgctcttgtgattgcatcaggtgcaagtagtacccttctgcagaagtaaagttgccttgctgagaaattttctgtctgaatgcgggtttcttttggctacactgagcacttgtttccaacaatgctatagaattcgatatcaagcttatcgataccgtcgac

SEQ ID NO: 1954 - DNA, 1220 bp, Homo sapiens
  SITE (958): n equals a,t,g, or c
aaccaatcaactatcaagcagtagtaatctatctttaaatttctactcggtcatgcaagtaaaaatgccatcacgccttcaatcccaaaattcccaaattcccaaatgtaaaaaagtccatgcaacaaaatgagaaataagaaccgttacaactgagattactggagtctcttccggaagacaaattatcactgtaatatgtaatatgaacatgtgaaggtctggctcatgttttatgatacacaggcttcaaaagttgtatgagctcagatagagactgttgtttgcaatttgttctttcactaattagctatgtgatttagttaaaaagttcaaaagattgtagtaacgattaaacaaatgtgtggaagtttgacctagcagtgtctgacccactcatgatatatatccaaccaatactagttagttctgattaccttaaaactggctgctcaacttacaaatcttaggtcaaatcacaggccctctaacgactacatataagaaaaacctatcaccaacgatcataaggtgccatatcaccaaggatcttctatgccatgcagacccaatcaatacaaggcagaattgatttaatacagtgtttctctaagtatgaataggcaggtatcctaatcattaagaaaaggtgctttggaagcagaaaggctgcgttcaaattctggctctatcacttaccatctacctaaatttaggcagttcttttattctctgagcctacttaacttatctgtattattcctataccccactgagttattgtgaggattaaataagtacagagaaagtgtgtggaaaagtgcttcaataagaatgttagctattgccactgctattattatgctccctaaagaatattccatgacccaataaacaggaaacactgctagagagtcacatgtgttattgcatttgacatcctgaggaaaaaaaaaanccctatttaatcaaataattcttaaatttatttaactctggcatccttttctcaaataacattaactactgtggtagtaatgtgccgaagaatactcttaagtgcaatgaacactataaattttctataaagctgtatatctaaacataccactgtaccacatagcctatttctagtccattccagatgcaatcaaaatttccctggcctcaaaaattagaagactaaaactttcattacctcttgttcagaaggattggtt

SEQ ID NO: 1955 - DNA, 951 bp, Homo sapiens
ttctatagcattgcatttcttaagtaactacatacacacataaatatatcactatcaaaaaacatttctgtcacctgagggagtttcgaattttctatgtctcttcctagtctctttccccaaacctctactaaccatagttaattttgtctgaggattttatataagtgaaattatacagtaagtgtaaagtttttgagatctattcttgatgtactttatctgtaatttgttgcttttacttggacatatatatgtgtatatatggatgtctgtctatatatatatgtataagtaaaaactttagaaattttagaaagaaagcttttagaaatagagctactatgatcactctcgaaccaggtagtctttctttgttcatatgctttcttttctcttaagaaagtattaaggagtggaattgctgagtcatagcaaaaaaaatgtatgtttaacattttaagtagcttctaaatcatttttcaaagtgattgtgtcatttcacactcccctcatcagtatatgagagttttcacttaatttccagcatttaagattgtcagtctttcattttaatcatcttcttttgatgcttctttttgtctctgttctctaattaatgaaaaacattgggatcacatcaagagatataaaaaaaattatgcctttccaaggattaacctttgtgaaatttcagtgtgtcttgttttctcactataaatcaacaggtctgctgcacgagagtcagaacatcactacaaaatgaaaaacctgcaccaggagagaagcgagaaggcactgctaagggacactcgatttactcaagatggaataagtacaaagttacgtagtcaggagaactagtacgaaaaaggaatcaggtctgtgtcagagtaaaaattgcatctagcaaatttaaacaggcaaaaaagagttattcaaggccaatgc

SEQ ID NO: 1956 - DNA, 1071 bp, Homo sapiens
aaactccgtctccaaaaaacaaaaaaaacaatataacacgaacatgctaaaatgttcacatttagggaacctgggtaaaggaatacaggagttctttaaattactttcctggcccttccacaagtctgaaattggaaattatttcaaaataaaattaaaaaaaaaaaggatccttgcaccagcttcgataattaaatgatcatcaagctctctaaacaagctaatgacactgggaaatgaaggactttgtggtgactgggaaaaggaaccccgattgtgtgttctcactacagggatgtcctcaacgttcttattctctttggctcttgctgtgggtcattggagacaatgtcctgaagaaagttctatttttctgccttttaaaaaacagaatacttaaagtaatttcacaaaaaaaatggccatctgtgaaaggtctatttccaatgtgctctgcctaaccactctggaatacatttcttgtgttaacattatagattaatttctccctctctaataaccatttaagtacagtgaatgattctggcttgcctatgaactaactattctgctccttggtgccaacggctagaactaaaaaaagaaaaatcaattaaccttatgctcctggtatttgtataaactgctactgattacaagcaggatgagtggaaatttgaaggctgttcttggccatttcattcacattaattctaaatcagaataaaaagctacaaaattcaaagtgacggtggatcagaatcctggagcttttatttttctggcaaagccgaaagtgctttccttccctcggtgagccttctggttgctgggccaagctgctggctgtaccctcctccccacagtgcctccacgctcacctgacgctgggaggtagggtggacatccactgctccttcagtcactgaagattaccctttccagaggcgacatctgttttaaacttaaaatttctccttacctagactcttctgaacattccggtttttttttttttttttttttgagacggagtttgaattcgatatcaagcttatcgataccgtcgac

SEQ ID NO: 1957 - DNA, 563 bp, Homo sapiens
ctacatagcgatagtatggtttgataatacagtttttctcctctagctgcctcctgttcttgaggtaatgctcagtgattaactagataggactagataatttatttcaccttggcaggtcttgcctccaagttggcctattcctatggtatttccttttctttcttttgcttcttcctgcacactaagtatggtattttctgacagtatttttcttaattctttatttatttttcttggtaatttcttgctgtagagctggtacccattagacataatgactttccttgacttgcttcttgctcataaatttctgtaagacaatcaggaagtttttagaaacaaacagtggaaccaattaggctgttaagtgagacacgcctaaattaagctatgaggaaataaatacagctccagcaaaaatagaaataattttcagattatccatgcttttgtttccctggttttcttcgaacctcatttcctcaagctatgaagtgaaatgaagtggtaagtacaccgctatgtaggaattcgatatcaagcttatcgataccgtcgac

SEQ ID NO: 1958 - DNA, 2930 bp, Homo sapiens
  SITE (1911): n equals a,t,g, or c
  SITE (2687): n equals a,t,g, or c
  SITE (2700): n equals a,t,g, or c
  SITE (2775): n equals a,t,g, or c
  SITE (2888): n equals a,t,g, or c
  SITE (2897): n equals a,t,g, or c
  SITE (2907): n equals a,t,g, or c
  SITE (2917): n equals a,t,g, or c
  SITE (2918): n equals a,t,g, or c
cggcacgaggtcactaataaccttttcaagtgattttggctattctctaatgaagatatggtccatttgtttttcttcctgcaatgtggtgtgcagagatgctgcatatcctttttatgggattgcgtgtgaatttgaaccatgagacattcctaataatttgttgtgagatataccaagcatggatgataagtgtgtttttagtggtgtgttgtttttttaaagaggtgattcaagtaccgttgctaagctgtcaacataccaagctgttgaaaaaattgaccatttctttcagaagtaattctcagcctgtggaataatagcaggtgaagacttcatagaaggcgacagattgatagggaggctattgaagcagtttttctgaagcctgcattttgagttagtttatagtgctaatagattctatataactgtgagagtttggtagtaaaccagtagggattgttttctctcctaaaaatttgcacactacttcattgtctaccaactttttacatattggaaaatagaaattgcaaatacatacatgtatggaaacatattcagattgggaaaaacaatggacattagtttttaaaaagttacgtggaagcaagatttctatatttgtttttttaaaggaagcagtcattctttctactaaatccatttcaagctagttctctgaaaattttgccatttatctacagaaatttgattataaatatgttcctttttcaaagaaactttattctagaacaaaatagtctatatggtacttgatctacatttaagtggaaaaattagcagtatttgaaagctcagtttatgtcattgtcttaacttcagatacaaataactgaacagaaagttttaacctttaatatctcatgttctgttttttattcagtattttcctttatgttaattcaattatatacttctgaatggcaccttactttttggaaacaaatcttctgttatttacaaaataataatttttaaaaaacatttaaaaaaatccaaagctgctctcgataatagtcaacatttgcatatatatggaatttcttactttttttctcccaaactctatttaataaacttattttaatgtttgtgtatttcatgtataattgtgatctcaattataaaagtttaattcagcatgtctttgagccaatataattactgcacacccactaaattgggatcagccattataaataatgtagttttagaataataaaacatgacacatatatatatatatatatatatatagtatatattggcacatcggtgaaagtttatatgtgcagaagtttttttctttctcaagttaaaaattattttttgccatatgtaattttgtgttgcaggctgtcgagagataaaaatgattttaaatctgtgtactgatgattctttcggtgttaagaaacacagggttgtgtacttccctttttatgggcttatggattctatttatattaagacctgtttataattgttttctgccaaagggaattgtctaacttcagatttctacattgggttcatacttactgttttatatcagaaataaaaaaatagcttctgctttttcatatgaaatcttggtacatcagaaagaattcctgaaaatttataatagaatgaattttattaatgcagaaaaataccccagggtgttaaaatatatgaagtgtgggatatattcttatagtttgtaaaatgtagtcaaccaatactgtcttctaatttggtaatttatttataaaattacttaaacattaggtaattatatttgttaggatttgaaattatttgtagttaaatgtcatgctgtttgaaataattgatactggtcttacgtaatacattttactgtatgttttgaagatggtnataatttcactttcaaaatttaaaaaatcaatttttaaatgttttaaaaacatatagcttagggatttttttaaaaaaggttttcttagtaaaaacataaatttaaaagcccctgagttctaggagagggcttattgaattgctataagaaagctggagttactttgataagtaataaattataaatagcactgatctataatgctttatttctatcggaaggtactttttcttctttcatcatcagttttagccagttagtaaatgggaatactcagttttagggatttgatttttgtttggtttaattttctttcaaaaattaaaagtatatttctaaaagttttccccagaggccagatacagtggctcatgcctataatcccagcactttgggagcctgagataggagtattgcttgaggctaggagtttgagaccaacctggcaacatggcaagaccctatctctacaaaaattttaaaacttagccaggtgtggtagtgcacctgtagtcccagctagtcagtaggctgaggtgggagtattgcttgaggctgcagtgaggtgtgatcacgccactgcactccggcctgacagaatgagatcctgtctcaaaaagaaaattccccagaagaagaattctaattttatcaagctgaattaaagtttgagagtcttttttttaaaatcttactgtgtcaaaagaggcattatgttgcttgtgtgatatagtgaatagtgtccctccaaatttcatgtacacctggaatgtcncaatgtgacttancagtacccacccctcacccccgcccttatctgtggtggatacatttgcaagatccccagtggatgcctgaaaccncagatagtactgaaccttatatatactgtttgttttcctatgcatacatatccctatgataaagtttatgaatttggcacttaacagcagaactaataagatgaaaaagttgnaacaatatnctctaataanagttatttannatgtaaaaaaaa

SEQ ID NO: 1959 - DNA, 932 bp, Homo sapiens
cgaagacttcgagtttgcactagacatgacgagggatgaatacaacgccctgcccgcctggaagcaggtgaacctgaagaaagcaaaaggcctgttctgagtggggagacgccagaggagcctcacggtcacgtccaacaacaccactgcaccagggaaatggatatatatttttggactggtgtttttcacaaagtatttttcaatcagagttttcagaacctgacattgttaaagatactgcttgtcccggagttgtgtattttgtaaatgttcaagggaactgtttggaaacttctttccaccatttcaggaggttatcagaattaataaaagtatctgttatgtgcacttaagccgcagctgctatagatagcactgccttcttgttccagctaggcaatgccttttttttttttttttgaagcagttctctttataaagtgttattttgatagtttgtggattctaaaatatatatatatttatataaacaccatataagtcaaatatgtatttaacaaagcaatatgtattcattcactttcaagatttgttttggtgtcaaaataacatgaaaaggtagatggagttgcttctgttgaattagctctgccaccaatatgtatcttcatacacgtttggaaatgtttcctgcagcattaggtatgacttgttctgagtactgcttccggtgctaaaatgaacaaagaatttgtacttaatggcatggactctggagaatctatgcgaatcaacctttctaccttaatatctccccaaaaatgtatagtgccttgtttttatgtacagtttatatacagaaaagtttgctctgcatttttgatgatggtttggaacattatctacaattttactctcaaatagtcaaaataaaaacatctcaatttctaaaaaaaaaaaaaaaaaaa

SEQ ID NO: 1960 - DNA, 2904 bp, Homo sapiens
  SITE (2899): n equals a,t,g, or c
ggcgtcttgtgatagagaaatttcagaaagcaccttttgaagaaatagcagcacagtgtgaatccaaagcaaatttgcttcatgatagacttgcccaaatattggaactcaccatacgtcctcctcccagtccatcaggaacactgaccattacttctgggcatgcccaataccaatctgtcccagtctatgagatgaagtttccagatctgtgtgtgtactgatcggcgcatgaagacctcagcatatgatttgtaaagcctaaaaattaaggccaagctgagctttcagggtttacttaatgtgtattaacatacttcttgaaaataatgatggaacatatctttaaccaaatgtttggcataccatattagaagttttggagctatatataatttcgagtactttcaaagatagatttatgccatgttaatttgctttgaggttcctgttgcctttttaagttgaacatgttttggtttcactttattccactgttaagtagtatgttttaaacttttcacaaatgtaatgttttttaaaaagtaagccttcagaggattgaaactgtataaattgtttatctcttaaacatctacacagccgcttagatgtagaatttttgttgttgttttctgcaaaggcagatacatttaaatatattcctagtcctggggctgcaaaactgttcggtggctttttgtccccatgctttagataagctgggataggcaccttgctattcagttactataataatatgtgataggcattcctcatcttcttcacaataataggacatctgttgaatagcattcctcgaatataaccctaaaaacgccatactttaaattgtctggttcttgtaatattgtgtttcctgccaagagtttgaccattctgcttgagaagtgtagagcttactcttggagtaccaaactgtgcaatatttttacatcataagatgtattagtttacaggctgtgctttgaaattatagtagtattttgctgtggctccattaattaaatgagatatatatttagtgcagaaaaaagacatttaaaacagctattagttcacctgtgaagagtctgtacattttgatttctattaagagcacatttatttacatttgtatattattttaaatcctcatagtcaaaaaattctccagatggacttttaatttgtaagatttgaactgtgacttgtatacatctgtttagaatcaattatatttgaaaagctgcctgtgttttaacagtcaagtgtgctaaagtttgtcaatttaagctgcttttgatttcagctaccaagatcacaggtgcactctacacataacactgacagacccataacattacatacatcttagtgaattctatcacatggtaaaatgaacagctttctttgtaactcataaaattctcttaggacatttttataaagtcacctgtttatagttctatcttttcagattccatttctttttacataaaacagcatacatatcaaaaactgtagcctagaatacagtttaatttttggcttttgtttttgtttaaaaaattgcagtgaagaatgggatgtttgtgtttatggctatttgggcacctttagtagaaacagacaaaagtaaggaaacgataataggacaagcatacttgaaaatttctgaatacttaaacaaaagcgcaacatcttgaaaaccagtctagtcattgaaacctatgaaatgacactgaaagatcctgggctgcttcttaaataagtagatcagcaagacttgtttcagagtgacagtggagtcgttaccgctggaggactaaagggccctgtggcagctgtcactggaactttgcctcttgatcaggaaaaatgcttcaccagtccgtaaagccaagttgtatttttttwattgcccttttttccttctgtatttttaaagaaggatgttaatttttgactatatattttaaaaaaatctaagcagggggacatgcaaaaacaatcatcatccacttggatgtcattttatagattaacactgtgtgcttttgtatggaaaaaatatatataatttaatagtataaaaaataaaatatatattcatttgcacttacgtgaaacacaaactttgctctacaaaatttcgtgtttcttagtgattttaaaatgcatgtattgcatgtaaaggaaaaccattacaattaatgtttatcacacctttatcttggtctttgttgatttgggttttgttggggtttttgttactgtttttaaattacagtaggcttctatatatcctggatttctgaactggtcttgttgacaaggattcccaagaaatggatcttttcactggctgactctcccatatctgcaagagattctgcaggaactgggtgtgcacacggtgttgtagccagttcaggtactgaatatttaggatttggtgaagttcactgtattgctatatttttgtagataaataaaactcaataaattgttaatcattctctttttgctgtatagaattgcttatatcactctttctttcatgacattggttaacatttaaatgttcctcctgtacttgtgttgtctgtgaccgcttatagagttttattgttattggtgtttacctgaatacctatgcgtacacacacacatatttccttaatacttctgaactcattatcttttagaataataatactactacactttaccagcaattaacttctccctacccaaaatgtttttcttcctgtctgaaaatggaactaatttgtcttattcgtgcttatatctgtattaaatgcaataaagttagtttttgaaatgtaaaaaaaaaaaaaaaaaaaaaaaaaaaaaaaaaaaaaaaagggggggnccccc

SEQ ID NO: 1961 - DNA, 1959 bp, Homo sapiens
cggcacgaggtggaacataggcaggattttggattaatagagaaattttgataagaatggagacgctacgacagatgtaggaagtcatctacctttgatattagccatagaacttgaacactaactatatcctatgcatagtatgcagaacacttttctaagtttactttgagcctacttgcaagtggaagatatatatattctcacatggtttttacatttttctctatcgtgttagaagctctaataatgctagtggagcagttgacatccagggttttttttcctgcctgtcatacttgctaaacaagagcacagcgggcctgtcagatgaagtcaggagccatacgtgaccgctcgtagaacacagtaaccaaacacatacatggattttgccaagtgctgccagtagccaaaacaaagtctttttagggcaatagaggaaattattttgtgtctcaggtgtcagtcttaggaatggaagtttaataacaaatgggccaaactcgcaggacattccttctatgagcgcttcagaattttgctgtgaacagtcctcttggacacaggttggggtgcccttgtttgggtttgttttggtggaaaacatcacaaacctggcacaccatttgaatatccctaatatcattccagtcgctttcctcatcagttgcctttctatttcagttcattcacagatctcacttctgaatgtgccacttccagtagacatgctggtcaaagagcagtcatcattggggtgaagtgttcttgacagtttaatatgattcacttttctccaaagacatgtaaaaggctgttacgaaagcttggcttctgtcatggagacggaaatgggcaagcttccttccgtagcctcttgttaatccttaaacattaaatatttcgggggtaatagagccactggtgagtaaaaacctatataaaaaccaaaattataggattttttcttttttagtaaaaacctgtatcaaaaccaaaattataggatttttttcttttttagtaaaaacctatataaaaaccaaaattataggattttttcttttttagtaaaaacctatatgaaaaccaaaattataggatttttttcttttttagtaaaaacctgtataaaaaccaaaattataggttttttttctttttttttagagagagagattagaaaacgacattaggaatttcactttaaaatgcgcattacaaacttcttaggtgttccaggaattatcaagtgactttaaaatgacttttccaacctgctttgtttttaaaaattatattccagttttaatcattgtaaaaaaagcacctggagtttcaaaacatgtgaatactaccaagtttctgtccccaaagtcaggcatcactgctagtcttttgggacagatgggacagatgttcactttaatgttttacttgaagttttactgctctttgccatgtggtaaaaagaggctgagacatatttaagaattccaagaggatattatgtgtcagaatttcagacactgatgagaagtttttaattgttcttttttatttgattttggaattcaggtgcactctattcaagtgcaaggatatcagaagtttttttttatttaaaaaatttttttttcgagatggagtttcactcggttgcccaggctggagtgcaatggcagcttactgcaacctccacctcctggttcaagcgattctcctgcctcagcctcccaagtagctgggattacaggcacgcgccaccacacctggctaattctatttagtagaaatggagtctcaccatgttggtcaggctggtctcgaactcctgacctcaggtgatccacccaccttggcctcccagcgtgctgggattataggcatgagccaccaggccggccccaggattttatattaagccttcttgctctcaaaaaaaaaaaaaaaaaa

SEQ ID NO: 1962 - DNA, 1139 bp, Homo sapiens
ggcacgagcaggcatgagccaccacggcccgccaaaaggctttaacccatgaacaaatgttggatcctgacattttgtttaagagtgatttgttcaataattgaactgagttaacattcttggtaaaccaggtaattgaatgaagaaaggtcactaaagggagaaatgacatgttttctattttctttttcatgaaaacactgtttttccccctaataaagcatattttactttggtgcttatttttcctccttgcagtctaataaaaaaatctggacaatcaaaccttaaaatagctacactctgccctctgtaatgtagcattcataaaaatttggaagtatttacatcctctttcaagatgagcttatatgacacaattattatttgctgatacatgaaaatactgcactttaagtttctcaagactctgaaatatgtaaaattcaatatttttatattcccagaaattgtttcttacaggttgaaagtcttttaagggcatcacaaattaacatttactcctaatgcacgcctagaatgtattttaaatacttactaagaagaatgaaaattctttggttgttttatatataaataaggcatatataatgacactgtgttctgtgagggagcaggccctgtgagaatcaattcaggacagtatttttttttgtcctttctccatccttgatcagagataaactattaaaactttaaaaaatactcaaaaatatgtaagttttttggttgaacctttagatttgctcataatgtttaacataacaacatttatttcaaatcactgaattcatggagatgtggacacgcttggtttgctctatttttgtttatgtgtgatagtggttctgtcatcatcattcatgttttttaaggcctggtcataaaactttaaattttactagtgttacttaatgtatattctaaaaagagaatgcagtaactaatgccctaaatgtttgatctctgtttgtcattactttttcaaaattatttttttctgtaaagtataatatataaaacttcttgcttaaattgaatttctatattagtggttaattgcagtttattaaagggatcattatcagtaaaaaaaacaaaaaaaaaaaaaaaaaaaa

SEQ ID NO: 1963 - DNA, 2455 bp, Homo sapiens
  SITE (2454): n equals a,t,g, or c
  SITE (2455): n equals a,t,g, or c
ggcacgagcttgaaagcatgaagaccagttatatagggaacaggtttctctcagtggcacattttgctttttctgagccccaaatacattgcctgggcatgaacattgttaccgtaaattgcacatggtcatggactgaattatgtgactttaaaggatgtaactgcccaacatttgcagattctgggtggtctatgtgaccatttgtctcgtatccaaaaaccccggggctattggaacccttccaacactttttcctttgtcatagacaagtttatatataacttaccaagatgttggctgtcctggtgtattgccagacagctctcttttggttcccattccaaatgtgctgctgtccttctttgcatttcacaatatcaaagaaaccaccacccttcttcctaacagcattttatgccttttattccacattaaatgggaattgtgcctacttaggagtgcccctccaattaattacatgtgtccaagaataatccaagctagagacacaaggtgggaaaacatttcaaaaaaaaaaagtcctcttaaggccagtaatttatctgaaaaggtattttatcacaccttgacaccttatatatgagcctattaggagctgcaggtggtttcatagggtaaaatccaagaaaagagaaggatgtgtggggtttctattagaagataattttgttctcattttaccttttcttttatgatccttctctgctagaacaggttaattctccaaatttgttttgttttgttttgttattttttagggaactcttttgcaaaagcaatggtcggatgtaaataacatttaaagtatagtgcacataacttccccggactgttccaatctgataatttgtaaatgctttagagtttttttaattaacacttgtgttgctaaattctatttatgtaagtctgctaaagttttttagcccacttaaaacttaagacaaccatttaaaataatggatgggttactatgagcaatttcgctttcagaacccccttgttttagtatatgaaaaagcctaatgcgcattaatgaggttgaagagactatgagaaatatgtatagtgtatattttaaaacagctttgcttgtattgtgaagatttaaaaacaaacttgagatttttaacgtaactattaacacagttttaacataagttatcccactgggtttaagagcatcttgaatgtataatcctttttgtaacccaggttggtttctacttttaccagtcacccaaacatatttatgtttttagttttatgtactcatttccctttgttttcctcaaacagcatgatttttttgcacatgtagaaattttttaaaagaaagaaattagtacatcattttctctggattttcttcacttccctcttcctttctactaactccttccttaaaggccatatcactccatttgcattatttgtgcaaatgccagggttggtttttatttttatttttgctatttacctaaaaaaagaaaatgcttcagtcaattgcttttttatttaaaaaaaaagaaaagaaaaaaagctgtaaccttatcatttctgagtagaccattgagcgatgaatgcacacctgtagtagcccaggaccagctgtggtggctaaagggaatatgttaattaagcaagaggttcttttctaaaagtggtatctgttatccacaatgtattttagttattcccacaagtcaggggtccagataaaatgagggttatcagctaactgatatgctatcattgaggttcatcaatgaatttgtacatttctagttccctttggtgaagggaaaaatgatgattttgcaagacctagattttggcttggtttcttgcctccttttttggcagccttcatcttctcatctcccaaaccccctgagcccgtagkttttcatagtggacaaagaacttgtggtcttttaaaactgggactgatacttttttgagagagtatcgtgtcgaaagtgtgatgttctaccactttaccaataactaattttaaatacacattgtcctctcgatttttggaccaaacagacgctcacagtggaggcttatcaagggttgcattggggaagaagcctctccctctctgtcagcaccagctggtaaaggtgactgtacagatgtgcattttccttttggtataaatggtccacagcactaactggtaaggcttattgtacagtatattgtcagtattcttctggttcagcataccttatagttcatatataacctgtattaattgtatagattgtgcattaaaagctgttaccaagttgtcagaacataagagcgaaaacaaggtcatatgtaatattttgtttgtaagtatcctttgtatcatagcaaaggaaatgtttaaaaaaatcaactgtaataaagtaattttagtacaaaaaaaaaaann

SEQ ID NO: 1964 - DNA, 772 bp, Homo sapiens
ggcacagcggagggtgcagtgagctgagatcgcaccactgcactccagcctggcggcagggcaagactctgtctcaaaaaaaaaaaagaaaaagaaaagtgtgctctttcatttccaagtatttaaaatactcctgttatcatgttgttatttttagtttcacatttggcctgagcacaagctcgtttaatttcaaaacatttatatttgttgaagtttgttttggggccataaacaaaaagcccataaacaacatgcttgtggagtattccgtaggtacttgtaaaaaggatgtatatyctggtgttgtttggtaaaatattctgtgtttatggatcctgttgattaatgatgttattcagactttctatattttcctcattttttgtctaatattttgctaaaagaaggatgttaaagtccccaacagtaattgtggaattttttatttcttctttcagttctatcactttttgcttcatatatttgaatgttctcttgtttggtgtatatgcatttatgattattatatcttcttcatgtattgtccctcttatcattatgaaactttcctctttgtccatgttcattttctgagctctgaagtatactttgtcttacactaatacaaggtataattgctgcatttttaaaagttaatgtttgcatggcttatctttgtccatttcttttattttcaacctgcctacatcattatatttgaagtaaattttatgtagacaacaaaaaaaaaaaaaaaaaaaaactcgag

SEQ ID NO: 1965 - DNA, 1481 bp, Homo sapiens
ggcacgaggtcaagggcagctttgctcatatttcccatgatttcatgtactgcattatttgagaagctgctcaacttgcaaaatcagttttcctctcaataaaattatagctctaatgtttgcatataagggaagtagttatcatgttagtaatacctctaatagtataaaccccaccccaaaattagccagtaatcctgtaggaaggtactgtatgatcaaatgtttaatcatataaatagaatgtaaatgtctcactgagcactgttttctagtgtatcaaaatgctcttatttcatcattcacttcactgtgctgttgttatgatgtgcttaacagggaacgtgattagtgaaaggaagataaacgtgggatgttactccaaaacttcgtttaatgaatgcttaaagaattcaaattttatctgcctctcttgtaatttggatctcttcttaatgtacatagtgctaacatgaagacctttttctgcactatatgcaaacagggtaactaactaaaacaaagccactttcaatcttcaatccttgaaggtatatctaggtttatgacagtaattgtgtttacattttatggtgcctagtattgacaaaatgttatttccctacattaaacatgactccatagaccttttcatttgtgggtttttatttcctatgatgtatactgccactaaccttccaaaaattacttagtattgcaaagtcaggaatcatcaggaacgtttagctgacaaaatacttgtctgttttaaaaacctgttcaagtctaccaacctgttcaagtctaccaattataagggcaaattggagaaaaagaaaaaatatatactcaagagtggtatcttgcagtatcggcactgtacaaaaaaatcttccaatttagttgttgtagagaaaacatgcagaacaaatgaagacaaaacatacattttgtaccaaccatccaattagcttatgttaactgacaagctccatttaaacagatgtccatcagatgacaagaaaggctgctgtactgaagtaaaacaaacaatacctgaatgctctgtagcctaaactccaaacatcctcttccatatggatccactggctggacaaactgcaccagttgctgcttcaatttatacctcaattttcactgtgtccaggtggtactttggctcgttggctagattaaccttctctgtccgagtgtgccacacgagaacctgaaggggaaggaaatagcttgggtagcgcactcttcatggtgacactcgaggtcgggcagcacaagtgtaatgaataccttagtgcagttatttgctttcggttccagttcttcgactgttgttatctgtttgagaaagtcagattcttgcatccctggctgggatccacgacgcttaaatacagcttttggattggacaaaatgacttgaagacttacagcaaatcctttgtgaaaaataaaaaaaaaaa

SEQ ID NO: 1966 - DNA, 1377 bp, Homo sapiens
ggaaattgtactttattttatataatgtcatgtaaaactttgcttaagatggtctggttttttttttgtttttgtttggttttttttttccatgaaaacaaatgactgttcctttttatttaatttgggaggcagggggaatcagaaggcccttctttataatgagctattcatattgcaggagtcagaatgaattgatacaggtgaatttttagttacaggctaaattgcataaaagctttgtcagcttccagcatcaggggagtcatttaatagcctttttccttatttgctagtatggttaaatgagaaaatagtaaaatagatacaaagtcatctatatagtgtgagaacgtgggtgactttttcaaagtttataatttaaaaagctccaaataactggctttttcaagagacttatactcatgctcttggctatactgtgaattactgaaatgttgaacaaacctgtgaaagacatacattagccctttaagatggccaggagctaagcttgagtctcctttactgaatttcgttcttagtgcaggttacttgtagattctagtcttcacaggctccctggggctcttaactagtcacactgggagtcatgaatgtctttccaataattcagggaattctagagatcctcaaactgtaaggtctattcatactcaacacaaggaaaaaacctcattaaaattaatgactaatcaggaggcaacgtaaccaaaagcacagtgaatgaaagttttcatggtaggttcaacatgggtttattgctagaaagatccaggggatagctttaggtttaacttcggctcaccaacgtaactttctaatcatttatttcagtaatagctagaagtgggtctgaatgttttcccagagtctgatacgtgtttttttttgccagaagagaggtcttcaggagacttcatttaaattctgattattaaactgaggctttaattgatgttaatgccttatgtcaaatgtaaagttagaatttgctagggctgggatagggagtgatatttctaggacttagacattgaaaactaattcagcctgtagtaacctggatggttttcaatggcatggttagtcaaattcatggttttaaacttagaagcagctttcgggggagagggtaggttggagcatttattacatattttactgtttaatgtcttaaccgtgggccttttaatttgtaaacactgaaatgattgttgggctgtggaaaacatttacctatttaccttggaagttttaaaagacagtccactttttagcatgtgtgttgtgtccagcctgtggtcgtcttaactaataaatgtgatttttctccccaaaaaaaaaaaaaaaaaa

SEQ ID NO: 1967 - DNA, 1173 bp, Homo sapiens
gaactagtggatcccccgggctgcaggaattcggcacgagccgatctgctccggccgtagtaatccgtgaagaggccgtcagggttgagcaggtagatggcaatggagtggtccacgatgtagtcctggtcctcatccttggggcctgcattgtagtacacgcggtaactgtgactagcctgggcaacctgtttggtggagccggtcagacccaacagtcttgggtggaagtcctggacgtagcgggccatggcttcaacgtcgtcccgctcggggtccacagtgatgaagacaggctgcactggaggcaaaccaggctctgcttccagctgccgcaccacctgcaccagcttctccagctcgtctgggcagatgtcagggcagtgagtgaagccaaagtacatcagcacccactggccccggaagtcagccttgcagcgagcccggcctctgtgatccagcaggtggaagtcgccctggcccacagctgcctggcgcagggcttctgttcgcttttgctgctgcagcctctccttctcagccctcagggccagccaggccccaccgagtccagccccgaacaggcctgtgatcagcagccgggttcgaagcccagggccctggggctggccctgcccacctgtctctgcagggccctgccttgacaaaagccaggacctcagatgcagggcctggcctcccagggtcccagggaggacccgaggcttgagctgagagagcctgtgccaagctgtggggctccgagtcagcagcagcatggatctgatgctcctggaaacaagcacaggcgtcaggagccagaagggaaggcccaggacagtgcctgggctgcccctgcgacttgagaccagccacccatctgaaggacccagcccacgttcaggcttaacaggcatttgcagctgctcacctgagctcagaactccacctccaccaaacatccacacctgggcaaccacacctgtcactcctgtcctctacctgggatcaccagcctgtcaccgcaccctgccctgcacctgcacctcagcaaggtgaacctcttgctgacggaaagcattccaagtgcatgccttgcctgaactaaccacgttatctatttgcaataaacccatttcttaaaaaaaaaaaaaaaaaaaaaaaaaaaaaaaa

SEQ ID NO: 1968 - DNA, 1098 bp, Homo sapiens
gcgagccccaggaggcccctgattccactgctgcaggaggctcagcctcgaagcggatggcgctggtgctggaacgggtgtgcagcactctcctgggcctggaggaacacctgaatgccctggaccgggctgctggtgacggcgactgtggcaccacccacagccgtgcggccagagcaatccaggagtggctgaaggagggcccaccccctgccagccctgcccagctgctctccaagttgtctgttctgctcctggagaagatgggaggctcatctggggcgctctatggcctgttcctgactgcggctgcacagcccctgaaggccaagaccagcctcccagcctggtctgctgccatggatgccggcctggaagccatgcagaagtatggcaaggctgctccaggggacaggactatgctggattctctgtgggcagcggggcaggagctccaagcctggaagagcccaggagctgatctgttacaagtcctgaccaaagcagtcaagagtgccgaagctgcagccgaggccaccaagaatatggaagctggagccggaagagccagttatatcagctcagcacggctggagcagccagaccccggggcggtggcagctgctgccatcctccgggccatcttggaggtcttgcagagctagggtgtgtgactgcctcccttggcctcagctcctctcactgctgtgctgaggtggcctttgtcacttccttctgccttccaaccctcaccttcccccggcctggccccattggcccaccctctaagttgagcaggaaatcctccaccaagcttccagaactacagacagcacccagagtgagctggagtgggtccccatgcctctccagcatgccctttccctttgcaggagggtggagtccctgggtcatgccctcccctgccagctctgggcttcagagataaggcattttccttgtgcagcctttacctggcaatcctaatttggttttaagactccctgtgaaatgctttccgaaccttaaccccagtgagcgtgaaaaagaaagttaataaactataatacatggaagcaaaaaaaaaaaaaaaaaaaa

SEQ ID NO: 1969 - DNA, 692 bp, Homo sapiens
tgcaggaattcggcacgagtgagcttcacggggctgagtgatgagctgctgcacctcctgctgcccagcctgtgggcgctgccccgcctcacccagctcctgctcaacggcaaccgactgacgcgggccactgcccgcaagctcactgatgccatcaaggacaccaccaagttccctgctttggcttgggtggacctgggcaacaacgtggatgtggcttccctgccccagcccctgctggtcggcctgcgccggcggctgagccagcgcacctcactccccaccatctacgagggcctggaccttgagcctgagggcagtgcggccggggccaccacccctgcctccacctgggactccacagctgctgggctgggacccgagccccaggcctgctgtgccaggtgacccaccacccacctggctcattgctactgacttgtgatgctctcaagcacatgatagtgggcgatgaaggtcaaggaggactcacaggcccccagaaatccagtgtaaatgctcagcctgagattaaggggacagaagaatggactcataggtggccaggtggccagccctggctagaggctcagccttccctcagtgggaggggccccagcacccacagtgtggaccccgcaataaagagtgacacccgcctctgcttttctgcaaaaaaaaaaaaaaaaaac

SEQ ID NO: 1970 - DNA, 658 bp, Homo sapiens
tcccttgcttgatgcaacactgttccaaaagagggtggagagtcctgcatcatagccaccaaatagtgaggaccggggctgaggccacacagataggggcctgatggaggagaggatagaagttgaatgtcctgatggccatgagcagttgagtggcacagcctggcaccaggagcaggtccttgtaatggagttagtgtccagtcagctgagctccaccctgatgccagtggtgagtgttcatcggcctgttaccgttagtacctgtgttccctcaccaggccatcctgtcaaacgagcccattttctccaaagtggaatctgaccaagcatgagagagatctgtctatgggaccagtggcttggattctgccacacccataaatccttgtgtgttaacttctagctgcctggggctggccctgctcagacaaatctgctccctgggcatctttggccaggcttctgccctctgcagctgggacccctcacttgcctgccatgctctgctcggcttcagtctccaggagacagtggtcacctctccctgccaatactttttttaatttgcattttttttcatttggggccaaaagtccagtgaaattgtaagcttcaaaaaaaaaaaaaaaaaaaaaaaaaaaaaaaaaaaaaaaaa

SEQ ID NO: 1971 - DNA, 1134 bp, Homo sapiens
ggcacgagtttttttatggaaactgtgtgtatgtatacatacattttccaaaaagaaaaattaaatgattatagagattatgtttttcagactactcacgtatctgcttttcttactccccacctctgctgataattcctagttcattggtttttcccccacactggaattacctggggagcttaaaaaaccctgatgcctgggtcccaccctcagagatgattgaaccagcctggccagcatggcaaaaccctgtctctactatgatatgaatgcagcctggggcactggggaaatttaaaaactccccagataattctgtgcagccaaggttgagacctcctagttctagagctttgctatacacagggtggtccacaagccaggagcatcagcatcacttggcagcgccttagagattcagaccccagacccactgaattctgaccctgcattttcactagaccccaggtgatcagctgcactagactcaacctcttaaaccaagaccctcccaccctcacagtctatgatcctttagtgaccctcagctgagtcctgtgctgaactgtgtttggttctccttgagcacatgcccgctgaccagggacagactggatgagcaagcaacctgctggctatggagaagagccaggctgggtaaatgtttgctgtgactaagccaggatcaaagaactgcctgttgcttgcactggctggcactgagcttgccactctgtgaactgtgcttccttcccctgcatggacctgtgcctcagtcactattatccgcaggccttctccaagggcagccctctccttgtttatccctcttaagcctgcgtgcaggaaggcacattaaccctgtggccccctgcaggcaggagggtgttgggtgcccttacctaccttgccctttttcttgtaccgtaggctgtgccgtttatgagtaagtgatgtgtgtctgtgtgtgtgtctagaagtgctgcactcaccttgtgttattggaggttgtgtaaccccctagctttgagcctggtctcagatgttccttttccgttctctgtccagccgttaccgcccccagtctgtaataaaagcctatcagccgtgcaaaaaaaaaaaaaaaaaaaa

SEQ ID NO: 1972 - DNA, 1175 bp, Homo sapiens
ggcacgaggacgagcctgcccacaactattccagttccatttggcacagccaggggcagggacagaagggccctgcaggactccgcctccccacctctgcacagatcctctctcctttcccctaatactcccatcatcctccttttagcttcttagaggaatcagcagctcagcttagcttagatttagctgatcaatcccaaagaaggatgtggctcatcctcttggccatccctggagtcgcagcacacgcttggctggtgtgggtccacagaggttctcatgggtgggcccagcagaggggcccctcaggagagggattctagggagctagactgagacaagcctggccctgactgtcgcctcctgccttctggtcctggccatcctgcccctttctctctccagagcttgggaggagtcagaacattgctctagccgctggtgatctctcctggttgccaaccctcctggccatgactgatctccccactgagatgctcaggtgattaaacgagagcccagttgtggcccgtgacactgtcactggcaagggtaggggtggggacaggggcaggaaaataagttctgagcagcccggaaataatgagtggtgactgcttctcggggctttgcctgccacagcaccactgtgctctcctggtcatggtgcacggagggccagcaggtgtggggccctgccacaccggaacagcaggccacagcagccatgctgtccctcatacgcacacgccctctatgggctgcagagtgttaccatagcatctcgtaagcctcacttcccaccggtagtaggatattgtcactcatttaacaggtttgaaagccaagctgcccagggaagggacttctcaaaggtcgcgagtccagtgagtggcagaagggggatgtaaagcccagcccctctgatggagtgtccagcgctcgtcccgtgccctccacgcccctgtgtacccagctacttgtttattcatttggtttatacgtttggtcgttcattcatttggtcagtgcacattcttttatggccacacacctgctagggcagtgaataaacggatatggaggcaaatccactggaaaaaaaaaaaaaaaaaaaaaaaaaaaaaaaaaaaaaaaaaaaaaaaaaaaaaaaaaaaaaaaaaaaaaaaaaa

SEQ ID NO: 1973 - DNA, 553 bp, Homo sapiens
ggcacgagcggatctggtggtcatcgagggcatgggccgtgctgtccacacaaactaccacgcagccctgcgctgcgagagcctcaagctggccgtcatcaagaacgcgtggctggccgagcggctgggcggccggctcttcagcgtcatcttcaagtacgaggtcccagccgagtgaggcgctgcagctgccggactcttctgcttgtcacttgtcaggaatgtgtttttaccaccacagggaaactgcgttcaaatcaacgtatttatatggtactgctgtgacgcggcacatacaccccagccgcacagatgcgtgtgacccagaggcgagacgcagctttgtcctgggagacgttcatattggaatctatttaactgctaaagaaccttttatatatatatatatataaatagagagatctatacaggtatgtctgacgggacgcagcaccgtgggcacgcaccaaatagagtttttaaaagagaaaaaaaaaaaaaaaaaaaaaaaaaaaaaaaaaaaaaaaaaaaaaaaaaaaaaaaaaaaaaaaaa

SEQ ID NO: 1974 - DNA, 1463 bp, Homo sapiens
gggggagcccgcggctgctgggagctgcggcgctggccctggggggagccctggggctgtaccacacggcgcggtggcacctgcgcgcccaggacctccacgcagagcgctcagccgcgcagctctccctgtccagccgcctgcagctgaccctgtaccagtacaagacgtgtcccttctgcagcaaggtccgagccttcctcgacttccatgccctgccctaccaggtggtggaggtgaaccctgtgcgcagggctgagatcaagttctcctcctacagaaaggtgcccatcctggtggcccaggaaggagaaagctcgcaacaactaaatgactcctctgtcatcatcagcgccctcaagacctacctggtgtcggggcagcccctggaagagatcatcacctactacccagccatgaaggctgtgaacgagcagggcaaggaggtgaccgagttcggcaataagtactggctcatgctcaacgagaaggaggcccagcaagtgtatggtgggaaggaggccaggacggaggagatgaagtggcggcagtgggcggacgactggctggtgcacctgatctcccccaatgtgtaccgcacgcccaccgaggctctggcgtcctttgactacattgtccgcgagggcaagttcggagccgtggagggtgccgtggccaagtacatgggtgcagcggccatgtacctcatcagcaagcgactcaagagcaggcaccgcctccaggacaacgtgcgcgaggacctctatgaggctgctgacaagtgggtggctgctgtgggcaaggaccggcccttcatggggggccagaagccgaatctcgctgatttggcggtgtatggcgtgctgcgtgtgatggaggggctggatgcattcgatgacctgatgcagcacacgcacatccagccctggtacctgcggktggagagggccatcaccgaggcctccccagcgcactgaatgtccccgcgcagagcagagggaaggcagcggaagacgccagctgccagggcctggggccactgggccagcgcctggcgatactggttgggggcaggatcattctgccccttgtccacgcacccccaccagccctctcgcttctaacacagggcacctgctggggctcagggatgttagggacgagttccagccctgccactgccctggggcgacccctccctgtccctgcctccctgctctgccgcccctcttcctggaccctcagtggctgtcccatggctacatcctgtgggtgggggccctcgacaggacagcaggacggtttgttttcagtggaatcccatccctgggttcccctggttcccactcttcccaagcctcccgggactgggacatgtttgcaataaaggaaaggtttgtggcgcctgtcatggcaggcatctcatggaaaaaaaaaaaaaaaaaaaaaaaaaaaaaaaaaaa

SEQ ID NO: 1975 - DNA, 475 bp, Homo sapiens
ggcacgagctgacgcagcctatcgtggtcaccgtgccgcggccgccccccaggccgcccaagagtgtccccggccgtgcagtgcgccctgagcctcccgcgccggcccccgcggccctggaacccgcgccggtggtggcgctggtgttggcagccttcgtgctgggcgccgcgctggccgccgggctgggtctcgtctgtgcgcactcagcgccccacgcccctggcccgcccgcgagagcctcgcccagcggtccccagcccaggaggtcccagtgaggaagggatggtgcgcccccaacatggtccggagatacacccagctaccaattcgggaccaggaccaacaggaccggacccgcctccctggacctcggacctgatgaggccacgacccctgcgcttctctcctccccctgtccctcccacctgtgctcaaaataaacctctggactgacaaaaaaaaaaaaaaaaaa

SEQ ID NO: 1976 - DNA, 636 bp, Homo sapiens
  SITE (622): n equals a,t,g, or c
ggacgctggcactgagggcctgctgcttctgcagagactcaagaacaggctcctcccacccgcgtctccctagtccctggaggcctccccaggaccaccctcgccgacagcaaggcaggcggctgagcagcggcctggagcagcagagccaggctttgtagcgaggccaggtcttcggccgcatccggtacggagagtgcagatgcaggaaggcccggcctgccgctatttatagtgcagccagtcygctaaaaatacactgggcctgggcactgcccgccgggacatggcagcctggacgtggggctggggctgtgggcgctgctggcggggttgactcttccagtgagggcagaaccaggctggcaggaggggaggacggtgtacctgctgctcagagcccccaaggctctcctctgagagccaccaagcaggacagagcagctcttgtcccaggtccctcgggctgagcgccgtgtcaccaggagaatagtgctcacagcccaggcagggtgtgtggctcctggatgggctcgtggggcgggatgggacagggcacgggctctcagaaaataaactgctttattggaawwaaaaaaaaaaaaaaaaaaattactgcggnccgcaagggaattc

SEQ ID NO: 1977 - DNA, 520 bp, Homo sapiens
ggcacgagcggagtttgagccccggaggcagagcggctgccatggccaagtacctggcccagatcattgtgatgggcgtgcaggtggtgggcagggcctttgcacgggccttgcggcaggagtttgcagccagccgggccgcagctgatgcccgaggacgcgctggacaccggtctgcagccgcttccaacctctccggcctcagcctccaggaggcacagcagattctcaacgtgtccaagctgagccctgaggaggtccagaagaactatgaacacttatttaaggtgaatgataaatccgtgggtggctccttctacctgcagtcaaaggtggtccgcgcaaaggagcgcctggatgaggaactcaaaatccaggcccaggaggacagagaaaaagggcagatgccccatacgtgactgctcggctccccccgcccaccccgccgcctctaatttatagcttggtaataaatttcttttctgcaaaaaaaaaaaaaaaaaaaaaaaaaaaaaaaaaa

SEQ ID NO: 1978 - DNA, 1506 bp, Homo sapiens
  SITE (1359): n equals a,t,g, or c
  SITE (1410): n equals a,t,g, or c
  SITE (1446): n equals a,t,g, or c
gtaaagaaagtggcaactaaatacatctctttctgtgtgaaaaaaggagagatcttaggactattgggtccaaatggtgctggcaaaagcacaattattaatattctggttggtgatattgaaccaacttcaggccaggtatttttaggagattattcttcagagacaagtgaagatgatgattcactgaagtgtatgggttactgtcctcagataaaccctttgtggccagatactacattgcaggaacattttgaaatttatggagctgtcaaaggaatgagtgcaagtgacatgaaagaagtcataagtcgaataacacatgcacttgatttaaaagaacatcttcagaagactgtaaagaaactacctgcaggaatcaaacgaaagttgtgttttgctctaagtatgctagggaatcctcagattactttgctagatgaaccatctacaggtatggatcccaaagccaaacagcacatgtgatgtatcggaacagtacaacatctaaagagtaaatttggaaaaggctactttttggaaattaaattgaaggactggatagaaaacctagaagtagaccgccttcaaagagaaattcagtatattttcccaaatgcaagccgtcaggaaagtttttcttctattttggcttataaaattcctaaggaagatgttcagtccctttcacaatctttttttaagctggaagaagctaaacatgcttttgccattgaagaatatagcttttctcaagcaacattggaacaggtttttgtagaactcactaaagaacaagaggaggaagataatagttgtggaactttaaacagcacactttggtgggaacgaacacaagaagatagagtagtattttgaatttgtattgttcggtctgcttactgggacttctttctttttcacttaattttaactttggtttaaaaagttttttattggaatggtaactggagaaccaagaacgcacttgaaatttttctaagctccttaattgaaatgctgtggttgtgtgttttgcttttctttaaataaaacgtatgtataattaagtgaagctgcatgtttgtattgaagtatattgaactatatagtttgtatgtcatctttttcaccattcagaaacagtgcttctgaatttgtgatttaaaggaattgtaatagaatagttttatttttaagttatctttaagtttatgccatcttcttaaataagtacgtaatgttccaatctaaataaaaaactaatwcataactaatgcatagaaaagatacataaagcaatgtgaaagtttcttgcttctcctttttaatttctaaaaaagccactttgaatggaanttgtcatccgtaaaagctgaagtgtaagcactaggaaatctcaatataganatttgaagaaagttatatccactaaggtggcagtcnttgatcataataagtgaaatgagccctgttctagtacatgaatttaagcttaggtattag

SEQ ID NO: 1979 - DNA, 906 bp, Homo sapiens
ggcacgaggggattacaggcgtgagcactgcacccagcccaaatgagatgtttctaaatctaaagtttcttctgcttctgcatttctgtgaatctcatttgaaatttttcagggaagggattttatcatttgttcagagatgtctttatttttattaatacccataaaacgtttgtgtatttgcttcttcctctttctccttttgatcacattttagctacttatctagaggatctctggccaagtattcccttttattgtattgataacaattcttaatggctggcctctcttgtgtacaatgagccaatattcttttttgttctatatttttgtatcttcccctttcctgaacaaagcatatttagagtctcaaagaaatcctctccacaaagacatgttcctccctctggtgtgggtagacatagggtaagagtttggatgaaacttttgtaaattgtagtgttcttggcataaatatgaattaaatctttttttatatttaaataactagttaaatatgtgcttcttactaagattaggtattttttgccaagataacaatgataaaaacattttgggggggaaattgaccttaaaattttgggataattcaagaaatgtctgcagaaaattgatttatgatcttaatttttgtgttagtcctttgaggtttttttgtttttgtttttgttttttgtaaagcgccttatctgttttggacaagtccaaagtaaatggttgggctcttatatctgttttacccttatttttcccattaagtaatggtttaagaatatatcaagcaccttaatttgttgttaagtagctagtgcttacaggattccattaaattcactttaataagcctaaaaaaaaaaaaaaaaaaaaaaaaaaaaaaaaaaa

SEQ ID NO: 1980 - DNA, 774 bp, Homo sapiens
ggcacgagaggaaactgaagctgagagagggttaagtaaattacccaaagtacagctaataagacccagaatctcagtctcactccttgggatcctgtgtatttccctgagtcttctaacatatgaaaattcatatctaaatcaacaagtgactgtaatctggtactataaatactaaataaacacttcttcataacactgtaccaattcagcttttaaattttattactttgctttcctgtcctttgccaactcttaacctagttaacctagttctgttgacattggaccaggctcagtaaataaacgaatggatttccagcctttttttcccatctgttcctgcttttagtcctctgaatctgcttcttttcttactgctgctttattttacagtgattttgtcaaacatagaatacaggactaaaaatgcaaagaaattgggtctgtgtttaattttgatgtttcaaattttgagcttccaagtctttgtggccacccaatgaagtttgagtctgcctgttcagatgtgaaaggtaagggctgcagcaggtttaagggtggcccttcaccaccctgttgtcacctgcacaggcactcccccatttgcagatgaagaaatgttcagagaagaaaaatgatggaccaaacgtctgtttgcacaattgaaactctaccagtggactattctattttcacagctacctagtttctgccgatgatttttttaaatgtgaaataaacagtgatactttcaaaaaaaaaaaaaaaaaa

SEQ ID NO: 1981 - DNA, 1236 bp, Homo sapiens
gcttgcagggaattcggcacgagtgtgagggagcaagagagaggggtgtgggagagaaaagttggaaaggagggagagagggagtgggagatgagtacaccatctgttttgctattttattcatctttccttcttatattcatcctttgggatgaaagactggggagtattgagaagaatattaaccatcaatttgtaacatacccttgatgcgttgaaagaataagccgctgctaccatagtgttatattggattgacaactatttattgacatttgctgtaccatttaggggataagcagagaagtatttgagaagaaagtattttgtaaaaactgataagaaatcttagtttgattccagtcattaacacttgagtccttaggcagagttaagataatgattataatactttagtcctcttcttgggatcaactgggcagggaaacattcttttaaaatgggagatgtgttgccaaggtactttgttacaaagttttgttgaaaaattttacaatgtaggaaaagtggtatatttttaattgtggaatttacaagacacagaactatggttatgtgtttctttgacttctgaagagtttctcaagttaataataattagacttgagaatgtaaacttcacattttacaagctaagctttagagatcaaagaatgatttaggtgaattacttgatatatccgtgttgacaacccatgaccatttatgcctatgtaagtataaatctgtgccacccaagtaaaatattataaattttatggtctattttagtcagagatttatgggtatgtttgtgtctgagttgttttctgagcataatacattgatatatcgtgagtttcctaacacatattaagttgactcacaatgtgttgttggtctgcagaactcatacatattttatatgagatgataccatcagtagacagtcttcgctctcttcatcctctatctataaattgttattaacaagaaaaattaagtttctccttttgtggccctaatatagttcaggcttaaaatcaacagcaaccatcctatatatttcttttaaatgaggaaactagagattgtacacattttatccacagagatcaaaaaaggttctgcttgctattaaccctaatggctttcagggaggaagcagcactctagcaagggaattagtattttaaaagtttctgttggggcaaaaaaaaaaaaaaaaamctcgag

SEQ ID NO: 1982 - DNA, 2071 bp, Homo sapiens
gctatagaaatgttttggtttcttttcctcctcctccttctccagaactggctttattaacagcaagaattcaagcagtctccctggtctctcatgcagttcaatccccgacagcctttcctgtaaatgccacctgctgtcacatgctccatccgggcctttgttgtcaggctcacttctttctacatcttcctccattgacttcagcagctccttcatgcatgccacagttttttctgaagtctttggatgcattttcttaatgacaacatcaaagttcctgcttctctctgtgttaccaaatactttgttggagttgttgatctgacttgggactttgtaacattcactgaggcagacatgtattttagccatagttcaaatcctcctctctgggagctggccttgcacctctggaaaagaaccacatgttttgatcacagtggcttccaccaagagctggggaccactgacaaatggctggcccttcccccccaattctaaaggcctctgccagagctccagaagccgggcggagcctgccaacaaccattatcagcctgtccgagtagaccctatcttcttatttgaagaaaaaccccactttctttagaaaagttagatatgtgaagatgctggtctacagggtccttttgaaaacatctaacatcttctatgggacgtttccacagttcaccacctgaaacacttggaccacacatgtttgcacatcctggactttctgtctgatacatctaggactgaacaatgggttctcccagaagttccagagggaattcctacaattctcgcttcaagatggcgctccagctgcatcacctgcaggcctgggctaggatatgtcttgactctccttatgacactgtcttggtggctcacttgggtgagtgtggggccaatccaagggaagttgcggggaagctcaaaaaggtaactcagattttcttgggagaagagagattctgagcagattggaacgtaccatcaacagtgccttcttcctcctgagctgatatctgaatgagtccctattcacaggaagaccctggcccaccttgatgtcccactcaactgtaatccattggtcctttttgggcaatgactgagtcctctcctgaccaaggaaaggaatgcatctcaagcctctccccatcaggccttcattagccccatcccctacacccactgactctgctcccactcccgccactgtatcgcccagcgttgcttcctgcaggaaaccctgctgaggagtctagtggaggcagagatgccctgtgttgaacactccaccatgcattatgtcattttctccacacaacagccctgagaggaaggaagtgttattcccattttatagaagagaaaactgatgctcaaacaggttaaataatttctcaactattgactgaagagcatgggatacaagttctaggccattgtcggcaaagtctgtatgcttcacagcttggctgtgggatgtgctcctctgccttcaggagccaacccatcaccttggccaaccctttgaccagtgcaaacactgcatctttgtcagcctcctctgctagcacagccacccggccacctctataaccaatgccaacagctcttgcaagagcaggaaagactctccttagaccagagtgtcccatcctcagcactattggcattttgaacctgataactctttgtggtgatgaggtgttgtcctgtgcagtataggatgtttaacagcatccctagcctctagttgttctctggttgagaacaactgccctagggtactcatcctgtcagctctctctgcttttgagccaaagttcctgagaaagaaaggtctctgatgcaaagcctgtccccactatagcactttgaaacactactcttgctgggacaggcacctaaccaggctccctctcaccatctgtcttagtccagtccagctgctataaccaaatccatgctggatagaagatacatgacagaaatttatttgcacacaattccggagcctggatgtacaagatcagggtgtcaggatgctcga

SEQ ID NO: 1983 - DNA, 1467 bp, Homo sapiens
gccagtttttgtctcagmatccagatactatctaaatatgtttgtcaacctttggtttccttcctatggttgatattaagcctttcttctactcttagaagacaaaatggggagacaaaaaaggcaaccctgaaggtttttatcctttcagggtatctagcatttttctaatttagccctactgaagtttcttcagtaattaatcatctgtttttcarcctctaacctggctaatattatagcctacaattgtacttttaaagcccttttgtgactttgacatattgtgtctattgtgtatggaaaagtagcaggatcagtatgaagataatacagtatctcttaaaacaggcagccagcaaatgaactttctgcattggtcagaatttccatcatttcactgttaatgaggaaagtacagttctttagctaccatgaaagtcaaacatatcctaagccttttggaaaaagacatacatgttagaaaatctcaaatggatgagtcagcctgactgaccccacattgactccattttatatgctggccaaatcctgtttctgactttcctggcacagccctggacatgcttctgtatcataggacttgttccccagcgcctttgctacttccttcaggcacattcctaggaaagattggcagtggggtttgctctttgccagcactcctgccggtttgggggttatggatgccaggttgggctccaggcactctgctctccatttgtggaggcagggacggtaacagcacctgacaagtagggatgatcacattgtattcagaagcctggtggagctctataaacccaaatttctaacagtctccaatgtaatgccctgtaatagaagctgtccttaaccctcaatcatctgkattcagctagtataaaaatgcaaatctgctcttatgcctaaacagttaggartagaggagacttggcttcctttggaaagtcaggatgatagcttyatcccattctggkttttgkgawtaawtgtgacctacaaaggggtttactactctagcaggaactttgaatttcctatatacatctctttctggttagcaggcagaggaaatatcgttgacttttggcttcctggcaaatgtctcatttgccttgtcatttgttgattccttttccctgatctctgtttggtgtgataatgtacagcaaagctgaaaaccgcagggctacatgtacacttgtaggtacctatgttgtgattgccaaaaggctcagaaagccagttttctagtgaaaatggctaacattctaagaaatgctttcactgagaaagagaacgggtcaggggaaggtggaacttaaaggaagatggagtgttcctgaattcagattcctgaattagccatttatagtttcatgggaagacaatgaaaaaaaaaaaaaaaaaaaaaaaaaaaaaaaaaaaaaaaaaaaactcgag

SEQ ID NO: 1984 - DNA, 1201 bp, Homo sapiens
ggcacgagagactacaggtagatttgctgaatttcatgggcaacactaggttttcattttaccttattgttctgccatttagatgtctcctcttaaaacatttttacttgcagtgatggcttccttagactcgtgtgtgattgttgctggggcagttaggtggaactaataggtgttgcttgttgattccctgctaccaagtactagttttgaaatttgagtattcattaaaaacaaatagggatttctgtgtctcactcctggaaattctgactcagtgggggtaaggattaggaatgtttaatttttgaaagccctgcaggtaattttttttctactttttaaaaattataatttttattttctttactgttcttttaagacatcctgttatagcatctgcaggtgattttgatgcccagccatgtttggggaaaaaagtttgggttctgagtgaaaatagaaaacgtaatgacatggaaaggaagtcaggggataagaaaagctctatggccagccatggtggctcacacctgtaatcccagcactttgggaggctgagatgggcagatggcttgggctcacgagtttgagaccagcctaggcaacatggcaaaaccatgtcctattcaggaacaaagaatagatcacaaattaaactctgtgggttttcataagtggaaagttggctttcgttgttctggtatttgggtgctttagtggacaggagttatctaaaagaagtaattatagttgtaatgcggaccctcaaagttgaaagtagattgaaatccattattttacaaggtggccttactatttatagtttgactgtaggtatggcagtgagagataaaattactttttctagctttgcaaaacgccaaacgtctttgaaattaagagtaaaaggggtttaaaatatgtactgctttataaagcaggaaaaccccactggaacattttgggtgtttacagaaatgggtattccatgggagagaacgtggtaacctatgttttgtcatcatttgtttaatcactgaaaatatattaacaggccaggcatggtagctcatgcctgtaatcccagcgctttggcaggctgaggtgggaggattgcttgagcccaggagtttgagatcagcttgggaaacacagtgagactccatttctacaaaaaaagaaaaaaaaaaaaaaaaaa

SEQ ID NO: 1985 - DNA, 617 bp, Homo sapiens
  SITE (1): n equals a,t,g, or c
  SITE (9): n equals a,t,g, or c
  SITE (29): n equals a,t,g, or c
  SITE (39): n equals a,t,g, or c
  SITE (41): n equals a,t,g, or c
  SITE (154): n equals a,t,g, or c
ncccccatncctggctaatttttgtaganagggggtccncnctttgttccccagactgggagatttttctgtacttggctgtatgctttccattgatctgctgctgttttcactattattccttcttttgtgtgggtattttcttttgattttnagaattttacttgtaaacatgctacatatacatataatttggtgccctgtttttccatttacatattatactttccatattagtacattgtctgatatttctgcataatactcaattcaacttacctgctattgtttttatcatatctctattacaaacattaggcccatttcccttttttaaaagaggaaagtttgaggttatgggcggtgttctgataaaataaataatattttgtcatgtttgttttttcattgattaggaaacattgttttgaatttaatgcctcaaatttggtgcacaataatttgaagggaaaaactgacaagtttgaaatgaacattgatattacataatttacattaaaatgatacatcttttgtaaatttgtaagaagaataaataaatgaaaacctgattacctttcaaaaaaaaaaaaaaaaaaaaaaaaaaaaaactcgag

SEQ ID NO: 1986 - DNA, 637 bp, Homo sapiens
aacctctgcctcccaggttcaagtgattctcgtgtctgagccacccgagcagctgggattgcaggcatgtgccaccacgcccggctaatttttttgtatttcctttttagtagagacatggttttgccatgttggccggggtgctcttgaactcctggcctcaagtgatccacccacttcgggctcccaaagtgctgggattacaggtgtgagccactatgcctggccaaaagtaaccattttgtttaattttttctttttcttttaattttaagttccaggatccatgtgcaggatatgcaggtttgttacatagggaaacgtgtgcctcggtggtttgctgcacctatcaacacatcacctcggtattaagtccagcatgtattagctatttttcctcatgttctcccaccccccgccacagcccctgytaaattaatttcttattctccttaatattccatacacattcagattccttctcccctacaaaaatatttgctattttgtccttgctatttctcatacttagatcattcatacactatatttattttttcattaaactattttaaaacctttggaaaaaaaaaaaaaaaaaaaaaaaaaaaaaaaaaaaaaaaaaaaaaaaactcga

SEQ ID NO: 1987 - DNA, 1610 bp, Homo sapiens
ggcacgagtcaaaacaagtatggattttgaatgtgaatattttaaaagatatattgaaattacttagagtagccctggatatatgttcattatggcatttatcttgttaataagtttctacatgctcattttaatttccagtagcatgagcaagtaacttatatttcattcccgagaaactaaaagaatctgcctaaagagtatgaaaattgccattaaatctgtattgtctactttctggatggttatatcattatagttctctgctcttccacacatttttgggctgctatcagtttgtaagtaatcattatacaaactaaatttaaaaatttaaacaagataattttatattacttggatcagggaaaaaatgcagttgctgaaggtggtttcatagctaaatataagcaattattttgctttttctacttttttggattttatcatcttttcccttttagtaatagagtaatacaggtaggaattaacttagcactgccaaattaatagtaatattagaactgtgtacacagcacagggttaaggttatatagaaaaatgtctcatccatgtttaatttggctgaccagcccagttgattagccaattttattgttttgttaaattaaaattctaaatatagttgtccattgttaaaataagtgagtagggttaaaatagagaattgataaaaataaagccttaaaaatcttttagctaaagtagcaggcttcaagtgaaattcagttttggtctcctttacaggaatagctattcagtcagacagaaccacttatcacgttttgcagtatctcctgaggaagtcagaattctgagccagcatgaagacggaatcttgtctttgatctgatttgcaaaccgtacttttattctaatcatgtgcaaggtggaggttatagcgtgggaactaaaatcttagtaagtgtggtttttattttagctattaagtagtatactttcttatagtgatttttttttcttcttagcagagttcacactataaatagtgtatggacttggcaggcaggaacataatacagtatacttcaaaagtgaaagatttaggccaggcgtggtggttcatgcctgtaatcctagcactttgggaggtcgaggtgggtggatcacgaggtcaggagttcatcaagagaagcccggccaagatgctgaagccctatctctactaaaggtacaaaaattagccgggcatggtggcatgcgcctgtagtctcggctacttgggaggctgaggcaggagaatcgcttgagcctggggggtggaggttgcagtgagcttagattgcaccactccactgcattccggcctgggcaaaacatagcgagactccatctcaaaaaaacaaaaatgaaaacaacaacaacaaaaaaacaaacaaacaaaagatttaaccctctaggttcaggaaaaatccctgagaaagagagagcaaagcttctatactctgcctaggatttctttctctttccgggtgaaaaataggcgttgggatgatactgagttgataaaagtattaggaaaagtggccagtgtctaaattcaagccattaaaaaaaaaaaaaaaaaa

SEQ ID NO: 1988 - DNA, 2008 bp, Homo sapiens
gcccacgcgtccgcccacgcgtccgcccacgcgtccggcggccgtggagtttgtgacatacgaggtgacacccctcgagtcacttcccttcaactccagctggagcgcctgcttggctttgggttcgttctgcagccttcgccccgctcctagcctcagggccggactccagcgcagagcccagcccagcgcagctgccagcagccacccagccgcccagccgcccagccccgcacgaaacccggccagagcttcctagcagcccgagccatgaacaccgaaatgtatcagacccccatggaggtggcggtctaccagctgcacaatttctccatctccttcttctcttctctgcttggaggggatgtggtttccgttaagctggacaacagtgcctccggagccagcgtggtggccatagacaacaagatcgaacaggccatggatctggtgaagaatcatctgatgtatgctgtgagagaggaggtggagatcctgaaggagcagatccgagagctggtggagaagaactcccagctagagcgtgagaacaccctgttgaagaccctggcaagcccagagcagctggagaagttccagtcctgtctgagccctgaagagccagctcccgaatccccacaagtgcccgaggcccctggtggttctgcggtgtaagtggctctgtcctcagggtgggcagagccactaaacttgttttacctagttctttccagtttgtttttggctccccaagcatcatctcacgaggagaactttacacctagcacagctggtgccaagagatgtcctaaggacatggccacctgggtccactccagcgacagacccctgacaagagcaggtctctggaggctgagttgcatggggcctagtaacaccaagccagtgagcctctaatgctactgcgccctgggggctcccagggcctgggcaacttagctgcaactggcaaaggagaagggtagtttgaggtgtgacaccagtttgctccagaaagtttaaggggtctgtttctcatctccatggacatcttcaacagcttcacctgacaacgactgttcctatgaagaagccacttgtgttttaagcagaggcaacctctctcttctcctctgtttcgtgaaggcaggggacacagatgggagagattgagccaagtcagccttctgttggttaatatggtataatgcatggctttgtgcacagcccagtgtgggattacagctttgggatgaccgcttacaaagttctgtttggttagtattggcatagtttttctatatagccataaatgcgtatatatacccatagggctagatctgtatcttagtgtagcgatgtatacatatacacatccacctacatgttgaagggcctaaccagccttgggagtattgactggtcccttacctcttatggctaagtctttgactgtgttcatttaccaagttgacccagtttgtcttttaggttaagtaagactcgagagtaaaggcaaggaggggggccagcctctgaatgcggccacggatgccttgctgctgcaaccctttccccagctgtccactgaaacgtgaagtcctgttttgaatgccaaacccaccattcactggtgctgactacatagaatggggttgagagaagatcagtttgggcttcacagtgtcatttgaaaacgttttttgttttgttttgtaattattgtggaaaactttcaagtgaacagaaggatggtgtcctactgtggatgagggatgaacaaggggatggctttgatccaatggagcctgggaggtgtgcccagaaagcttgtctgtagcgggttttgtgagagtgaacactttccactttttgacaccttatcctgatgtatggttccaggatttggattttgattttccaaatgtagcttgaaatttcaataaactttgctctgtttttctaaaaataaaaaaaaaaaaaaaaaagttttgccctataggtcgac

SEQ ID NO: 1989 - DNA, 2008 bp, Homo sapiens; identical to SEQ ID NO: 1988

SEQ ID NO: 1990 - DNA, 2190 bp, Homo sapiens
  SITE (1008): n equals a,t,g, or c
  SITE (1026): n equals a,t,g, or c
  SITE (1085): n equals a,t,g, or c
aggggcggggcggtgccggcaagatggctgcgcccgagaagatgacgtttcccgagaaaccaagccacaaaaagtacagggccgccctgaagaaggagaaacgaaagaaacgtcggcaggaacttgctcgactgagagactcaggactctcacagaaggaggaagaggaggacacttttattgaagaacaacaactagaagaagagaagctattggaaagagagaggcaaagattacatgaggagtggttgctaagagagcagaaggcacaagaagaattcagaataaagaaggaaaaggaagaggcggctaaaaaacggcaagaagaacaagagagaaagttaaaggaacaatgggaagaacagcagaggaaagagagagaagaggaggagcagaaacgacaggagaagaaagaaaaagaggtgattcctgtcatgggatgtgctgtgtgatgagtttgaagaataatcagtaggcmtgycagagtttgggttttttttttctctttttcttgtcatttcattgtttgtttggaaagaatcatatttcagtttagacataacaccagagttcccttctgatgctcttcttcgggtccgtgcagtggcagattccttaaagttttcttcagctttaccctatttaccctttatactgggcattggcaaatgttgtaaagggccagatggtaaatattttaggctttatggtttggtctctgtggcaaacatccaactctgccagtgtaccctgaaagcagccatcgataatatgtagatgaatgggtatggctgtgttccaggaaagctttatttacaaaacaggcagctagcccttgctttatagcaagttatgttcttctgaggttctgctgtatatgagttgacttctttagagaataatactttgttttgkttccacatttatttaggtcataagagaactgcttatgacatgtcagcaagaattagaggatttaaagaaatcaggaactcaaatattgagganctaggaaccagtttttgntatttgtattaaatcttgacttcctcttccacttaggctatgaagataattgtagctancacacagttgcttatttaaaaaaaaaaaaaaatctgtgaggcatatgtgtgtatgtatcttctctatcttccaggattcttttttaaggattgatttggtatgttttgctgctattccttgacagtatatttatttcagaggtatcacagctcatcttcccttgactgattcatcaggatttgtcttttttgtaatacagctaaatttaaatagcataaaattggataatcaccttataattgggaaaaatgcatgtgtcttcattgtagtcaatatggggcagaagcagcctccacgatctttgttttttgtatcttaggccatcagttaatttcagtgcagattttaaacacctttatttgagcacttctttccagatgaggcaagttcatgctaggtttttagggggcagaaaaattgtttggaacttgtcatttttttatagagaggaattaattcccattttaacagtagagtgttcctcaactgaggtctttcaggaattcagtaacagctaaggcctcttttgaatgcttttgtttcagaggaaatctgtgagactwcaaggaraaatgagggaaatgaaatagattctaagcttataarraarawtcrgcagtatgtgttcctgctgtatgctagacacttcgctagcggacagagacagagcagtgaaagacacagtctttgctctcattgagctagttttttatatgggagtgtgagatgataagcaaaacagatcattcaaaatgtgaycatattaagtgctataaagaaataaagcaggccaggcgtggtgctcgcgcctgtaatcccagcactttgggaggctgaggcgagaggatcacgaggtcaggagttcggggccggcctggtcagcatggtggaaccccgtctgtactaaaaatacgaagggttggccgggcgtggtgatgggcgcctgtggtcccggctgctcgggagtctgaggcaggggaatcgcttgaaccggggggcagaggtttcagtgagccaagcttgagccactgcactccaacctgggcaatagaactagmttcgtctcaaaaaaaaaaaaaaaaaaaaaaaaaaaaaaaaactcga

SEQ ID NO: 1991 - DNA, 240 bp, Homo sapiens
ggcacgagctcgtgccgctcaaaccttctgatattgtatacattttctctgcacatttgagtgtgtgtgtgtatggtttgttgtgttgtgtttttttttttctggaaagagtcattgctttttatcagattcttaaaggactctaagacaaaaaaaggcttatgaactgatttaggatttcagtcttatgctaattcattagtcatttttaacctttctaaagaaaaaaaaaaaaaaaaa

SEQ ID NO: 1992 - DNA, 686 bp, Homo sapiens
  SITE (7): n equals a,t,g, or c
  SITE (9): n equals a,t,g, or c
  SITE (683): n equals a,t,g, or c
  SITE (684): n equals a,t,g, or c
  SITE (685): n equals a,t,g, or c
tgctggnanctagtgggtcccccgggctggcaggtgctccaatgaggcttaagctcctagagtacaggaccattttgttgattgtctttcttcatagcttctctgcttggcaaagagatgggagggggccagatactgactacctggggtaggcacattatgtgttaaagcaagacagaggccagagaggggcaggtagacctgcatagcagcagcctcagcagctgtcttggtaaaggagagagagagacatggggccagtaattccggggtgctcagaagttttaggagggaatgagcctcagggaggagtgagcacctaaatgaacgcagtaaaccttcatggaccaacagtgattgaggatttgtgggcagccagagggagtctgactgaagtttacttggaaagaaagggcttgctaagaaaaaagggagtaaaaatgatgatagggaagtgtctaatgtatgtgcacatataagtaatacaaaagttttgagctcttccaagtataccatttatatacaaacaaataggtttattcattcattaaactactttggaagcgtcagtggatatatttgaaagtggtaatcctgaatctcttttaaactattatatgattcataatggttctcaggaattaataaatgattactgtgtttagctctgaaaaaaaaaaaannna

SEQ ID NO: 1993 - DNA, 1961 bp, Homo sapiens
gtaagttatgatacatttgaaaagtgtaacatcactgatgctccttgccataaacttaggcaatatgaaacaatcttgctcttagaaccacttcaaatgattggtaaattggggtcacttatggtaattttatttataatctttaatcttgtatctacatctcttttctcctcttccttctcttacattcagtaaatctaaggcttctttgagtttctgtgccctctcttacctattggcaatgtctataaagacacagctcacctctttcttctcttctgggaaatattattagccattatgctttcagcccacatttgttcacttattatttccctgtgtagaccctacaaaatgggaaccagatctttttctatagttttagataaaggtattctggcagttttctagagaaattcattattagaaatttattctaatgggaacccatttttggcttactctgttggttgctttgacctctgtttttccttgcagagctcgacttattaatatcatttaggagcactgggaaacatcattctgcatatttatcaggcaattcatacacacatccctacagttcagtgtataragcttctctgttttggacttaaactgaaagattttaatgactggtcgtattggcccagctcctaatatgcagatgaatcattgtgtctgcactgcggartgttggscatctttttacttctgcttttcttaagtagatgcaaatattgaggggatcctaaagaaggacaggaagagtaccagcatttttttttttctaaatctgccactaaagtccctttggattggattttagatartcatggcatttgaataacctgcatttattaatctctggaaataagtgaaaaactagaaaaggctgaacgtmcaatcaatataatgcaatactggggcctamcaaagtggataaatgatatttatcagcaggcgactgctgtttaattcacaggcacaaatgcccacattcatctgtgacactgaatcagttttcttgtgagtgttgtcttccctgaggtttctttctcttactcttctctccttgctcaaatttcagagttgtcatccacaattctgggaaaggtgatgtttcacttgcttcattcaataaagatggggtttaggggggtgacacaaggtatggctaccaatgtctaatgctggtattatatcctttatccagtatgctggggagaaagtacaatcattttgctttacttcatagctatctggttcattaaatcccatgagtcttggtaaattatgaagcaattattgattttgttgtggtcaacatcaagatatatattgattttcccaccagtcaatagtttccagaggcataatcaatattgatgtttgctgaacatgtgtgttaatgtcagtgtgtgtatatgtacttagatctctacactcagatatttattttatactctttctgaacgtttttgtaaaaaactattttctcccaaagatcctattattttttggctgatttattcagttcttcctttttgctttacatttttaatctcatttattcttccccggattgataatggaaaggaaaactaaggctttggaagaagtctatttgcctttaatgaaccggttgggggtgagtcttcctgatgagattgtgattaattgcaaagtgagtattacttcttgtctccatcctgtcggttcgatagaatgacaaaaaaaagttgaagactttcactctccattccagcatctaccagaccaacataactcagtaagcacatctgagaatccccctcatttactcccagtacttttttcaattatgtggaacatagacgaacaggtcaaacttggatttagacaaagttaaatgatcaactacatgatgcaatttaatgggcacaaaaaaaaaaaaaaaaaaaaaaaaaaaaagggcggcc

SEQ ID NO: 1994 - DNA, 2647 bp, Homo sapiens
tcccgggtcgacccacgcgtccgagaaacttcactgctatttccagatgtcattttaaaatattttagaatacctgatttctccatgacctatccatgcttttctaaggttccaaactaaaatgcagaatcttgagttattccagaacatagatttaaaatttgatcagaaaataaccttcatttaagaaatgaggggtcaggcgtgagccaccacgcctggccaccaatttttattatatgattttataactaaaatttcatgtctagcaatgaaattcttcttctctcttttttgtttatttatcttcgttttagtctttctttctcctcggatctttccccttctatctgtctcagttccttcattttccttagctctccatttctcccagcatctgctactagtctagtctcctggctcttaacctttttgagacacagactcctttaataaagtgatgaagaaagttatctccccagaagaatacacacagagaacacagaatattttgcatattatttcaaaggtaaagaatgccaagaagccaggggcagtagttcatgcctgtgatcccagtgctttgggaggctgaggtggaagaatcacttgagcccaggagttcgaggctggcctgggcaacatggtgagacctcctctctacaaaaaaattttaaaattagccaggtgtgctggcacgtgcctgtagtcccagctactcaggaggctgaggtgggtggattgcttgagctcaggaggtgaaggctgcagtgagccatgattgtgccactgcacttcagcctgggtgacagaatgagaccctagctctaaaaaacaaaggatgccaagtatctaaactttgagctccttgaggacaaaaactaggcgtttttcatcctatatgcccagtatttagttgatgtttcttgagtgtatataagtgtgcacatgcccagaaacatgtaaatattagtacatgttgtagaaaagctgttgtcaggaagatatttgtacactctggctttccactatgatagtcaccaggcacatgtgggtactgagcactggaaatgtggattgtccagattggaatgtactaattgtaaaatacgcactggattgcacaggcttggggcagtacaaacaaaagaatgaagatatctcattaatagtttttatgattattacacattaaaatgatcatatcttggatatattgagttaaaatatattattaaattaattttacctctttattgttacttttctaaaagcagctactagaaaattttaaattatacatgtaactgctcatagaaggttggtatctgggttcattcattagtggacattcataaacatagtaattttctttaatttcatggattcgttgaactaaagatcccataggtcaccgccttccctgtccctcctctaccaccaaaaattaatgagaacaaatgggaagaatttactctgcttttcaaggtactctgatacagatttttatctactgtcataagtatacctagaacaaaagcactgttgactcaagtagtttcactaatgaaaaggaagcagcagaatgactaatgtaaattggaggagactcttttatttggaatgctttggttcttccactgtggaacaggtgtggctgctgttgaaacagcagagtcatactaggcatatctgacatgtgaggaaccgcagcattgctcaggggcccctgccttccaatgaatggatgtaggatccatcatacatcagattgctcctttccaatacaaactctgatgcagaaatgcacttggtgtatttgctttttcttactttctggtttagggcagaaataatattttggcttagagacttttgtcctgaactatgacataataggatgagaatatcgtgtcaaaaatagccttacaaggtcctttttggcattaagacttctggagtgagtttgcagtggattattgagaataattctgttcattagcagctagccatctttgatgagtgctgacttctctcctttcagcacagagcaggaaatgcctgcctcccatgactctgggttggagtgaaggggaatgcataccagccaccctcttgcagaggtggggcaggtgctggcacagagcctcaggttaggccgaggggatgcaatctcagatcagcagccagcagtgtttgtaaacaacaggagggagattgtgctggtgatgtccaactcacaccaatgaagatcaaccggtttgtgctttgggcagcaggctgcagatggacagtgcctcctgagggcatcgccatgttttagggatccgtgttgcaggatacctgtctgcaagagagagtcaaggagggctttttaagcccctggggttcaggcctggcatctgggtgttaagtagagtgaatctcctgaagtccaaactaacatatgacattttaaaatgaggaaaacaaatggctctgaaaaggtctataggattataggtaagtggttaatacggaagatgttataaaggtctcaggaggagatggggtgatccagggttggttgaagtcgttgaaatggaattaccctgtcttttacctgtctgtggggaaaaaaaaaaaaaaagggcggccgctctagagg

SEQ ID NO: 1995 - DNA, 1520 bp, Homo sapiens
ccacgcgtccggtgaacgtggcatcctggacttttgcactgctcatattggtaaggtaagcaccacccctggcacacacacggtcaggcatgacataaaaagatgttgctaagggacattgaggtctatttcttgggacaagtaggaattttctatccctgttcattcttcatcttggccacacacatttgctctcttgctcatcccacagcgcctcccacaaggccacgctggatcctgccacagtgttaggttacatttccttccttctggctcaccagatgtggacctgactgggaacgctggaagctactgtccctggagccctactctcctggcttggtgcctccatggggaatgacagtgggcactctgcacccacatggaagggagtcccacaccttctaaggtctcctttgtaacctacctctggctccccactgtgccacatccctgtaccatggcatctgtgtcttttggacagcaccgggctttcaggatgactagtcagggttgtcttgtctggaccagatgctttgagggtgcagccttctgggaattccctctagggattttctatgatgctggcttccctgtaagtcccactccaggcccgggtactctgtccaagccccacagcagaagagctcttcaggggcctcatttggtgtcaactcagcaagaagtgaagtttaaagcccagagcactgcagggcattgtactggtgtaggaagggtacatccagggctccaaggtgttttctgtgctgagctcatctctcatcccccagccaccacagtgctgggtcatagctgggctgttgttttcctatggcaggcccagccctgtctagctctcagttcctctgctctgcagccagggcccttggcctgaaccctacacatagcagcactcactcgggctgtaagtattcttcagtacctgctatggcctggcatttaggaactctcaagcaacagcacaagtgaggcccctgctctcccgtgctttgggtccgttgtaacagcataaaaagcttgtggagtatcttagtgagtccactcttgcagctgggcagcatcatagtgttcggctccctgttacagtgtcatttcttggggacatagcagatggaaaattctggggtagttttgatttagcagttatcacatttgctgttcatggagtgtctgcaggggctaggcacccctcacgatgcttgtgtctgccagccatggtggctcatccctgtaatcccagcactttgggaggctgaggtggtagatcactcagggtcagaagttggaaatcagcctggtcaatatgacaaaaccccatgtctaccaaaaatacaaaaattagccatgggtggtggtgtgcacctgtagtcccagctactcagaaggctgaggcaggagaatcacttaaacccgggaggtggaggttggagtgagctgacattgtgtcattacattccagtctgggagacacagtctcaatctacaaaaaaaaaaaaaaa

SEQ ID NO: 1996 - DNA, 594 bp, Homo sapiens
  SITE (15): n equals a,t,g, or c
ggataatcgccagcngcccaatggtgtttacacaactgcagagcagcgtccgaatgcctacatcccagaagcagatgccactcttcctttgccaaaaccttatggtgctttggctccttttaaacccagtgaacctggagccaatatgaggcacataaggaaacctgttataaagccagttgaaatctgaatatgtgaacaaatccaggcctctcaaggaaaagacttcaaccaggcttccttgtacccacaggtgaaaaatgtgagcataatacttctaatattattgataagtaaggtaaccacaattagtcagcaacagagtacaacagggtttctatttacccaccaactactatacctttcatgacgttgaatgggacatagaactgtcctacatttatgtcaaagtatatatttgaatcgcttatattttctttttcactctttatattgagtacattccagaaatttgtagtaggcaaggtgctataaaaatgcactaaaaataaatctgttctcaatgaagtacggaaaaaaaaaaaaaaaaaaaaaaaaaaaaaaaaaaaaaaaaaaaaaaaaaagggcggccgc

SEQ ID NO: 1997 - DNA, 933 bp, Homo sapiens
tccgaaacattttaaaagtgaaatcatgagttaattttcttttatcacttggtaattgtctgaactaagtggctaactgctcaggacatagcagatgcaccatcaagctgggcacttcaagctgtcttctagaaatgaatttctgtgctttttagcactgctttttgcttgggggtgggaaagggtggtctccagtaactgctaagatgacacctatactggctgctgtccgagcagccctagtgactgtcttgggggcaatcagttgcttaatggttaatacagaagtacctgagtaatactttgcaaaaggactttccccgacctgtgctgggagtgtctccctgtaaactttgccaacctcctggttgttttatcagtgagagcatcatttaagtgaaaatataaattaaggagacagggctcataggacgcacattaaaacacctgatcattttgagcacctgctgtgtgcaaggcactgttctaggccaacagtatagatatacattgcctcccatcttttaaggctgataatgaagagaagaacatggaagaggaagttgttgggttttttttttttccagtcagaaatactgaaagatttcttacagctgtctggtttcctgatacttaaattgtgaaactttaagttcactccattatcatttctaaaatttattttgaataagttccctttcgggggagatacccatgtgtagagaatggtatggaaatctgccaatggagggattagaaattttgtcagtttaaagacttggaccttttgagatttttgttgttgttgttttgtttgttcttcttttctgagatgaaggctcactctgtcgcccagcctggagtgcagtgagctgagatcatgccactgcactccaacctgggtgacagatctcaaaaaaaaaaaaaaaaaaa

SEQ ID NO: 1998 - DNA, 4561 bp, Homo sapiens
  SITE (99): n equals a,t,g, or c
  SITE (105): n equals a,t,g, or c
  SITE (106): n equals a,t,g, or c
  SITE (1358): n equals a,t,g, or c
gcacaccctgacctaaagacatagccccaaatcactttcaccatgtagggtctgagcctctttaaatccatattcccgtccatccagtgttgtgcaaantgaganngagtgtgctttggtccttccttggagtcagcgtcgcctgtggccccctccgttattgtctcgtggccttttgtgctaaactcggggcctctgctgtggagtaaagaatgtgggtttgtgtccctacctctgtcactgctggttctgcaacccaggacsattctcattctactatggtgatgcccctgayttcgttgacagcacacagacrtgacttcagagttccgtgcacatgtgtgcatcttctttcccttctctagagatgtttggcatcttcctcctgctgggttgcaacrcaggctgctacagcattctcttatcttcctttgcccttacacagactccaagcccacggtagagacgctgggacccactgtgaagagcgaagagacaaccaccccctaccccaccgaagaggaggccacagagtgtggggagaactgcagctttgaggatgacaaagatttgcagctccttcgggattcaattgcaacttcgatttcctcgaggagccctgtggttggatgtatgaccatgccaagtggctccggaccacctgggccagcagctccagcccaaacgaccggacgtttccagatgacaggaatttcttgcggctgcagagtgacagccagagagagggccagtatgcccggctcatcagcccccctgtccacctgccccgaagcccggtgtgcatggagttccagtaccaggccacgggcggccgcggggtggcgctgcaggtggtgcgggaagcagccaggagagcaagttgctgtgggtcatccgtgagaccagggcggcgagtggaagcacgggcggatcatcctgcccagctacgacatggagtaccagattgtgttcgagggagtgatagggaaaggacgttccggagagattgccattgatgacattcggataagcactgatgtcccactggagaactgcatggaacccatctcggcttttgcagtggacatcccagaaatacatgagagagaaggatatgaagatgaaattgatgatgaatacgaggtggactggagcaattcttcttctgcaacctcagggtctggcgccccctcgaccgacaaagaaaagagctggctgtacaccctggatcccatcctcatcaccatcatcgccatgagctcactgggcgtcctcctgggggccacctgtgcaggcctcctgctctactgcacctgttcctactcgggcctgagctcccgaagctgcaccacactggnagaactacaacttcgagctctacgatggccttaagcacaaggtcaagatgaaccaccaaaagtgctgctccgaggcatgacggattgcacctgaatcctatctgacgtttcattccagcaagaggggctggggaagattacattttttttcytttggaaactgaatgccataatctcgatcaaaccgatccagaataccgaagrtakggacaggacagaaaagcgagtcgcaggaggaagggagatgcagccgcacaggggatgattaccctcctaggaccgcggtggctaagtcattgcaggaacggggctgtgttctctgctgggacaaaacaggagctcatctctttggggtcacagttctattttgtttgtgagtttgtattattattattattattattattattattatattttatttctttggtctgtgagcaactcaaagaggcagaagaggagaatgacttttccagaatagaagtggagcagtgatcattattctccgctttctctttctaatcaacacttgaaaagcaaagtgtcttttcagcctttccatctttacaaataaaactcaaaaaagccgtccagcttatcccatcctctgattgtcttctgacttaagggatttactgtggtgtaggttctgccagccaaccctacaagctgccatttccagtcctagcatttaagtaggatgttgttgcctttaacttttcttatccaggggaaaattgccattttagggtcagcatgaacagctctttcttgtatgcgatttaaaacaaactggaaaggaaacttcacacgtcaaaatccatagaagcgcctggacgaggcttaaagtgctttgtgagtgaataggagccattcgctaattctagacccacagtgtctggtggtggggcttcccttgtggggcttctggtggtggttttgccttttcttttccctcctccatgttcttctaaaacatatacatatatacatacacacatacacatattcttcaggtctctaagcccctggaagcagcattgtgtgatattctcagaggcaggggaaaatagagggaaaaatagagactattggtatgttctccccatcagcgagttattgtaactggtcaccactggacgggaaggagaacagaggagagggaaagagaagcccaacctctgtratcatatgagggccaaggctgagcagtgtagacagagaccctttgaaatgcatttgtctctcaaatagactagtaaacaccgacttctcctttgggttacaaacaccatttcaacctttcgggagagtcagagctaggatgtacaagaactgattctaaccagaagtccgcaagtactgtggacaagaatgcttaaccatgctgcttcagccttgagagacctaggttcttacacatatgcacacacgcatacacacatgcacgcacacacacatacacacatgcacgcacgcacgcatgcacaccaatttatgtttttattaagtgccttgaaaaaatgaagaaaaatgtattttccctttatgtaaaaattagtgaatatcttatgaattaaggcattcctctttccctaaccccgatggctccattcccaagtaccccaactcactgctgatcctattaaaggaatgagtcctgctacccgagtggtagtcatagccctagatgactctcaactactcttcaaagggaggcatcaggaatagaatgaaactgtgtgaaggataagattgttcgcatcaagatccaaatcttgatttcatattaacgcctaaggattgcctgtgtgctggaaatatatttgaaactcaaccagtatgcccagcctattgcatatcattgtcagaccatttttgctgctgtggtcacccacgatttcatttgtcttatacccaggtgaaaggggaagggtgaatgggactggctggttcctttaaatgttaacttatggaaatgctagttcaaatggtaatgtcacagtgttttgtatgcagagagcaagagttcaaccaacagctgtttattcatgtgtgtgtgtctttgctgctttgagttctctgtatctactgtgtatgtgaatggtcatgtgggactcagtggtggtgttgtgactttgacctagggtccgagtgtcacagctgatcttggcactcggcactcattggcacagtggtagttagaggtgaaaagtagagctgtcaagcccaagggcttagctttagggctcctcctgagttcggcccacagtagaagcaagattttaactagccccttttcctcttcaccctcccatgatgcgcagtgttcagaaagctggtaagtcctagggatttccagaagtagcctgcagaagaaggtaagtttgaaagccactccaggggtcctgatgctgtcatgctcagtgagccattttacagttctccaaagtctagccctgtttcggacctgcacttcacctctaagttatgtacaactcaacctgcatccctctaaaagtcctatatccatattcaccattggctaatttgaggccctgagtgggcyttgaatgctaaaaagaagcagggtacgsagggctacatgtagataccacaccaaggctggaggctgstctgtcrtaagacagaaagaaagacgctgggcccaattttgacttggccaggggacaccttggtgtgtttgttatctttatctgtgggtaggctagctgacccatctccttgagtcattccctttgggaaaccccactgccagtattgatctcctttttgccttgtactgaatgacacattacctccacactctcccggactaggtggtcaacagggccacagggttgctttctgtctttggtggggcaggggagttgacagggatgagggtccaaggaataagcatgaatgacaagaaaacaagggaaagagttaacctgtcacatagcaggttaactttttcagggtttgcagttagaggtattcgaccattcactggctgagccagatcacgggaacttgagagcttttactgtgattcttcaatgtaaaaaataaacaacaatgtcaaactgtgtttatatgatttgtataaagcctttttaagattactatttaaataaacattataccagagaaaaaaaaaaaaaaaaaaaaaaaaaaaaaaaaaaaaaaagggcggccgc

SEQ ID NO: 1999 - DNA, 1142 bp, Homo sapiens
ggttgacatgagtcatactttatgcggatgaagaagctgaaactcataaaacttgtccaagatgtcaaatcagaggttcagagaagagtgattactttgagtgggtgttcaggagggattgctggaggagatggttctttgatctgggccttgtaagatgggcagaagttgagtatgtggagatggtaatggccttcagaatttatgtcttatctgtttggcctggcatacaaggcctttgacaatttggcagagtctggcttttttggtaggtctccagccagctcttcactttgtttcagccacttggaaccaagccacatcgcctgaatatgcaggtatgggtgtttcagggctctgtgccttagccaagagtgtccgttctccttcacctccctcctcctacacctccctcctctttctcctgagctctttcttatacatccttgggcatggcctatatctgctttacatctcggggtcagaacctgacccatggcaagagctcagtaaatgataaatgaatagatggaggttgagccttggagaagacaagtaatgagaaaaaaaaatactttgttggcctcatgtccttcctgtcccttttggggcagaaaggctcattcacaagtccaggccaaagtcagcacaggcttcaatttcattggctcargccggtacacagatggggtgcattagagcttgatgawttaaarggttgggkgaaatgcctgamtgtkgggagarctgarggarctgtkgctggcattgcacaaagcttcctttatttcactccacagccacccccggcgttaaataatctatagattcttatgcaggtctgcctaatggaaagatcattgccccagcctcctccttggaaaataggcctttcttttcatttttccctccctcttccatttaagaaagttcaaggagagaatgtctctcctgttctcctctcttgacttaatctcctatgcagtttcagaatctgcccagtgggagttaggagctgggaagcagataactggagctggatcagcagtgtaattaaatgatactttgtactggtaatagggcctttcatctgaaagcttgacattcgtttggtgcaaaaaaaaaaaaaaaagggcggccgc

SEQ ID NO: 2000 - DNA, 1317 bp, Homo sapiens
gctcagtctgaatgatcatcttcaatattctatctagtgatggagtgagaaaattctcctgaactctgggcaggaagttcatattgctcagggtgagccaccatgataaaaataactcacacaggctaattacaattaatctaggctcttgacctttaaaaaatgtatataatgtttacatatgtttataatgtcacgccatttatttcatttaaaattttaaatgattttatctttggtcctctcttacaacttattcttggtacaacttattctttgtactataacagcagagatgagtaattgggacagactagcctccaaagcataaacttatttatgatttggccctttacagtaaaagggccaaatcataaataagtttatgcccacgcgtccgaacttatttatgatttggccctttacagtaaaagtctgctcatcccaggttttgcttgtcaatttatatactggcgtttgttcctgatcctatttatttatttctggcatccaactctggtagttctttctgaatcagtttaatgaagtttgtaaatgatgtaattaaacgttatttattacttttatttttttctagagatagggtcttgctgtgttgcccaggctggtcttgaactcctggcctcaagtgattctcctgctttggcctcccagagttttgggattacacgtctgaggcattgcactcagacacttttatctaaagtttatatactgttaaactaaagaaaccatatacaaatttcaagtcaggtgcttttactcattttataccttgattcttgaatggccagattttctgaaaatacccagttaatgattagattatgctacttcagtcaccacgtgtttgaaggctgatcacagaaaactagaagcaatgtaactagtttcaaaatataattaaatggaggaggaagtgtttggcttttttccctccagaccacaaattggtaggtaaagtaaaagttagatttgaaaattgggcckgggtgtggtggcttacacctctcagcacgttgggaggccaaggtgagtggatctgttgagtcccagagtttaagaccagcctgggcaacatggcaaaatgccatttttactaaaaatacaaaaatgtagctgaatgtggtggcgcatgcctgtagtcctagctacccaggaggctgaggtgggaggatcatctaagcccaggaagttgaggctgcagtgagccatgataatgccactgtatgccatcctgggcaatggaaatgagagacccccgtctcaaaaaaaaaaaaaaaaaagggcggccgc

SEQ ID NO: 2001 - DNA, 420 bp, Homo sapiens
  SITE (2): n equals a,t,g, or c
  SITE (21): n equals a,t,g, or c
  SITE (34): n equals a,t,g, or c
  SITE (93): n equals a,t,g, or c
gnaacagctttacccactagnctttggcaaaaancttatttaggtgacactatagaaggtacgcctgcaggtaccggtccggaattcccgggntcgacccacgcgtccgggcaaatggcgtgcaggcacagatggctaagcaacaagagcaagacccaacaaacctatacatctcaaatctccccatttctatggatgagcaggagcttgagaatatgctgaaaccctttggacatgtcatttccacaagaatactaagagacgctaatggagtcagcagaggtgttggctttgccaggtaaaattctttctttgtatgtaatcgttctttcctcattgttccttttaaattccattccttttttagtactagagcccaaagcaatagaatatgcaaaaaaaaaaaaaaagggcggccgc

SEQ ID NO: 2002 - DNA, 1506 bp, Homo sapiens
  SITE (312): n equals a,t,g, or c
  SITE (323): n equals a,t,g, or c
  SITE (416): n equals a,t,g, or c
  SITE (447): n equals a,t,g, or c
  SITE (448): n equals a,t,g, or c
ggaaaagttttattgaattatagttttttatattctgttctcttgctttggttttcttttttgtgggaactcctgttgtatgcatgttcgaggttcgtttcttgtttctaatatttgttgccttctcttgaattattttttttcttctaaaagtttgttttcattgtctgtttctcttacattatgtattgtgtatattgactcttatgtttctccttagtcttcttcttaaaatgattcattttatagccaattccttcctgagttccatcagctcatttctgagtgtttgtcactccgatttatgctatncttcgtatctngtagcaatattaaaagtttttaaaatgtgaaataatagataattcatctttgtgtgtatgattcttaccatgattcggtaagattcacttctngtagaagagttactctactccttatttaaannctyttttttcttgtaataactttatgtgtgatttggcttcagtccttttctattgctcatttttccatgaaattgatttttctaaacacttagcttgatttaagacttactaattttatggttcttagctctctctcgtatttggaagtgttcagaaacatggctgcttattttctgagatttctttcctttattccctcactccactttcaaaattaccctttcttaaagtgtactatttggtgttttttagtatattcacagagggagaaaccattaccactatcttattttagaagatatttatcacccccataagaaaccccatacttattaatagaactcctcattcctcacttcttccagcccctggcacccactcatctaccctctctgtctctagatttgcctatgttggacattggatataaatggaattatacaatatatgatcttttgtgactggcttcttttacttagcataatgttttctaagttcgtcattctgtagcatgtatcagtatagtcatttgctgcataacagagtttcagggccaggcacagtagctcatgcctataatgccagcactttgggcggctgaggtaggaggatcatttgagcccatgagtttgagatcagcctgggcaacwtagtgagactacatcagaaaaaataaaatagacaggcatggtggcacgcacctgtggtcccagccactcaggagggtgaggttggaggattgcttgagtttcaagaggttgakgctgcagtgaggtgtgatcgcaccayttccagcttgggcaacagagcaagacaccytwtctcaaaaaatctaaaacgaacaaaaaaaaaaacacgacatttcagtcaacagtggattgcgtgtacgatggtggcaatttctatcacctagtaacatcatagaccttccaataggataagatgtggaggtggaagatagtgatattgatgatcctaaccctgtataggcttaggcttatgtgtgtgtttctgtccgtttttagcaaaaaaaaaaaaaaaaaaaaaaagggcggcc

SEQ ID NO: 2003 - DNA, 1424 bp, Homo sapiens
gatagaatcatcactgcataggagccaggaaatttagtttccagtcccaggtagtccttagctgtataatcggaaaaagttactttgcctctttgggcctcaatttctactaattctatgatgacacagttggacttagaaattttaggatgctaaggactgacttaataaagctttcctggtatctcagacattttttaaaaggctgtatatgagtttgtgtatatgtgtatgtgcacatgcatttctggaaaggcttcccctccaaccattaaatatataattaagttataaatgtgttgtttataatgagaaataaataccacacttgacaatgtctatttccaaagaattgggtatttttgtgcttttgtttattcctggtattttcatatcatcctgttacacacgtgagcagagaatgtgtgtatcatccatatttaatttacagtcatagctagactaagttattatccaatgttattgaaagaatcagtagcacagatagaaatgaattagttcctagtatacagttttcttggcctttctcttaaccagtttgctttcttagagaaatgaactgatctgactatgattaagatcatttattgctagacagaagtaaaattagagattatccatagaacattttaatcttgtaatttatttggtgtgttgtagaacacctgacttttctcattgtatttggtaaatgtgttaaaaatgttaagtcagtgttatctggttttattttatctcttgagtcatgtttggcatgtatgtgttgggggggtgggcataggagttacacatttaagaaagccctatcttttagtagaataaattaatgcagattggcctgtcttcctgcctgcctggtcagtaacagtggactttggagattgatctagtgatgataaacctattgtatgtggcataagccagagaagtcagcttcgatagcaagtttctacattggcgtgagagagaagcatttagttaacatttcaaagtaactaagcctgttagcatccatgtattctatcagtagactttattgagtcctgtcatttgtatggtcttttattgttttttgttttcaacaaaggaaatagcacacacatacatctcaaaatggattatacctgttgtaatctcagtattttgggagatcaaggtgggaggatcacttgaggccaggaatttgaaaccagcctgggaaacatactgagatcctatgtctacaaaatttttaaaattagccaggtacagtggtatgcacctgtagtcctagctactcgggaggctgaggcaggagaatcacttgagcccaggagttcaaggcagccagtgatctgtgatcaaaccactgcactccaacttgggtgacaacatgggaccctatcttaaaaaaaaaaaaaaaa

SEQ ID NO: 2004 - DNA, 1348 bp, Homo sapiens
ccacgcgtccgattttctgtgaattttgggaagaagagagttaaatggaagaaagaaaaaaaatcttgcaaatacctttaggatagtagtttttttggatacagtagacattgtttgaaatgaatgattaaagctgtacttacctttcttaaaattcactgcttgggatgggctggtaacagtttcgaggttactctcattaggcttcagtgttaagtacactataccccattttcttgggaagtgaacagcaacatctactctgttaaaatcattatacattgtgtctgctttcagatttcttccttttagtaattagtgttgtgtatgtgttagatttttttttgtctttactgaaacacaccctttggaattcctttagcgaatatgctcttttgggtggataacctaataagctttcctctttgagttttctgtttttttactcagcacagccatggaagtagggatttaattttctgtcaaactctgcatctcacaaagcaatagttactcaaaacacgactttcaagaaggttattctttttaagctttcagcagatgagctgagtagcagcaggaaagcaggtattgagaactgtcttggtttttgtactgctgttgagtagtaacattgcagctgtcttaaatcctgaatgacacagaagcttatggctggtcgtactacatagcaccttgaaagtgacagggcttttcatttctatctgatttctgtttttcaaaaataaaactccttattcttttcctatcattgtaaatattcttcagcttcctatcactaatacatagtctcggcattagagaccagttaaaataaataggctgaggaaaatcttgatagtaggagagattttggagcattcattaaaagtaaaaatagggctgggcgtggtggctcactctcccctgtattcctagcactttgggaggccgaggcaggcagattgcttgaggccaggagtttgagaccagcctgggtcttaaaaggtagatattattctcattttacagatgacgaaactggagcttgtttgaaaagtttgcccaaaattgtagcagttagcgtgaggggcctgcctctagagaccatgcaaattcaacactaagctatactggactggtctcacatagtgagaccctgtctctacaaaaaatagaaaaagtagccgggcatagtggcccacacctgtagttccagctacttgggaagctgaggcatgaggattacttgagccaaggagatcaaggatgcagtaagccatgaccatgccactgcactcgtgcctggacaacagtgcaagaccctgtctcaaaaaaaaaaaaaaaa

SEQ ID NO: 2005 - DNA, 849 bp, Homo sapiens
tcgacccacgcgtccgaaagaatcttcctcttgctctctttttctttcctacccctcacttcatctgtttccctgatttttgactctcccctttccagtcatttctttcccacccatccgcagtcctggaaacatttattttttcttttgcccactgttttcatttgctcattaaattaaaatgactgctcggctcattgggaatccacatccccaagttagactggggatatgctctctgtactgtctccttctatggaattccaccccacccagagagagatgacttcacagtttgttcatatgagcatcatcccatgtcgtccccaacccagggctggtaggtgctacagcttgtgcttcatgctgctcctgtggcccctattcctacccagctcagagctttgcagggtctactgcagacaatcagaagtcagtttctaacaaatagcaacagccacaaatctcttcctccttcctctctgacattaccctgtgcaacttttctcaaagtctgttgcaccactcagcaaagcaagttgcaccagctatatcagaatcacctggggcagcctattaaaaatgcagactgttgagaccatcctggctaacacggtgaaaccctgtctctactaaaaatacaaaaaattagccggccgtggtggcgggcagctactcgggaggctgaggcaggagaatgacctgaacctgggaggcagagcttgcagtgagctgagattgtgccactgcactccagcctgggtgacagagcaagactccgtctcaaaaaaaaaaaaaaaaaaaaaaaaaaaaaaaaaaaaaaaaaaaaaaaaaaaaaaaaaaaaaaaa

SEQ ID NO: 2006 - DNA, 1519 bp, Homo sapiens
ggcacgagggttaatggaatcacgtggtatgtatctttttgagagaggccttttttactctgtataatatccttgagattcatccatgttgttgtgtgtttcagtagtcatttattcttatttccggtagtattccatgctatggatgtaccacagtcgtgctctttttgttaatagaactaaagcaactctatggagctaaggtaactgggtacagctgagtagtgatttaaagtttctggagtgttttcagaaataccatctcacctctaacaaggcgatctcaagtcacttatttgggaaaacaaaattacgaagatatgatttctttcattgttgtagaaccattaaataagtcatcagattatgatttgaacccagggcacccagtcaagtgctctttccctatgcggccttagctacggggatttacatttacagttgagaagtgaaacaagaaaaatttgtttttgaaacataatagtaccatctagcctggctgaccaacccttccccagcaccaccagtggacatgcgcatgtacatacacacatacatacccacactttaggctgagggagaatcttgtctttttgaatagccttcatagtaacctctgggattcaagggtacctgatatttaagacctttattaaaccttggttcagtggttttcaaacatttttgaatatcagaaccccttttcctaatggactgtttcatagaaccccaaaatgtgtaacaggtaacagcaatagttttgaaagttcaaaatggataatctttacttgtgaggtcggacatgtgaatggtgggcatattcccatgattctaatatgctgtcagaattatgagtgacagacagttgctgacttggagcacttcagtggctcatttgtttttctctatttggttatacaacagtgagacaagcgtgatgcacatggccattgtcagggtgacttttcctgaacagcatgctgtgtagttactttgattaatcagagatgggaggacaagctccgttttgaggtcaacataatactgagctatcctagcaatacaaaattatgtgtggtggcgggcttcattgtcttaacatatggcttggaacatgtttgagtgtgcatctttttttttttaattgtcctaccttaaaaacacacacattttgcagactctctgaagccctgtggactactattagataattgttggttgggcatgctgtaatcccagaattttgggaggcagaggcgggaggattgcttgagcccaggagttcgagaccagccctggaaacatagcaagatcctacctctacaaaaaaattaaaaaattagctgggcatggtgatgcatgccagcagacccaactactccagagactgaagtaggatgatcacttgagcctgggagttcaaggctgcagcgagccctggttattctgttgcactccagcctgggtgacagaatgagaccctgtccccaccctcccccccaaaaaaaaaaaaaaaaaa

SEQ ID NO: 2007 - DNA, 1292 bp, Homo sapiens
cggcacgagctgggattacaggaatgagccaccatgcctaacgagtataaaatattgttgattgtgatgtttcatgcacgtaagttttcaattttgatgtaatcttgctacttgtcatctttgcttttgtttcctgtacttttgtgtcatatccaatcatgtgtattatatatatatatatgcacatacacacacatatatatatatacaacagatatatataaaatgaaatattattcagtcttaaaagggaaagaaatcctgtcatttgcaacaacatggatgaacctggaagacattatgctaagtgaaataagccaaacactgaaaggcaaatagtgcatgatctcatttatatgtagaatcttaaaaaagtgaaactcatagcagcagagagtagattggtggttcccaggggcccgagagaggaggtaataaggagattttggtaaagggtacaaactttcagttatgcaaaatgactaagttctggagatctagtgtagagcatagtgactataatgaacaatacagtattgtatactaaaatttgctaatagagtagatcttaaatgttcacacacacacactcacacatgaaagaaaatgataactgtatgaagcaatgatatgttaatcagcttgattgtagtgatcattttacaatgtgtacttatatcaaaacatcaggttgtataccttaaatatatatgatttttatttgtcaattatacctcagtgaagctgaagaaaaagaggggaaagacttaatgatattggatttggcaatgactttttggacatgacagtaaaagcataggcaacaaaagtaaaaatagataaattggactacatcaaaattaaaaacttctttgcatcagaagtcacaatcaacaaagtgaaaacacagccatagaatgggagaaaaaactacttgccaaccatagatctgataagaggttaatatccaaaatatataaagaactcctgaccttgtgatctacccacctcagcctcccagcactttgggaggctgaggtgggtagatcacaaggtcaggagttcaagaccagcctgaccaacatggtgaaaccccatctctactaaaaatacaaaaattagctgggcatggtggcgcatgcctgtaatcccagctactcaggaggctgaggcaggagaattgcttgaacccaggaggcagaggttgcagtgagccgagatcttgccattgtactccagcctgggtgacagagcaagactctgtctcaaaaaaaaaaaaaaaaaaaaaaaaa

SEQ ID NO: 2008 - DNA, 1292 bp, Homo sapiens
ggcacgagctgggattacaggaatgagccaccatgcctaacgagtataaaatattgttgattgtgatgtttcatgcacgtaagttttcaattttgatgtaatcttgctacttgtcatctttgcttttgtttcctgtacttttgtgtcatatccaatcatgtgtattatatatatatatatgcacatacacacacatatatatatatacaacagatatatataaaatgaaatattattcagtcttaaaagggaaagaaatcctgtcatttgcaacaacatggatgaacctggaagacattatgctaagtgaaataagccaaacactgaaaggcaaatagtgcatgatctcatttatatgtagaatcttaaaaaagtgaaactcatagcagcagaaagtagattggtggttcccaggggcccgagagaggaggtaataaggagattttggtaaagggtacaaactttcagttatgcaaaatgactaagttctggagatctagtgtagagcatagtgactataatgaaccatacagtattgtatactaaaatttgctaatagagtagatcttaaatgttcacacacacacactcacacatgaaagaaaatgataactgtatgaagcaatgatatgttaatcagcttgattgtagtgatcattttacaatgtgtacttatatcaaaacatcaggttgtataccttaaatatatatgatttttatttgtcaattatacctcagtgaagctgaagaaaaagaggggaaagacttaatgatattggatttggcaatgactttttggacatgacagtaaaagcataggcaacaaaagtaaaaatagataaattggactacatcaaaattaaaaacttctttgcatcagaagtcacaatcaacaaagtgaaaacacaagccatagaatgggagaaaaaactacttgccaaccatagatctgataagaggttaatatccaaaatatataaagaactcctgaccttgtgatctacccacctcagcctcccagcactttgggaggctgaggtgggtagatcacaaggtcaggagttcaagaccagcctgaccaacatggtgaaaccccatctctactaaaaatacaaaaattagctgggcatggtggcgcatgcctgtaatcccagctactcaggaggctgaggcaggagaattgcttgaacccaggaggcagaggttgcagtgagccgagatcttgccattgtactccagcctgggtgacagagcaagactctgtctcaaaaaaaaaaaaaaaaaaaaaaaaa

SEQ ID NO: 2009 - DNA, 935 bp, Homo sapiens
  SITE (691): n equals a,t,g, or c
  SITE (806): n equals a,t,g, or c
  SITE (861): n equals a,t,g, or c
  SITE (868): n equals a,t,g, or c
aattcggcacgagctatattcttcttgatttctagccttttattggctctcagattgccagagttgggactcaatagtaagtaaccattttkttgaggtggtagtgattctaccagggtgagtwatcatgacagcagaatcactgcgtttttytctctactctgtggcatagactctatgccatagagtgacgtgtgaaaggcttgaggctccctacctacgagacaccctggtccattctagcagtatggcacgtgctgactgggttttgagtctcttgctgtataatcacattactgcacttccctgcattttctcatccaaaaatggggattacctgctttgtggatcggtttgcagatgaaataacacacgcagggtatctagcacggtcccccacatggcacattcagtgttagccacacttccatactaactgccctgcggggatatttaatgagctcttaaatggcagaaatgttgtgtcttttcctgttcccttagtattcctatttttgttggtaatttttcttatgaaccatgcagttgtctagttcaggccattttagtatgcagttttatctttgcttccaacatgatttaatgttcccaaattggatttcacataatcctagtgtcctttgagacttgaattggttctaggccaaaaaagggtgagggggaaggaagnaattcagagtcaaatttggcaaataatatatccctgtcgttttgttttttctttttaagacttgggccgggtgtggtggctcacgcgtttaatcccagcactttgggaggctgangcaggcaaatcacctgaggtcaggagctcgagaccagcctggccaacatggtganaaatacnaaaattatccaggcatggtggcccacgcctgtagtcccagctactcgggaggctgagacaggagaat

SEQ ID NO: 2010 - DNA, 2180 bp, Homo sapiens
ggcacgaggttattctagttatacattcgtctaaatttttttcaaagttttcaacttctttgcctttggtttgaatttcctcctgtagcttggagtagtttgatcgtctgaagccttcttctctcaactcgtcaaagtcattctccgtccagctttgttccgttgctggtgaggagctgcgttcctttggaggaggagagacactctgctttttagagtttccagtttttctgctctgttttttccccatctttgtggttttatctacttttggtctttgatgatggtgatgtacagatgggtttttggtgtggatgtcctttctgtttgttagttttccttctaacagacaggaccctcagctgcaggtgtgttggagtttgctagaggtccactacagactctgtttgcctgggtaccagcagcggtggctgcagaacagcggattttcatgaaccgcgaatgctgctgtctgatcgttcctctggaagttttgtctcagaggagtacccggccgtgtgaggtgtcagtctgcccctacttgggggtgcctcccagttaggctgctccagggtcaggggtcagggacccacttgaggaggcagtctgcccgttctcagatctccagctgcgtgctgggagaaccactgctgtcttcaaagctgttcagacagggacatttaagtctgcagaggttactgctgtctttttgtttgtctgtgccctgcccccagaggtggagtctacagaggcaggcaggcctccttgagctgtggtgggctccacccagttggagcttcccggctgctttgtttacctaagcaagcttgggcaatggcgggcgcccctcccccagcctcgccgctgccttgcagtttgatctcagactgctgtgctagcaatcagtgagactccttgggcgtaggaccctccgagccaggtgtgggatataatctcctggtgaaccgttttttaagcgcgtcggaaaagcgcagtattcgggtgggagtgacccgattttccaggtgccctctgtcacccctttctttgactaggaaagggaactccctgaaccccttgcgcttcccgagtgaggcaatgcctcgccctgcttaggctcgcacacggtgcgctgcacccactgtcctgcgcccactgtctggcactctctagtgagatgaacctggtacctcagatggaaatgcagaaatcacccgtcttctgcgtcgctcacgctgggagctgtagaccagagctgttcctattcagccatcttggctcccggatccagaaatatgttcttaattatatggtggcgtgcttgatgtttgggatgcaattcccttgtctttgttttccttgatctctcttataagttttatttatttatttattttattttttattttattttgagtcggagtttcgttcttgttccccaggctggagtgcagtggcgtgatcttggctcactgcaacttccgcctcccagattcaagtgattcttgtgcctcatcctccctagtagctggattgtaggcacccactatcacacccagctaatttttatatttttagtagagatagggtttcgccacgttggccgggctggtctggaactcctgacgtgaggtgatccacccggtcatctaaagtgttgagattagaggcatgagccaccgtgtctggcctcacataagttttagaataagttgtcaagctccacaaaaagtcttgctgggtttgtgattggaattacatttaactcataatttgtgttaactaatattttccaatgcatgatcatagaatatctttgtgttcagttcttcttttttgtatttaaatgcatttttaaatcctcttgaaaatcattcggccgggtgcggtgctcacgcctgtaatcctggcacttctggaggccaaggcaggtggatcacctggggtcaggagtttgagaccggcctggccaacacggcaaaactctgtctctactaaaaatacaaaaaaattagctgggtgtgctggcaggtgcctataatcccagctactctggaggctgaggcaggagaatctcttgaacctgcggggcggaggttgcaatgagctgagattgcgccactgcagtctagcctaggcgaaagagtgaaactccatctaaaaaaaaaaaaaaaaaaaaa

SEQ ID NO: 2011 - DNA, 948 bp, Homo sapiens
ggcacgagcaagaggctgtgtcattttttaagaggatggcaaggatgacctcaaatgagctcaacaaaactgggaatccaaggaatggtgcttgtagggaaagagaggtcagttgtggtccttaaacctcttggcaccttgtgcgggttataaaacaaggagctggagtaaaattgcccttacccccaatccaaatgctgtccaggatttaggagctacccaacctgtggttatatggtgttggtttccattttttgtttgtttgcttgtttccaaaatagccttgcttggtactgcatggaaagttcaagcttttcttcttgcccgctcagggctggcctcttccccgtgtcttcacagcgtccctaaggaagatttttgcagcactctctggagctgaggggagtgaaatttggtccagagaaggcggaaggaaatagttttcctgtttccttttctcgaggtggatgtcctcaggcttccttcacacctccttctcatgggtgcggctggcagtacsgtcaggctgtggaggagggctgagaagaaaggggcactggtccagccccaggtttggtctgagacaggtacacagcagataccatcccaccttcctctctaaagaacaggccagccacacatataaccctttccctactttactaatgtatcccttatgtggtaccagcaatggaggacaggcagacttaccccctgccatctagagagaatgttgttattacccgtaaaacttgaccacccccatatcccactcctttttgtaaaaacaaatgcttaaacctgtgagcctgccgttcctttctatgtgttaatcagtttccttccatttgagctgtgtgggagggaagggcattgaaattgtaggttgtaatcttgtgccaaccaataaaaaccagtatttcacacacaaaaaaaaaaaaaaaaaaa

SEQ ID NO: 2012 - DNA, 844 bp, Homo sapiens
ggcacgagtttgatgagaaattagaagagtacctaatgttgaaaacatgacatgcgctcttgggatctgctgttctctccagggctccagaacctgatacctgttaccaaagctaggaaagagctttatcacaagccttcactgtcctggcatgagaactggctgccaggctcagtgtaccccattaactgtgaatgaatctgagcttggtttcctttattgcttcctctgcaatatgattgctgaaacacattttaaaaattcagaagcttgtcactcctgttaatgggaggatcagtcacacatgtgtagtacaaggcggactttgtgtttgtttttggtgttaatttttagcattgtgtgtgttgcttccccaccctgaggagaggacaccatggcttactactcaggacaagtatgccccgctcagggtgtgatttcaggtggcttccaaacttgtacgcagtttaaagatggtggggacagactttgcctctacctagtgaaccccacttaaagaataaggagcatttgaatctcttggaaaaggccatgaagaataaagcagtcaaaaagaagtcctccatgttggtgccaaggacttgcgaggggaaataaaaatgttatccagcctgaccaacatggagaaaccccgtctccattaaaaatacaaaattagcctggcatggtggcgcatgcctgtaatcccagctactctggaggctgaggcaggagaatcgcttgaacccaggaggcggaggtcgcagtgagccgagatcatgccagtgcactccagcctgggtaacaagagtgaaactccgtgtcaaaaaaaaaaaaaaaaaaa

SEQ ID NO: 2013 - DNA, 608 bp, Homo sapiens
aattcggcacgagctgaggaggtataccatgtaaagttggcctttactgagattcacgttttcaaaatgcaagcacttcaaacagcatgtttctttttcctcttgttagctcaaccttttcaatgaacaaaaaaagctgcacagagtttctgattggttttataatgagatcattatcctagcttgatcatgttatagaaaccactttccagtccataaactgcaatgtagaactgaaagtcttgaaagaacacaccggaacagtggtcagcctcctgatgattgattctagtcttctcacctctttggcagcaggttctgtgaggtgactgttacaggaagagcattgcaatctgtaagctcagctatttggtctgtttctagagatgtgaaaaaagaaaacaacaacaaacgtttgagttattttttcccccaaacagggactctgtggtaatttcattattggtagttgcaaaggaaaaagcactcaaatgaaagaaattaatgtccaatttgcctttcagtggcccgaagcttatctgatagccattgcaatcgaatgaatggatgacttttaaagagaaaaaaaaaaaaaaaaaaaactcgag

SEQ ID NO: 2014 - DNA, 1595 bp, Homo sapiens
  SITE (1284): n equals a,t,g, or c
gcgccgcggcccccacctctgcctccttctactcgggcgccccggccgccgccacctctccccagcccaggagaggctgcggagccgcagccgcccagaccgcgcagcggggaggcaggttccgcacgaaataaatcagaatgagttatgcagaaaaacccgatgaaatcacgaaagatgagtggatggaaaagctcaataacttgcatgtccagagagcagacatgaaccgcctcatcatgaactacctggtcacagagggctttaaggaagcagcggagaagtttcgaatggaatctggaatcgaacctagtgtggatctggaaacacttgatgaacgaatcaagatccgggagatgatactgaaaggtcagattcaggaggccatcgccttgatcaacagcctccacccagagctcttggacacaaaccggtatctttacttccatttgcagcaacagcatttgatcgagctgatccgccagcgggagacagaggcggcgctggagtttgcacagactcagctggcggacagggcgaggagagccgagagtgcctcacagagatggagcgtaccctggcactgctggcctttgacagtcccgaggagtcgcccttcggagacctcctccacaccatgcagaggcagaaggtgtggagtgaagttaaccaagctgtgctagattatgaaaatcgcgagtcaacacccaaactggcaaaattactgaaactactactttgggctcagaacgagctggaccagaagaaagtaaaatatcccaaaatgacagacctcagcaagggtgtgattgaggagcccaagtagcgcctgcgcttgcgtggtggatccaacaccagccctgcgtcgtgggacttgcctcagatcagcctgcgactgcaagattcttactgcagtagagaactctttttctcccttgtacttttttttgacctggcatctttttatagggaaaaatggcctttgtaggcagtggaaaacttgcaaggaaagctgccgtctctttggcagtctgatgcagagcctgcactctggcactcgctgaagaatctggaaggttgcggtttgctcttccagtgttcgggggcctctggctgctgaaggattcggtctaccacggagggctgtgctgttaggctgcatcccactcaaaatacaggaaaagcacgaatcatgattctgctttctgttagcttaggcagacattgggccttcacctacaagtttttccttacccctgtggtttttgtgtttttttttttttnctttttccataggaaagaatatataaatttgtaaatcctaattcaaagatggctcatgtgtgagggcattgagtttgatttgttttccctttggtctgggttgtgtggcttttgggggatgcgtgtgagggggctatgtgttttttaattttttaaatatatattttggtgctgtgtgtggtaagagacttgttcctagtggatcaatgaaccatctcttctgggcagttttgttgaaaataaaggtttctctttgatttcaaraawraaaaaaaaaaaaaaaaaaaaaaaaaaaaaaaaaaaaactcgag

SEQ ID NO: 2015 - DNA, 953 bp, Homo sapiens
ggcacgagcagaattcctgttgggacaagagtaggaagaggcaagactgaatgagtggtcctctgcatggacaccactcactcctgaggctgctggcagcatgtaccctcatcctgcctcactccttagcagctagtgtgaacgtgaagaattgagaaatatagtgatcacatcagtgtgtattcattctggtcagcaaactaggcatatcttaagttttttaggaaatcactgttggcctccttttgtgtatcatagtgcaaaacagttttaattagttgaattattatagatacacaagaatttagaaaatgcgtctgggcgtggtagctcacacctgtagtcccggcactttgggagtccaaggcgaatggatctgcttaagtccaggagtttgagaccagcctgggcaacatggtgaaaccctgtgtctacaaaaactaccgtgtctacaaaaaaattagccaatcatggtgttgcatgtctatggttccaactactttgagaggctgtggttggaaagatcacttgagcccaggagttagaggttgcagtgagccgagatcacaccactgcactccagcatgggcaaaaaaaaatgagactcttgtttaaagaaaaaaaaaaagagtttagaaatggccattacgggccgggcgtggtgctcacgcctgtaatcccagcactttgggaggctgaggtgggtggatcatgaggtcaggagatcgagaccatcctggctaatacggtcaaacccmgcctctactaaaaatacaaaaaatcagctgggcgtggtggcaggtgcctgtagtcccaactactcgtgaggctgaggcgggagaatggtgtgaacccgggaggcagagcttgcagtgagccgagattgcgtcactgcactccagcctgggcgacagagcgagactccatctcaaaaaaaaaaaaaaaaactcgag

SEQ ID NO: 2016 - DNA, 1320 bp, Homo sapiens
ggcacgagccaattaacccagaagtgtttattgaagatactttttcacctgttgcatttcaggggcacctttatatgtgtgtgtctgtcttgtctatctttgtgccccagctacactgccttaattatagtagttttgtgagtctcagtatctgatagttaaatcttccagctttattcctcagagtgccttggccattctttttttgtttgtctgtttcaaaaaaaaaaaaaaaaaaattccagagtctagaaattcggtcatttttctctttatgtaaggtaagaattaagaatcctcacatctgcaaccaaaaatacaagcctggtgtgtaacactaaagggtaaaacagggatagatataagctgttatgctattcttcaggcaacactgtggataagtgacattcagatgtttactgtaaagaaaaatttgaatacatttgtattgaagggcttttagaaaagagcattactacacagaactgagagttgaaaatatgaaggtgtggaagattaagagaacgcgtttactttaaaagataatttaaaagttatctttccaggctgacacggtggcccactcctctagtcataacactctgggaggctgtggtgggacgatccctcgagcccaggagttcatagaccagcctgggtaatatagggagaccccatctctatctaaaattttttttaaaagaaaataaatatctttacagttatttttcttagtcctatgttctttattttggtgttttccattggatacctgcatgccaagtgttgtgctacagtattactgaagagtataatggaagtaatgtcctgctgaaaattttctttgagatattaatcattaataatttatatattgctatttaatacttacataggtctttagccttttaaaggatttctgtttgacagcttttataattgaaagttattccatttttttttaattttgcatgcttgaaaaagatgaaaacagtgatttaaattatgaagtatggggccaggtgcagtggctcatgctggtaatcccagcactttgagaggctaaggcaagtgggtcacttgagcccaagagttcaagaccagcctggccaacatggtgtgaaaccccgtctgtactaaaaatacaaaaattagccaggcgtggtggtgcatgcctgtaatcccaggtacttgggaggctgaggcacaggaattgcgtgaacccaggaggcagaggttgccagtgagccaagatcacatcaccgcactgcagcctgggtgacagagtaagactctgtctccaaaaaaaaaaaaaaaaaa

SEQ ID NO: 2017 - DNA, 617 bp, Homo sapiens
ggcacgagcaaggccgtagagctggtgcgtgcgggtagcggggctctccgaggagccgcacgccggcggcaccatggtccacctcactactctcctctgcaaggcccaccgtgggggccacttaaccatccgccttgccctgggtggctgcaccaatcggccgttctaccgcattgtggctgctcacaacaagtgtcccagggatggccgtttcgtagagcagctgggctcctatgatccattgcccaacagtcatggagaaaaactcgttgccctcaacctagacaggatccgtcattggattggctgcggggcccacctctctaagcctatggaaaagcttctgggtcttgctggctttttccctctgcatcctatgatgatcacaaatgctgagagactgcgaaggaaacgggcacgtgaagtcctgttagcttctcagaaaacagatgcagaagctacagatacagaggctacagaaacataaatgagctgacttcagtgagcatagcagtgggaacaaggtcaaggtccttttgaaacactgcagcgatcttaattttgttagatttggagttcaataaatggagtatcctgaaaaaaaaaaaaaaaaaaaa

SEQ ID NO: 2018 - DNA, 536 bp, Homo sapiens
ggcacgagcttgctgcggcagagacgccagaggtgcagctccagcagcaatggcagtgacggcgttggcggcgcggacgtggcttggcgtgtggggcgtgaggaccatgcaagcccgaggcttcggctcggatcagtccgagaatgtcgaccggggcgcgggctccatccgggaagccggtggggccttcggaaagagagagcaggctgaagaggaacgatatttccgagcacagagtagagaacaactggcagctttgaaaaaacaccatgaagaagaaatcgttcatcataagaaggagattgagcgtctgcagaaagaaattgagcgccataagcagaagatcaaaatgctaaaacatgatgattaagtgcacaccgtgtgccatagaatggcacatgtcattgcccacttctgtgtagacatggttctggtttaactaatatttgtctgtgtgctactaacagattataataaattgtcatcagtgaactgtgaaaaaaaaaaaaaaaaaaaaaaaaaaaaaaaaaaaaaaa

SEQ ID NO: 2019 - DNA, 451 bp, Homo sapiens
  SITE (6): n equals a,t,g, or c
  SITE (27): n equals a,t,g, or c
  SITE (34): n equals a,t,g, or c
  SITE (434): n equals a,t,g, or c
  SITE (437): n equals a,t,g, or c
  SITE (447): n equals a,t,g, or c
tcacancacactcccctctttaaagtnaacaaangctgcagctcgcgcgcctgcaggtcgacactagtggatccaaagaattcttttttttttttttttttaactttaagttctgggatatatgtgcagaacgtgcaggtttgttacgttggtatacatgtgccatggtggtttggtgcacctatcaacccatcatctaagttttaagctctgcatgcaataggtatttgtcctaatcctctccctccccttgacccctacccaccagctggcccaggtatgttatgctccattccctgtgtccatgtgttctcattgttcaactccaaaaaaaaaaaaaaaaaaaaaagaattcaaaaagcttctcgagagtacttctagagcgaccgcgggcccatcgattttccacccgggtggggtaccgggtaagtggncanttttcgcggnagta

SEQ ID NO: 2020 - DNA, 272 bp, Homo sapiens
  SITE (271): n equals a,t,g, or c
attctctttttttttttttttttttaaaaatttgtcagtatgtgccttatggcccagaatgtggtatatcttcatgaaagttccatgtgaactcaagaacaatgtgtaatctgcagttacgagtgtagtagtctataatgctcattatatacacttgaagaatggtgttgctgagtccagctatgtctttacttattttctgcctgccagctctgtccatttcaaaaaacaaaaaaaaaaaaaaaaaaaaagaattcaaaaagcttctcgng

SEQ ID NO: 2021 - DNA, 1346 bp, Homo sapiens
  SITE (14): n equals a,t,g, or c
  SITE (19): n equals a,t,g, or c
ttgcagaattggcncgaanaaaagcagtactgactctggagttgagcagatgtgggttcaaacccacatgtacatgtgaccagcagtgtcatcaaagagagttctgcatttctctgagcttcagttttcctcctatgcaaagaggggatcacatctactaccaagatgcaaaacagttagtacaaaatgactgctcgcagggccacatttatactgtggatgcattttggtcatattttggtaacataatctgatgtggctgactgtgtcatggcttcatacctttcatgctttggacttttgtgctttctgcaggaacgattccaggtgaagaatcctccccatacatacattcaaaagctcaaaggctatctggatccagctgtaaccaggaaggtaagatggatttgtttccactctttgttattgcttccttattagcgagcagaatcctcctgcattggaagagaccttccttcctctgcattagagcctctgccagagcctccacaaaaaacaaccttgggagaccaacaacgtaagaagacaaaggaaaaaaaacaaccttctcacttgaagatgtgtataaaagttctttcctgacatgagagtcacgtacctctgatggttgttgagtcactgctatttccaattacatagggcagtgagtgcattccagaggtattcaggctcctagaagagcaggctttgcaaagggaatacttgcctttcagttttttatgccttggtgcatttccagagaccttgaaaaatcactgggcctttgtcatcccagctgtgcactcacatcctgtgttgatgcttttagcagctcccccctactccccccaacccctgcccctggcctgagaaggtaagtagagaatagctgattccattctcaacagactctccccttttacaaacaagccctgctttgtgcagccacacaattggtttaaactgatgcctcgtggtaaagcatgtagcctggcacggccctgtgggcctgaatcagtcctgggatgtctcagggcagagctgtccttgctcaagatgggtgaaggggtgctttaccagatagcatttgtttttccattgacctacaactcctgcttttaaggctcctgcgaaaatctctcaggctgattctctctgktgkttcagtgtgtgattcttgagaaaagaatggtatactttacctagttagccattttcagggctcttgatgcttgcattaaaaaaaaaatctttttctttatcttctactctaactcttcctcccctcaccgcccaccccccgaccaaaaaaaaaaaaaaaaaaaaaaaaaaaaaaaaaactcgag

SEQ ID NO: 2022 - DNA, 638 bp, Homo sapiens
attacgccaagctcgaaattaaccctcactaaagggaacaaaagctggagctccaccgcggtggcggccgctctagaactagtggatcccccgggctgcaggaattcggcacgagattaaccatcagtctgggctgcaacagaggaaaagcagtgatttggcagtgccaatgggactcagatgggtacccagctcctttttttgctatgctcaattttaatccccctatgtgtggagttggactacatattcttgaagcagtcttccctaaataatcttgtagtctagctaatgtcaaatgtttaattggcaatgagctgaaattgcctctccaacaagggcccatttggatgccacttgttctgtgctgccaggtagatctatgtccatgtgctttaacaggcagttgagtgtggagagggatgacaccctctcttgggaataaaactgaatatatgccacgccaccttcccttagagtagagttgatggaatccctacaggcacagccaagagccttcttagacaaggcattttgctgttgttcttttaatagtctcgggtctttatttgactcaaaccgaacactgcacgtctctcatatttaaaaaaaaaaaaaaaaaactcgagggggggccc

SEQ ID NO: 2023 - DNA, 923 bp, Homo sapiens
ggcacgagctacagaccacatagcctgggcaccagagagaagctgctggcgtcagcggccccttctgtggctctggcctccatgcaccgagcagctggacacctgtctgtgcagggaatgacttgatttaaatgacataaaacgacaccaaatggtagaatggacactggcggtgcttgtctgtcatctctttcttattctttatttgtttctgttctgtgagaattgcctagtggtgtcatgctgaacctgcctctctgtgtaggtggcctttcttcagtgagtatttgcgaaagtgttgggaggtagtgagagtcgttgcatctttttctggcacttccttggtgggaccagccacttacgtgcaccctgaaagtcaagacgctcgtcccgtcttccccctcggcggttttcagtaagcgagcgcgcagttgaacgtttctcacctgaacaagtccccttcgtcatgagacggggcggctataacattgccaaacacatccgtattactcgcatcaggagtatcaatcacctgagctcaccatagtctaatagaaaacaaccgaaaccaaataattcaagcactgcttattacaattttactgggtctctattttaccctcctacaagcctcagagtacttcgagtctcccttcaccatttccgacggcatctacggctcaacattttttgtagccacaggcttccacggacttcacgtcattattggctcaactttcctcactatctgcttcatccgccaactaatatttcactttacatccaaacatcactttggcttcgaagccgccgcctgatactggcattttgtagatgtggtttgactatttctgtatgtctccatctattgatgagggtcttaaaaaaaaaaaaaaacaaaaaaaaaaaaaaaaaaaaaaaaa

SEQ ID NO: 2024 - DNA, 1957 bp, Homo sapiens
ggcacgagtcgcatttccagacacagcagaaggatgcacttctggttgattctccttgctgttgtcatgaccaggagaattctggtccacatccattcttaattggttgattacatttgatccggaggccatgaaattggccagttgattataccctttcagaatggttctctttgggaactgcagtctggtgttacactggatggggagtttccttgtggtttttactccttctacagaaatgcacttctttctcccaaagcaagtctccttcccattgtccctcataactcttctttggccttctctcatattgcagaagatttccaggttataacctggaaatttcattacttaggaacagggccctcatggggactaagaatcatcttctgctgtgggcccttcagagcaggttcctgcattccaccctcagctgatccatagcactaagaagacagggggctccctgacatgagctttcaggatgaggtaaggggagggtctgcagcatcccaatcatttcatgcagcagctgcttgggcccaagctagctgtggaacagcaaggatggctctgtttgaagggctgatgaggaaggtctagcctcccatgtgaaagctcaagtcaccaggtggcctctcttgggactgatgttctttgagcatataccatttttctagcgtataatgttcttggttacaatttatattgactcagctgcaggcactctgctgacacagctgtgttgtcatctgaagattgttaattcctcatataaatgtaatgatacacacatatagctttggtctgggtctgggtggaaaaaaagtgagcaagtgccccctctctaaaattacacaggagccataaacccgcggtaggaggctattactaaatctagacatctcgtactagttaatgctttgctagctaggccttaaatcatgccactcatattattctctcacttacaccccttctacaaattcactatccttcaccccgcccctgaccacttttcccttctagggcacactccagaaatgcagccacagcaatatttcttatgtatattacactgcaactttgatatttgcttaataaaatttggcaacacatggtccgaagtgcttagttttcttggggcactttctaagtgatttgtacctctgatttgattattcagtccacaaaaaatctgctctttagacctgtctagagcatttgcattcagtctcttttgtctctggggaaacaagtgagccttaggccacagaagatgctctaatttgcccatccctttatgataacaagaattagccagccaaagactggaataaagcaatcctacttatttcttattttaccatgaggataaaatgatcacatgcaaaaaaaaaaaaattagcaaggtatacactgcaaacaagtttcggggagacagagaggggtagaagattgtggtttcatttgcgaaattattatgctcatattttccagtttggttaatccacacttaccttactttccctgttcatgttcacattagtggggttattttctcaggatgcaagttatagatagtccatgcaagtgttttcttaggtaacctttggatctaagtagcatgaggtcatgattgctcaattcacatatgaagataataggagtgagaaaatggcccagaattaagggcagttaaacaaaaagttaattgtgaagaggataagcttatgcagcccctttcctgaactttcctaaatccgttttattatagtgcccttttattataaagagaaaacttctctgtaggctttcaaagatcagagctcttcagtcccggctatactaaccattatttaaccttaataattagaagtctttctctccatgcacttccttccactggggactttatgtcaacccctgcccccaataaaaaaaaaaaaaaaaa

SEQ ID NO: 2025 - DNA, 1870 bp, Homo sapiens
gggagcctcaggcacttgaaactcacctcgctgtcccttttctttgccacttatttatttatttattttacaaatgaaatttaaaaaacccaaggccaaagtgggaaatgacttgctcaaggtcatccatattcctaaccctccttttactggggcatagggcaatattttccaatatgcctgaaaagcttaggtctctaatcacagataacttacagcttttcacaagcaagagttttggccaaattatgccagttaaggaatgtaaattttataaatgatgaaatactgcaaccaattagtgcaaacaaacatttattgtgaaatattcatcctaccctttattaggtattacatcatcaaagcactttgtggcaatgaaaatagctttttttacccctctaattcacccaatattccattaaagctgcaaaaaatgtgcaatctgcttgaaaaataggttgctcttatttactcatttgtgaaaagtcaaaaattaaaaaagaaaatgatactagcatacagggcctctagagccaattcacctttccatttcccaactactccccaaaataattaacaaagataatttgttttaaatgcctttttataaaaccaatgcacctttccccatattataatcatacaaattttaaaaagccgttatttactttcttggaaaaaaggtggccagccgttgttttttgattgggagcatgtgtatttcctgggagttcactttctttaactttatgctccggtttttgatgggtttcctaaggggctctgcatttcccatggactcttccccttggctgttgatgtcatagccctgaagcacggagtcttctcttttgaaggagaagtttttggtggacacccctgagaggcctttgatcttgccacagaatatggtaggcacagcatcttcgacagagacaatgaccttggccgcctgggactcgcccaccatctcaatgttattttcagccttgacttcgccgctggggtggttgggctggctgagcatctcggtamgcatcactgctgctgatgtgactatccatcatggctggggcctcatgggacgtggcaggggcaaaagaaatttccatgccactgggaagtttctccatcactgtgtgacctgagctgtccactgatgcaccactgtcatacagtgtctcagggggaggctcggatttccggtgggctgccactgacaggtctagggctgcatcttcctggaagattgggggactgacttcaccagccttgagccagggcactgacttcatggagagatccagggcctcgttctcacttcccatcttaatgaccgtgtggcggctgagctggaagtactccttaggctggaggatgtcaaagggcttcagttcatctttttccagaggggtctgggtgcctttaaaggggtgcaggccgaaggaagatggtggcttggggaaactggagctgaacttggattcagaactctgaggcaccgggatggggatgggaatagggactggcacaggcaaggggacgattacaggatacggcaccaagagggtggctggtgggaccaggggggacaagggggagctaaaaggctgtgggggcacagggkcatagccaggaggaggctgacagggtgggggcccgagagtgcccctgggagggaaacaaattctggagcacagcttcaaatggcaaagtgggctctgcggctggctggggatcctcaggtccaggagctggggctgggcctcggggtcctccgctccctggaagaggttgttgtggatggtactggagcggacgcgtgggcggacgcgtgggcggacgcgtgggcggacgcgtgggtcga

SEQ ID NO: 2026 - DNA, 1157 bp, Homo sapiens
ggcacgagctttgatattccttctttcttattcatttccatgtcactgcctgacttcaagcttttatgaagcttgaagttatatatcaaattgtaactgatctcctaattctcattttgtgtgtgcattccccaaatcattcttgacatatctgtgcaaatctcagcatgtcactttcccagtagtaggtatccatcagctccctgttaatctccatgaccagagattctgtccacctctccagcctcatcttgtgagcttctttccaatcacctcatcctttgcctccttagcttttgcctcggctggcctgataaacctctacctgcctgccaagtttcagttcaagccttagctctctgtcaagctcccgcagtccctcacccggactcacatgctccttgcacctgcagtgggtcagctgctttacatatattggactctttacttctcacgtagctttttaaggtgggtgggctttgtctccactttgcaggtgagaaaagtgaagctcagagagcttaagtaatttgctgacagtcacacagtaagaaaatcaagtggcaaactgaaatacaaagaacctgagctcactcctcaacatgttgctccttggctttagctttgcccacacctgcttttattttgttacgacgtttgtcacatttactgtgtttgcaattctccatttctgctacactcgttgaaagcatcagccccacctttcatctttatgtctccaaagacctgcacagtgtctggctcatgagaggtagttaagaaatatttattaaggtgatgaatgaaccaagcaatatacaaccaatatacatattcttttctttgtggtggtgtggagaagaaagggagaagtaataagttccactttctggagtggaagggttctagtgggacaatagaagattgtatgacctccagaaccatcttaagagtgattttaggattagctactaagggccaggcacaatggcacacacctatagtcccagctagttagaggctgaggcaggagcattgcttgaacccagaagttaaaggttgtagtacactgtgattgcatctatgaatagccactgcactccacctgggcaacatagcaagaacctgtctctcaaaaaaaaaaaaaaaaaaaaaaa

SEQ ID NO: 2027 - DNA, 1084 bp, Homo sapiens
ggtttcatcagtatgattatactcctaggtgaaaaaaaagatggagacaagggaaaaaatgaagttaacgaataaaacaaatgttatttcagatcacggccctgtgtgtgttactaaggaaagatataaggatttataacatatatttgttttccatttatttttatgaaggaattaaagaaattatcagaaaatactaaaagggaacaaagcattttaaaaacattccaacaatggcatgctgctttttatacagtatgcagtgaagttccttgcatttcaaaggcaagggtagctaaatctgcctcagccccttagcgttctgtactacccttatcttgccatttacaacatgaaagtataataatctatttacatgctggtatataccactatgagtttctgacaaacatggcacatcttggtggtagttcatttattctacaaatacttattcaatgtctactatgtgccaggcacacttttggacattttggatacatcaggtaagaatataaatacctctgccccatgaaccttacattctacctatattgcaaagttcctagcacatcgtagatttcttctcatggtcataagatgtctgcaccaattctaagcatcacatcttcatagaaaagcatccaaaacaggarggaaaaattagaagcaaaagggctttctccttttgggcctttcttttcataggaaagaaaatctttcccagaaccctcaaacatgtgatctggaccaaacactggctggcaaagagtggaatttcttaagtctgagcaacaagaagaaaaccgttaccataactaccaactcacctgcatctgtgccatgtgcttgcctgcccacctataactaaggatgagctgtttgtagtcttaggtcaactcctccacttgtgccttggatcctgccgcacgcccccatcacctacttgcggacattactccaacagttcttttctttctgtcctgtattatcaaatttctgttcttactggattttcatgctctttcatcattatgaaagcatgcagtaatttcttcattaaaaaaaaaaaaaaaaaactcga

SEQ ID NO: 2028 - DNA, 175 bp, Homo sapiens
aattatggttaccccctacacagatgtgaactcatggaggaactgaaatccttcctacaaagctacacagtgactgtgacaatggtgatgcacaccaggctactgttcagaatgagtttatggccagtaaactgtggtcaggaaacttactgcaaaaaaaaaaaaaaaaaaaaaa

SEQ ID NO: 2029 - DNA, 2845 bp, Homo sapiens
  SITE (727): n equals a,t,g, or c
gaattcggcacgagcctaaatgtattgattacttgtccccttcctcctttgtgacaactcagatgtattatatccacatactacttactcctctgaattcctccagggtagttatgcttttgcaagatgtggtaagtctatattgacaaagaaactcccagttatctatcaatttgttcctgaatgaatactgatgaggacattgttgatgatatcctaacgtatcttttgtatggggaagacctttgtctcagttgggammgcaatgaggcttctcctaatttggcaagcctttttatgccctaaactcaccaagtcttcccaatctttcctctttctagcttatcctatttctctttaactttctttatacgtatttttatttgtttttagtatgttgtgttttatgtagctttatgaactgtactttttcttctcctcctctttttttcttcatcttttaatagaggaatgtcaattaaaaaaaatctttttcaggggaagatagaaagagtaggatatattagtgtgtttgtttcctagagctgctataacgaagtactacaaaccgaatggcttagaacaacagaacttgattgtattccagttctaaaggctggaagtccaaaatcaaggtgttggtaaaaccatgctccctaaatatattggggaggatctgttccaggtctctcactttctgtcttcttcttctctttgcctctcatancttcaggtgttccttgacttgtaaatgtctgtcttcttccttcctttgtgtctcttcacatcatctttcctctccatctccctgttcagattttccttgtataaagamctcagtcatgttgaattagagcccaccctaatgacataattctatgattacctctgttaaaaccctatttgcaaataacgtstmttctgagacactgagggtttaggaattcaaaatatatkttttgaggggcagacatttcmacccacaacaagcagacacaatgaaaaaattaaagcaaactggattttaaaagatagagatgagatcttctaggcccttcaaagagaacttcagtgagacaactagttgaagacagtgtttaggctgtttttctatcatgcaaagaattccttctttgtatttatattttgctgctccatttctctttgacttttcctttcctttctttttcttctctcttctattttttaagagggaatataccctcttggtaaaaaattcaaaaggtctacaaatttaaatttacatattttacamagtaatgcaatatttattcattttataaatataaaaaaattaatatgtaatcattttagaaaagttttaaaaagcaccgttaaaaaagcacaacaaaaacaataaacttatgcaaaatttcaaacctaacagatcatctctgacaattttaggatttatatttttgttttatatatacaatatagttggatattttatacaattgatattatttcatatacccattttctagtccttttagcactaacaagcatactatgaatattttctcctgtcactaaatatccttcacagcatgagtttttgcagtgttctatgaaataaaataccataaaattttcaaagtcttttgtggtatatttagattgccttcaattttacagtaccatacaaataattctgtgatgaacatatttgtaagtaaatctttatttaactccttgactactttttaattttcttctagaaatgaaactgctatattaaagtgtaaatacattaaaatactctggataaatgtcaaataaattatagccaaacatccatcatggccactaaaaaagtctcaataaactatttattaaatgtctagttttatcacatgtgactttcctagtttgccatctgagacaacctaattaaaaattactcccttacgtattatagctacataagataattagctacaaaatacctatgtctacaaaaatgcttgttttacttcagaaaagtttagacaatatttttttcccacatagtaatctagtgcatgaaaataaaatgtccaaaaaatttatatcagagtttaaatgagtatggtggtttctaaaacagatgcaaatccttttaactttcctcccattgaaaagtgcagtctatctttcctttccttctccctggtagacttgtgaccaattccaccaataaaggatggtggaactgacactgcaacttctaaggtgacactatgcaaaggccacttggtttgcagcttccaccttgctttagtggaatacttggttgtcatgggggaagtgttccttgagccaccatgttggagaggggacctatagacacttggacctatagtcccagctgagctcagccttgcagccacatccactgaggtgtcaaatattaggttggtgaaaacataattgtggtttttgcatttttgaaatttgccatttgatattggaatacattcttaaacaaaagtggttatgttatacatcatgttaatgtacatttatgttttttgacactgaattattactgttaattttgtatttattttagactatagaaatagtgtgagacgaaaagcaaatttgagcgattttcttattcgaattcaaaatgggtcataaagtggcagagacaactcgtaacatcaacaatgcatttggcccaggaactrctaacgaacgtacagtacagtggcggttcaagaagtttcacaaaggagatgagagccttgaagataaggagcacggcagccggccattggaagttgataataatcagttgagaccactcatcgaagctaatctacttacaactactcga

SEQ ID NO: 2030 - DNA, 2576 bp, Homo sapiens
agctttcctgtaccttctctgcaggtagatgggacaaatgagtgtccggatcagcgggagtgggaaattgaaatactacaaagatctgtttaatcctgataccaactaatctccctttcaagggagagtctgggaagctgtacagctcatttatttttaaactttttctgtttacagagatctgttggtaatctgaggatttttattctacgtcgtcttgacagatggaaaacctgaagtaacttcgggctaaccttgtgtttttggaaaattagtagacttggtggtgaagaaactgggaggagtaggatattagctaactttgcatagccacatatagagcgtcgcagctgcattccaccaaagaggaaccaaaaggcctgtggtgttcccagggtacatattcatgccagaagtgaagtgcttggtgaattcgtttcctgaaagtttatcgcatacttgtactgggttaggtttttagaacttcagccataaaaatgggcagaattttccttgatcatatcggtggtacccgtctgttttcttgtgcaaactgtgatacgatcctgaccaaccgctcagaactcatctccactcgtttcacaggcgccactggcagagcatttctttttaacaaggtagttaacctgcagtacagygaagttcaagatcgggtcatgctcactggccgccacatggttcgagatgtgagctgcaaaaactgcaatagcaaactgggatggatctatgagtttgccactgaagacagccagcgatataaggaaggccgcgtgatcctggaacgtgctctagttcgagagagtgagggctttgaggagcatgtaccatctgataactcttgaagatacagagagaaatccatcttttcccaggtctccttcactgaaaacaaaaatctacttacatacactgtcaccttagcatcagagtcggattaatgaactgcggaacaagaggttgtgagaatctaagatggaacctttctttctttctttctttttttttaaattttgtattttccatccaacagcagtgtgtagagagaatattatgcagatgccgttaattttttaccctatgtttacatcttgaggcagcagagtctgtctgcagctatgtggtgagctatgtaaggaaaaaaatctgggctgttagagtgaaaaagtgtgttttatgtcaattgtgaaaggaaaatgttaggagtatggtttttaaacttgggcttcattttaaacttttttttttaaacccagttatttcacttgatttgctagcttcagagaagagatccgaatctgtgcccagcgctaaaggctcagtgttagcatggcttgtgctggccggtgtgccatattcttgttggagatgaaccgtagcaccagagcccattcttccttgtcagtcttggcccaaagatgtcaccattcctagttatttgtcaccacataattggtgttgattggaaactttttctgagatgggacagaactgctgggttgtctttttccatgtaacttaagcatagtaatataaataaagtaatagttggatgcttttggtcctgtgttgcttttaaaaacaccttataaaagaggagagtatttgataagcaattttcatagtagtaaagttttttttcatctcttaaactaaattgaccatgcatataatattctttgtttaaatgaaagcatactgttgaaacccgcagtgttgcatttagaaaacagttgaacagaatgtcaatgtgcattcatgcaaaaaaacatttaatctgcatctgttttagaaaagggggaaatgaagcaacttgtctaaaaatactgctttacaaagcatttcagcctttccccctcagttttgcattgattttttgacaagtctgtagagcctaatagtttccatcaaaggcctagatctcttatttagcatttttttcagctcttctctcagaagttcagctgttgaaacgaaaactgtactttgtaccctcacatacaaagggatcaaatttgacctggtgttattttagccccaaatttatgacattacacaatattaaaatgtaaatgtttctttacccaaactacttctagatattctagtatttgcttctggtggaattaaatgacggtaaaattggctaattatttgaatgaatgaatggatggatgttttgcatgctcaatttctaggtcctttgtctagaaaggaaatttgcctcagttgaattagtgaaatatttctgtcgttgatattaaaagtgacttctgagtacagttaagttcctcctatttgccactgggctgttggttagaagcataggtaactgattaagtaggtatgatactgcatttgaaataagtggacacaaactatcctttctccaccatggactcaatctgagaacaacagcattcatttccattcatttccatactggcttttgattatatgcagattcctagtagcatgccttacctacarcactatgtgcatttgctgtcacaataaagtatattttgtcttgcaaaaaaaaaaaaaaaaaactcgag

SEQ ID NO: 2031 - DNA, 466 bp, Homo sapiens
  SITE (449): n equals a,t,g, or c
  SITE (454): n equals a,t,g, or c
  SITE (455): n equals a,t,g, or c
  SITE (461): n equals a,t,g, or c
tccccactgtgcctatggctcatctagcctgcttccctcatttttktgacctgcctggttcccatggggaactgagtttgcaatccggggagcaatactggctgaattcatgttcatattgagagcattctgagtagctggcagggccacacagaccttagcgggaagacagggacaccactttccaggatgatccctgtgaaaactgccatgtttgcactgccctcctctgtgagacatggcttagctcaagtccttgctctggtaactttccaacatgtgactttgggcacatgtgaccttcacctctctgggtttgtttcctcactsttacgctgcaggcaatgcacatacaatatttgctactttagggctatgagatgcactagttagttgtgtccaagtcattccttttaccaacagaaatgaagagaaagaggagaaaaaanaaaannaaaaantcgag

SEQ ID NO: 2032 - DNA, 1136 bp, Homo sapiens
ggcacgagcaggatagtcctcagcaagattccgtgtcattgtgttcacaagcacactagaattgtaacaagtctcagatttgggttaaggagagatgataactgtgtctgtaggatttgcccttcctctgtcttcacaccccattcactctgagacaaaggaggtacttccagggctgctggaccagcagggatgggacctcgcctctgccctgtcttggggtcagcctgcccagcgagtaccctctgctggctccttctggcatcttactgggtcctgccgtgcagggacaagcacacgggccctgaaaagctgggtcgacatgagcaggtagcagggccttcctggacctcctttgtttcagatcccaccatcattcagggcccaatttaaaggcttctcttccgtaaagtctcccatcactccaaccatggaatccctccctcctgtcactcttctttttttttctttaacaaatacagttttatttatttacttatttatttcacaaactcttatgtagctcttcctatctctgggcactgttttaagtgacaagtattaactcatttaaactgtcacaacaggccaggcactgacgcatgcctataatcccagcactttgggaggcagaggtggccagatcaccagaggtcaggacttcgagaccaccctggtcccaggagacctcaacttctccagagttctagcctcttcttaaagggccagagtcatgggaacccagatggggtgagggggtctcctgccacggcctccttacaatgatatgacttggcataaatttggatactacctccaaatacagatttatggtctggcgtgatagctcattcctgtaatcccaacgctttgggaggccgagggaggcagattacctgaggtcaggagttcgagagcagcctggcaacacggtgaaacactgtctctactaaaaatacaaaattagccggatgtggtggcaggtacctgtaatcccagctacacgggaggctgaagcaggagaattccttgaacctgggaggtggaggttgcagtgagttaagatcgcgccaaagcactccagcctgggcaacagagtgagactccacctcaaaaaaaaaaaaaaaaaactcgag

SEQ ID NO: 2033 - DNA, 1500 bp, Homo sapiens
  SITE (382): n equals a,t,g, or c
  SITE (388): n equals a,t,g, or c
gtattaaaactacccccgccccccatagagcataaacacaatatttccttcttgggttgtctcatcgtacttagaaaagatccaaagtccttcccatggcttggaaggccttttatgatttggtccctggccaccttactgtcctcacttctcttaaacatgtcaagagcattcccttctcagtgggcttttgtgcttaccatttcctctgcctggatgttcctcctctaaacacctaattggcttaattacttatctcactccaaatgttctttagaaaggccattcttagatcatcctatttaaaatagtagtccctagccaggcccagtggtgctcacctatagttccagctactcaagaggctcaggtaggaggattnctttgnccaggmgttyaaaacyagccttgtcaacatagtgagacccccatttctttaaaaaaaaaaaaagtctctgcttcttcatttcctcttttaatatcgttaccttgctttatattttctggatgttgatcactatctggaattataaatttattttttagttattatttgtctcctccctctagaatgtaagcttcatgagtscaaggacttggttttgktcttgctgtatccgtaaagcctagaccagtgcctgacatatggcaggcacttaataaatatttgaataccaaagttaatgttatagtagtgaaggagaaattatttcaaccaaaagtatttcagtaagccatgtatcccacattatgcaagaattgggagagaaatggaaaagtacagcttacagtctgtgttcttaatcagttgtcagaatgagtgccatagatagtatatgttgaagcaattgaaagaaaagaaaatatctgtgggcttgtgggagcttcatgaaaaagatagaaattgagcaagacatagaagtagaaattaagcaaggtactacttggatttagttgatgtacaagagaggaaaggtttctgtttacacttcatctttgactggtcatgtagtttaaagcttcatgagttaatataagtatcagaataggaagtggccaatttctgtgtgaaatatgaaaatcttgcttagaaaggtcttcttgtgatgtctatgtatgtataattcataaatacacagatcattccattgtgtgaagagaaagaaatagttatggaataacctaaattatgtcagattaaaattctaatgaaagccaggtgtgctggcttatgcctgtaatccttgcactttgggaggccagtgcaagcaaattgattgagcccaggagtcaaaaacgagcctcagcaaggtggaaaaaccctgtctctacaaaaaatacaaaacttagcagggaatggtggcatgcacctgtagtcgcagctacttggggaactgaggagggaggatcgcctgagcctgcagtgagcctagatcgcagtccagcctgattgacaaagtgagactttgtctccaaaaaaaaaaaaaaaaaaaactcgag

SEQ ID NO: 2034 - DNA, 2384 bp, Homo sapiens
gatgaatatgttctttcaacaaaaaacactcaaatggtttcaagcaatataatcactcccatctcccttgatgatgtcccaccacggatagctcgggccatggaaaatgaggaatactgggactttgatatttttgaactggaggctgccacccacaataggcctttgatttatcttggtctcaaaatgtttgctcgctttggaatctgtgaattcttacactgctccgagtcaacgctaagatcatggttacaaattatcgaagccaattatcattcctccaatccctaccacaattctacacattctgctgatgtgcttcatgccactgcctattttctctccaaggagaggataaaggaaactttagatccaattgatgaggtcgctgcactcatcgcagccaccattcatgatgtggatcaccctgggagaaccaactccttcctgtgtaatgctggaagtgagctggccattttgtacaatgacactgctgtgctggagagccaccatgcggccttggccttccagctgaccactggagatgataaatgcaatatatttaaaaacatggagaggaatgattatcggacactgcgccaggggattatcgacatggtcttagccacagaaatgacaaagcactttgagcatgtcaacaaatttgtcaacagcatcaacaaacccttggcaacactagaagaaaatggggaaactgataaaaatcaggaagtgataaacactatgcttaggactccagagaaccggaccctaatcaaacgaatgctgattaaatgtgctgatgtgtccaatccctgccgacccctgcagtactgcatcgagtgggctgcacgcatttcggaagaatatttttctcagactgatgaagagaagcagcagggcttacctgtggtgatgccagtgtttgacagaaatacctgcagcatccccaaatcccaaatctctttcattgattacttcatcacagacatgtttgatgcttgggatgcctttgtagacctgcctgatttaatgcagcatcttgacaacaactttaaatactggaaaggactggacgaaatgaagctgcggaacctccgaccacctcctgaatagtgggagacaccacccagagccctgaagctttgttccttcggtcatttggaattcctgagggcagccagagctccttggtcctttcagtactaggcagaacagcccccgatctgcatagcctgtgaaagcccacggggacatcagtaaccttctgcagccaccatccaatgccattactgtcaagtgagacttggccactgtagcctgggcctgctgcaggagctcttcagaaaggcacatgaggaccacggtttgcctcagtttctggtaaaacacaaggtctggagtgcccctgcaaagggtattgatggacttcctgccagtgacagagcatgtctattgcaaacaattctctcagttacgttcagcacttaagaacggctaatggcaataggatctttagcaactttttcacatcatagaaggtgcaatcgctcacttgggaacactactgagagtgacttctcttttaaaattgagtagcagatgaaaaattaaaatttgaacttgattattaatatcaattaaaatgttttatttattttattaaaagctcaatattttctatgaattcaaaaatacttcagagccaaagccaacttcaaataccgtgaccaaatttacatgattcatattcattatgcattacttggtatacagacttattttcataatgcaaattaataaaatgacacttttactgcactatagaaatattcatgtatgttaaacttttctgattgaggctaactggaaaaagctggggtcgtattctaagtgctaaagaaggctgcttctactgtatagaacccagggctctgaaacagctctagccgcctaatgcacttcacaggtaactccccaaggtaaaactagactctcttgttggttcgcaaagaaaagttaggacttaacacttttttctaaaattttataattcaatttccaaaagtctactctattttatactgtttctacaaaatattccttataaaaacaaagaacaaaaattgaatatttaatgaattgacattttataaccaacctgtttttatctacggtgggaatctttgatgccagaaatttataaagaggttctgtatcttcacaccttgaataagcataataccataaaaaatgacacttgacatgtcaatgtatttgtcatttcattttaaactcgtatttgtggtttttttcccagataaaaatgaaattaaaccatttctttttaagaaaaaaaaaaaaaaaaaaaaaaaaaaaaaaaa

SEQ ID NO: 2035 - DNA, 947 bp, Homo sapiens
ggaaaatacaaaaaaaaaaggaaaaaataaatagaaaatcttcaaagaggcaatctgtttaaatcttcaagaactggaaacagtaaaagtgaacaggtttttattgagcatgtcaataaaatgtttgcataagactttacaagtgctttatttcatgaggtttttattattgatcaaagcaacgaaaatgaacgggaaattcattctcatcaaatctacaacttgggaggaggtccgatgaaatccctggaagctcacattttttataaatgaagagttaattaccggtgggaacaatgagaacctctgtggttcttcctgatgcttggatcctcccagacctctgtttccagtctccttctccacaacctggcctatgcgatgcaagtggtctaactgatctccgcctagggaaggatccttcggcaacttgccgacaagagaagcagcgatgcccgaggcaggtccaaaggagcactgactgcgtgggattgattacactggaggaacaaaaggtcctgtggctacacaagtttgaaaagcagaaggtacaatcattgtatttctggcagacttttcaaagactttaatatatgaatccctcatatgaatctcctggaggattatataataggcagatctcccagccattttcactgaacagttcttagaattggtatccttgaaaaatttcacctaaccactcaatatggtagccactagtcctgggtggctattgagcacctgaaatttgcctagtctgaattaagacacattctaagaataaagcacactgtatttcaaaggcagtacaaaaataaaaaagaatgtaagctgtctcaataataatttttgtattgaatacgtgttgaaatgatgttatttttgatatattgagtgaaataaattgtattgctaaaatgaaaaaaaaaaaaaaaaaactcgag

SEQ ID NO: 2036 - DNA, 2187 bp, Homo sapiens
  SITE (49): n equals a,t,g, or c
taaaagataaaatccattcctcctcccagtgagcaagcatggcttcatnttctcaaaaatgagaacttccatggcagccaagaaaacgtcttctcagaggaactttcgtttgatgcatctcccaagcccacatgcctcctgtgttccagccacctcttccatttcacatttaaaccagctctccattcccattgagttgccctaacaacattgtctccagtgtcagaaccatattaaggttcgtttctcagattgggagcctgcaacaccatacagccaacattgcctttgccacgccactgccaccatccccaccattgccctatggtgggcagatggaattccagaaaccctcagggagccaggataattaggcaacccatctgaattggccacgtaatracaggcacttatctctcgggttcttgcttttgcagactccagggaagtcctgtctagaggtcgatggcagagactcctagtctttcccatgaggggttgataggaatcaaattgggattcctttggctttgggttttgtttttttgttgttgtttttggttttcagtttgttttttggtgtatggggggtgattttgtttctgaataagaaaaagaagaggcaaccatggcccttatgtgggtttatcctttttgagcaatgttttagccacaagtaaggaatcttgaaagtcttttgtccagcaagcagtcttaaaaatgtttttcctaactccttttgcaggtgactaagtacaaaaaaatagttttctcattgtattcaaaatagtgagtaggttccctggataatacacagtggtagttgacatatttyctcaaaacacaaccagaaaacccacttccggtwyttgtaaatcacctttcaagggaaaaagtgaacacgtattccttgtatttctagtttgattaccaaacctgatgttacaaagaaacctccgttctgtagacagaatttcttttatttttcttcttttactcctcacaatcactttcccagtgccatcaccatctataaggtctcagagcagaggattattcatggtaataagtgggggtgtggtgcagccattccagtaacacccacaagaggacagctgttctgaatgtccccacccacccctctttcagtacaggtgagacattttcagttcatgagctccagaccaaatcccaggccagcccttgcaccaaaagccttttttagaaggcttatcagtctattaggaatgtctcaggaaagatgagccatttctttggggagaaatatatttacagatggaagtgtgtgactgcgtgtctgtgtgtgtgtgtggtgtgtgtgcgcacgtgagtgcgtgtgttcatctatgtgcatttcacttccataaagacccagcccaagctgctgggaaccatgtgttcctgagtattctcagaggttaaacaagtgacaagtgagcttctgaaattagtgtctcagcaagctggctttaggaatgagccccattttatcaagcagagaaaaaaaataacagcagaaaagataaagataaaccaaaaatatataccccccaatggaaaataatgttgattcagcaattcccataggatgtattacatgctctaatttattatattattatttatctgtctttgatctttgcccattgtactcttaaaaagatgttgggatgttgattgcgatttttaaacaactagataatgtataaatcagcagtggaaatcagttttaatgtgtggatgtgtctgattattgttaaatgcctctttttttacttttttttttttagatgtataatgtttcataaaccctggcactggtcacaaagctcagctgtgaaaatgaaatttgtagtatttttaaacatgaatgtcaatttcaagtgtatttgaaatggttcctccaggagagatatttgtgcaccattaggaaaatcttctctgcagaggaagtagccttctttggagaaaatggaaaatgggttctgatatgtgatctcagagtagcccatttcctagggcaccatggaaaacacaaatgtgatctttaagtatacctcttccccagtttggggaggaaaggactcagtttgcaccctttttgtatgtaaaataaaatgtcttacctttcttggctaaaaaaaaaaaaaaaaaaaaaaactcgag

SEQ ID NO: 2037 - DNA, 937 bp, Homo sapiens
ggcacgagagagagtacagtagaagaaaagtaagatgggaaggcattggcctactcacctgctttccagtttgggctagaagcagtctcaggtatgagaaaagaacatgaaagggctacagaaaagaactgagaaggaacagtgtgcaggtgagaattcagttttgactctccacgtcagcacgagtttggccaatgatgaaatggcgtaatgagtgaaaatcccttactggcaaaatcaccagaaagtaaattctgtttttaggggtgctgttgtgctgcttagttccgtgtaatcaggctactctcttgggacagccattgtaaacactgccttcctgataaggatatagcaagttgtatagagtcaaagccaatttgtttaacagagccattcagaagaccctgtccatttttttgttcttttaatgaagaaagtaacgttttgaatgtagtgtttatgtatagtgactatattggaatataatgtgtaatgctttcaataaacccagaaacttttccaaaatattgtcttggttcataggatgtgatatggaaggatagacaccgtcttaatattttcccccaacagaatgtcaattcttagagtaggggtggggcaggaaagtgggctataaaatcactggctataaaatcaacttttcccctttgaatctcagaattcagtgtcttctagggcagatctctactcatcatctctacctgatatgaccgcacacgtgagtgcctggcacctgctctttctcttgctctgatgaccacttcctttctgcccatctgttttgacctcgcaccattctggagcttttaggaaaggcatttgtaacaaaggcaggacccaggtctcctggttttcatctccgtattgttttcactatattataaaaccttctttacttaaaaaaaaaaaaaaaaaa

SEQ ID NO: 2038 - DNA, 419 bp, Homo sapiens
aattcggcacgaggtcactgccgctgcgccggcggcactgggtggccctgcgccaggtggacggtgtctactacaacctggactccaagctgcgggcgcccgaggccctgggggatgaggacggagtcagggccttcctggcggctgcgctggcccagggcctgtgcgaggtgctgctggtagtgaccaaggaggtggaggagaagggcagctggctgcggacagactgaccatggctgaccatcggcgcccacagcgcagtccctgcacatccccctccggctgcgcacactgcatgcctgggaaaggccagcacttcatggaccctggggaggccccaccccctccccacacccctgctccccactgccgctgctgcctcaataaatctgctgatttgcaaaaaaaaaaaaaaaaaa

SEQ ID NO: 2039 - DNA, 4049 bp, Homo sapiens
cgaacagacagacttgaggtatgtcgagagtaccaacgtggcaattgcaaccgaggagaaaatgattgtcggtttgctcatcctgctgacagcacaatgattgacaccaatgacaacacagtcactgtgtgtatggattacatcaaagggagatgctctcgggaaaagtgcaaatactttcatccccctgcacatttgcaagccaagatcaaggctgcccaataccaggtcaaccaggctgcagctgcacaggctgcagccaccgcagctgccatgggaattcctcaagctgtacttcccccattaccaaagaggcctgctcttgaaaaaaccaacggtgccaccgcagtctttaacactggtattttccaataccaacaggctctagccaacatgcagttacaacagcatacagcatttctcccaccaggctcaatattgtgcatgacacccgctacaagtgttgttcccatggtgcacggtgctacgccagccactgtgtccgcagcaacaacatctgccacaagtgttcccttcgctgcaacagccacagccaaccagatacccataatatctgccgaacatctgactagccacaagtatgttacccagatgtagaattttcatcactaaacaatcatgctaaagaggaaaggacagtgtgcttggttagagtaaaggacgaggtcattagccatattgtatatatcgtcaagcaacacacacaaaagttcctcagccacaagacatccacatattgcatgttaaccagaagaaaagacaacattttccggaaatccactgcacactgttgcctatacactttgtacatttaattgatatttgtgctgaggtgatattcctgtctaaaagaacaacattgtctttcttttctagcacagagttatgcattcaaagatgcatacctagttagtttccyatatattcatgccatcttgaaaagacagactatggtgtaaccatgattctattatgtattggtacgtctgtagaccaagatataattttttaaaaataagtttatttctttcaaggtttacaaataacaaaggtgcaccttgtatttaaaattgccattatagatgagagcgtgcatgcacagtcatttttgtttaagagtaatatttttaatgtaatagattgtaagacgtggtgagggagggatctgacagagatgaatgtgccaagcaaaaccacaactgtgtatattttaaagcacatcatggctttaagtaccatgttgttaaggattctcatgaagtgccatagactgtacatcaaattagagtattatttcttcagtgttattgttttcagagccacattttgttgcatatttgctagtactaatcagtcaaagggcaccattctttttttttttttttgaaaccaaagctgtctcagaaatggccaatttaactttacagtaacaatagacagcacaacacaaactctctcaatacagataaactcacacatactggagatatatatataatagatatatataaaattattttaatgcattgtagtgtaatatttatgcatactatactgtataacatgttattcaaaagggattgccatttctgagacacagtaacaaaaaaatgaggaaattattttgcttctatttatagcctctgtcaaaagtcaaaagactataaatgctttgcaaaaatggtttcacgtttgcttaaatgcttcatcacagtcacattcaaaatagtgactctaaacaaagaagaaagcagcactgtcatcagatgcatgataaaccaaaatatgaaaatgggaaatgtttaattaacctagtaattgggtgggttaagtacatgggtgaattttatatgtgatttttgttttgttttgttttgttcagattaactgcttatagccttagaaagccttttacaaaattaaaaaaaaaatagatgtgcattcagtttttaagaatggaatcatccaaaggaattcctttttttgaggtttggatgttgcagctagtaaaggatatttttgctctgttcagcagttctaaaaattgctgaagtaggggccaggtcactggtagttatagtatggaatgggagaagtgaaagttcagttatagaactttccatacttccaagtttactgcaagtttttatgcttgagagagatgctttctaatataagactgatgtgttgattttactgattgtactgtacatctattaaagccttagattattacattacgggttggaacccataccaatgtaatttcaatcgtgttaagaaagtaatggtgacttcacatgttattgtagttagttacattatagaatattacttatttttcttgttaaaatgtagtttttcatttcctacatttattagattttcattttctattaacaattgaataccatttcagtttatagacttgttttattagattttaccaatgaatttttcaaaatacaaaaaaaagtagtttttccttcataacatactcagttttgaattacatgtagtgtcacatgaatattcgtattgttaactaaatgatttatattttactgatttaatattacagtgtaagaatgtcagtcattgttagttcttgtctagttttcattaaaagaacaaagatcttttatatggatatcttataaatatataatcattgctaagtaagaagttaagttgttgctatcgcaacaatcctggcagacaattgagtaatattttgatgatttattttgtttgtaattagttattataagaagatctagatcctagatattagaataaaatttattttctactgtatccatttcaaatgttaaaatattgtttaatatttttgaaatccctgagtatcaggccttgttataaataagctgcataatcaataaatagaacaagggactttttgttgataatccaaatactcaaagtttacgtaatgaaaattatagcgtgtgtgcaaactcttgagggttgattatgctgcaatttagcatgttggaacgtctagggagaaggttgactttttgcacttctgtatatagtcaaaagagagaaacctgtataatagtaagatcttattttgaataaaaacgtctataattacaaggagttttgttaaggctaatacaatgacagactgagcaaaattgcttgcaaaagtggcacagagttagcactccataccccttcaaacatgttgctttgctttcttgtggacagcttgtagtttgccaggattttttcagctggaaagatacgccatcctttcaaaccctcatgactgacaaaaactccatggggccaaatctgcctgaagatcattaccaaaaatagcaggtacttctaccattaaggtgaaatcatggatcagatattccttacatttttcaaaactactgcatgtttaaaacttcaacaaaaaaagagagaaagaactatactaagaacatatattattcagatcagtttctgccaatttcagtggtttattgttcacaaaaaaatcttcaaaacaagtattgactttcacaaaatttaaatcataaacaggcaaaccaaacagcacactgtagctatagttgttatgtgattgttttttaattgctgtaggatcctgttctttcagcaggtgaaaaataaaacgcagttcaaatttcatggttttaattttcaactcagaagcactcaaaaatgcaaaatgtgataatgggcacttgtttaaaagaattagtgtatccagccttcactccagctggttaaaaatgttgcacttatcagcaaccctaccactttcatctgctgaaaggacaaatgtgcttggttttactattatgtaatcacaacttactttctgcttgtagttgcttaaaattatgtattttgtcttgggctgcaatttgttttatgcttattttattattactgcagtagttgacyttgctgtatggaaaaataaagtgaaattgccctaataaaacttctctttcttaagtaaaaaaaaaaaaaaaaac

SEQ ID NO: 2040 - DNA, 1377 bp, Homo sapiens
  SITE (6): n equals a,t,g, or c
  SITE (19): n equals a,t,g, or c
tgcagnaattcggcacgancagtacttcattttttttatgtgactgaataatattccgctgtgtagatatatttcacattttgttcaccatttmtccgttgmtggacacttggtttgtttccaccttttggctattgttaacagtgctgctatgtacattcctgtctaagtctttgtttggaaacctgttttccaattctttgaaatatctaggaatggaattgctgagttttatgataattcaaagtttaccttctagaggaaccccagcaaccgtattgttttacattcttatcagcagtgtttgaggggtccagtttctccatgtcctcaccaacactgattttttattatttcctgattattattattattgccatactagtgggtgtgaaattgtatttagttgtggttttgaattccatttctttaatgactcatgatgttgagtatcttttcatgtgcttattggcgatttacatattttctttggagagatgtctgttcaagcccctttgcctatttttttaattgggtggtttgtctttttgttgttgagctgtaagaattctttatatatctggttactagaccctcatcagatatatgatttgtaaatattctattctgtagattgtcattttattttcttcatagtgtcctttgatacacaaacgttttaaattttgatgaagcccaatttatctctgttttcttttgktgcttgtgctckkgcwgkcatagckaarattttatcacsaaatccaaagtcatgaagatctcccccatattttcttctaagagttttatagktttcgcttgkacatttatattttatatcctctaaattttgkttataatttaaatcattgctatagacttggkccagtgagacctataaacagaggkcttaatttactcagtggttaaattgtcctaaaattgatttctgcaaaattcagaggggagatttttgggatttcatagagaaatctatatccatacagttaaatccttcatgatttcatacacttcacttttttaaagtattaaaacttttttatttgaagaatacgtggggagaagagaaatatatttcagcacttagatatgtagattatttccaaaatagtttaccactcaactagtcacttctgtgtaaatcagttttccctgaagcaagcattgtgttgttcccggctacaagcggtcctcattttgcatggtactgtgggaccataaaaatggccatgcaaagcaatcttaataatcaatggggaaaatgatgattgttccatgacctttaaaattctgctaaaatattaaaactcttaaggtcagttataaatgtagaaaaaaaaaaaaaaaaaactcgag

SEQ ID NO: 2041 - DNA, 862 bp, Homo sapiens
  SITE (862): n equals a,t,g, or c
attttaggagtgattttgtgaaatttatttttaatacagtcctagaattgaattgaaatatggtttggaagtttgagggttttttactgtgtctatccttgtgtgtctgtttcctttaaagattcatgatacaatcactgtgtacaatgtgtcctttaatattggttcctgtaataatgtgccttcaaattatttcttgagttttgtgacttaaatatgcagttcactgactcacgccaatgttgtttgctttttaccttaattctttttactgtgctctctcagttttattttttggaagaatggtactcagtgctttgatttgattagtaagatttttgaaacacatgtaatttatttcagaaatgtgattgttttaactctgacttttttagtgcagtcattggagaaatcgatgaagaaacagattctgcgcttgatttggggaatattcgagcagaacctttaaattctgtagcacactgaggaaaaactacatacttggacatctgtaaatctttgtacagaaactgattattctgaggatgatatatggagtttttatgaatgtgtcactggattttgactccttattgattcattgtaatatgtaaattaaaatatttctacattttattgaaaaaaaaacctttttttttgcctaaatataagtttggtagcttggtttcttttttttattaaatagtgtgaaaatataatgggcattttgaaaacttttagaaaaaagtagtactttttgatactttagtatttatggaaactagtgggaaagagraattagtgtgctatataaatccgggcmttccargtaacmgtaataccggggtatatgkgtttcctn

SEQ ID NO: 2042 - DNA, 1075 bp, Homo sapiens
ggcacgagcacaggtgacctaacttctctgagtctcactttcctatccatgaaatagaataatagtacttaccttgtagggttgttttaaagattaaatgagtcagtgaaggtaaagttgcttagcacagtgagtgcctggcacaaaataactaccaagccccaaatggtaactattattatccttcaaccttcctcatttccattaccactgagactcaactgctacaatgctgactacttatattcttcctgagcaccacatcccagctccacaggtataatcttcaagttaacacttttaaggaaacattactgggtataaaattatctctagtaagtcgtatgcgccttttctctgagctcactgtatcacactaaccagcagagggtgcacaataaagaagagaagcctctgactctgcgggaaggtctctcacagaaccaaggacgttgccacccttggctgggtgtacttgaccaaagcgagcctgactgaccctggtagtaggcaaagaatttggcctttacgtttgtatagttaattaccaggctaacaatgcagcaaggatagtaaagcattttacccctcccaaaacaaactgagtattctgacttcaggcttatgtccagctttttagctccgaaacccccccactcactgcacagctgtgttcctttcctggaatgcagttttctatcaggtagcactgagggtccgaacagttcacgtcaaaactatcaggaaagaagaatgaaaaggtaaattaagaaaaagcgggcttggctgggcggggtggctcacgcctgtaatcccagcactttgggaagccgaagcgggtggatcacctgaagttaggaatttgagaacagcctggccaacatggtgactccccgtctctacaaaaatacraaaattagccgggcatggtggcaggcgcctgttatctcagctactccaggaggctgaagtgggaaaatcscttgaacctgggaagcaraagttgttarataragccactgcactccagcctgggsgamagagcgagatccgtctcaaaaaaaaaaaaaaaaaa

SEQ ID NO: 2043 - DNA, 695 bp, Homo sapiens
ggcacgaggtcaggggtctgggctaaaatgcccgatgtttcagaggtcgctctgaaggtgacccaggtgggtggctcttcaccctattcttgtaccccgtttgacgatcacctaatcatcccgttgacccaaatcgatgccagtattttctgcagttttgtctttggtgagtgtgatccatgtcactgtgtggtgaggtttattcacagtcagtctggtctgtaaaatagaacctgcagacagtgaacctgaaaagcatactaggatcatccaggcctccctccccagccttggagctgggaccctcaaagcagggacatagaaggacttggagtgagccacccaccaactccagggtgaaggagagtgtgagttcagaaaagcccccttttggctggttgtggtggctcatgcctggaaacccagcactttgggaagccaaggcaagcagatcacttgaggtcaggacttcgagaccagcctggccaacatggtgaagccctgtctctactaaaaatacaaaacttagctgggcatggtggcacatgcctgtggtcccagttactcgggaggctgaggtgggagaatcttttggaccccggaggcggagattgcagtgagccgagatcgtgccactgtactctagcctgggcgacagagcaagactccatctcaaaaaaaaaaaaaaaaaaaaa

SEQ ID NO: 2044 - DNA, 721 bp, Homo sapiens
ggcacgagcagcgtgggcgttatggccatcatgaaaatgtcacagtgctacagagattttgtttatggccagttttggggccagtttatggccagattttggggggcctgttcccaacaccaggagatgtgttgatttgctccagcaatgaaaccacatctggtacggcagctgcaattggagtcactacttagttaagctcatcataatccactgtcatcctccaagatccatctgtcttctgcacaggccaaatgggagagttgaacagggagatggtgggaatcaccacccctgtgtccttcaagtccttgatagtagcactaatctccatgttccctccagggattcaatattgtttttgatttactacttttctaggtacagccagctctaatggcttccatttggcgtttccaaccataatagcctttaccagtcaaggagccaatgtgggggttctgccagctgctaagtatgtctatgccaattatgcatcctggcacttggaaaatgaccacaggatgagtctggggacccactggacccgctgtaagttggacctgagctaaaactccattaattacctgacctcaggtgatccacccaccttggcctacctgtagggaccagccccacagggtcggtgggtttttctccccgtgtgcggagatgagagagcatagaaataaagacacaagacaaaaaaaaaaaaaaaaaa

SEQ ID NO: 2045 - DNA, 1029 bp, Homo sapiens
ccaggttggccaggctgtcccctgatctttaccttagtaagtaacagatttcttcatggatttatcaatttgtagacatcatctgctgatttcttgtcacggctgttgagatcttctccctcccatccacccactgcaccttcaccttccatatcctgaatgagtttatgtcatgagcatagttggtcattggttgtgttttctaaataagatgcaaaatattgttggctgctaaaacaagtaatatgttcagctaggcttttcttgtaccattctatcttcccttaaagctaattaactttgtttttaccattagcctgattttcttttacctgctgtttgttttttccccacaaagctcccacctctcacacacctatcagttgtattttgcataggtttaaataaattgatctcccctcaccacttccctccaagacccccttatcctcctcctccaaatgggactggttgtgctctgacctggaagtggagctgtkgtcccaaacctycctgtccttgctcccctgtgctgacctctgtttccagtgtggtcatctctttcccttcatgctgyccgagcaaaacttctgggagcttttgaagaaacagatgatttttttcgggggktgggggaagtccttgattgtctgaaaacgagtttatttaccctcatagttagaagtttggtggggtataaaaatctagattgaaaatctgtatttgtaggccgggcgtggtgctcacgcctgtaatcccagcactttgggaggctgaggcgggcggatgacctgagtttgggagtttgagaccagcctcgccaacctggcgaaatcccatctccactaaaaatataaaaatttgccaggcgttttggcatgtgcctgtaatctcagctactcgggaggctaaggcaggagaatggcttgaacctgggaggtggaggttgcagtgagccaagatcgagctactgcctgggcgacagagcgagaatccgtctcaaaaaaaaaaaaaaaaaaaaaactccga

SEQ ID NO: 2046 - DNA, 560 bp, Homo sapiens
ggcacgaggggttttaagccatggttagtgatagcatgtcatttgaagatgtacccccttaatgacttacaggctcatagtgattttttcttttttgttgttgttatttagattagatttgggtaagtctccgggttggttggaaggactcaggtttatgtggagttttgtcttttagttaatgtgccagtaacagagtttgcccgtttgtgctatgggatactcatgaggtgcccccaaacccagctggctacatatacagcctcttgcttcctcttcactgtctcctgggctcttcctccagctctcctcatgccaaactcgtgactgcatggacacaacatagggaggtgattaggaccatgtattttggaggcaaactgtctgtatttgagtcctgcctaccctggttattagtgaagtggtttgagtaagttacttcaaacttctgtgcacttcagtttcttgatctggaaactgaaggtaatatacctaccttacagggatattgtgaggattaaaatagataatgtaaaatgaaaaaaaaaaaaaaaaaaaaa

SEQ ID NO: 2047 - DNA, 1288 bp, Homo sapiens
ggcacgagcagaaaccagttctttcaaaacattttacctctgatgtcacccagcttcctgaggctgctccccctttttgcagtttcagcacaacaactgaccagcattccttcctgataagagaccaccaaccagagtagttctgaccagtctacagaggatgagtagtgtggattttcatgtcctctcttcaccttttgacatcagagggctgaaaactccacccttggatcatgctaacactgccattttttgtgcctgggttccatagagagtcacgaagctctgtgcatgtgcttgtttctcctttcataaatactcatgactcctcctctagcttatttttatttttatttttgagacggagtcttgctctgacgcccaggctggagcgcagtggagcaatcttggctcgctgcaaactccgtctcctgggttcgagtgattcttctgcctcagcctcccaagtagctgggattatgggtgcccaccaccatgcctggctaatttttgtgattttggtggagatggggtttcaccatgttggccaggtggtcatctcaaactcctgacctcaggtgatccacccgccttggcctcccaaagtgttgggattagaggcgtgagccactgcatccgggcctcctctacttattgaatatgtatatttggccaccctgttcatcataaattcttgttccccttgcccttcccatgaagtgtgtttctggcttctggctgggggatacactttcccagactgttagaaaggccaccctgcaggctgcaagcctttatatgtataaaaaaagctctctttttcaaatttatgaaactcatgattcttcagttgacagactggatgagaaggaactctccaggtaaggcatatgggattttgaagcttccagatccaggggaaggaacatgccttgaagctagaaaaaccttgctttgtttaagatatagaaagtagggctggaacagagtgaaggagggaaagactttctaggacaaagttagagaggtaagctgaagccaaataatccaggtcagtgtcaatccttgatgatgggataaatacagaaattgaaaataagcttgtaaagccttttaaatgatttgacatagtggtttgatagctcttcaatctaatgaaaaaattggacttatattttgatgtcttatttctggtttcattttttctagtaattcatttttattttatcttataaaagtatccatcagagaggaattgaaaattgaaaagaaaaaaaaaaaaaaaaaa

SEQ ID NO: 2048 - DNA, 1492 bp, Homo sapiens
ggcacgagtataattcttttaatgtgcattttaattccatttgctagtgttctgttgaggatttttgcatcagggatattggtctgtagttttcttgtgtctttgtctggctttggtgtcagagaaatgcaggcctcctagaatgtgtttgaaaagtgttccctctgtttcagttctttggaagatagctgtttgaggaagattgatgttaattctttaagtgttcagcagaattttccagtgaagttctctggtcctgggtttttctttgctgagaggtttttgattactgctttaatccccttagttattataagtgtgttcaaagtttttatttctccatgattcacccatggaaaattgtttttagaggtttatccatttcttgtagattatccaatttgttggcacataattgttcctagtagtctcttgtaattcttctatttctgtgatatcagttgttatgttccctctttcatttctacttttagttatttgaacttctttttttcttagctaatctagctaagggtttattaattttattgatcttttcaaaaaccaactctaggtttctttgggtttttttctgcttttttttttctatttatttatttttttctatttatttatctgatctaatctttatttttttttctcccttctgctaattttgggtttagtttgtttctttttttcaatttccttgaggttgaagttaggttgctgattttgagatctttcttcttttttttaatgtaaatgtttactggtataaacttccctctttgtatggcttttgctatatatcatacattttggtatatatttttttttgttttcgtttgtttctggatttttttctaaatcccttgtgatttcttctttgacccattggttgtttaggggcgagttgtttaatttccacacatttgtgtattttctgggtttacttttctgctattgacttctagtttcattttgttgtagtcagagaagatacattgcatagttttagtcttcttaaatttgttggtgggcggcactggctcacacctgtaatcccaacactttgggaggctgaggtgggcaggtcacttgagttcaggagttcaagagttcaagaccagtctgggcaacatgacgaaatcctgtctctaataaaaatacaaaaaattcactgggcatggtggtgcataccagtagtcccacctactcgggagtctgaggtgggagtatcagttgagcccaggagattgaggctacagtgagccttgtgctctccagcctgggtgacagagtgaaaacctgtcttaaaaaaaattgttggctgggcacggtggcccacgcctgtaatcccagcactttgggaggctgaggtgggcagatcacaaggtcaggagatcgagaccatcctggctaacacggtgaaactccgtctctactaaaaatacaaaaaaaaaaaaaaaaaaaaaaaaaaaaaaaaaaa

SEQ ID NO: 2049 - DNA, 899 bp, Homo sapiens
ggcacgagagatttcttacttgttgatcacttattctggtacctttccccaaatgatattactgatttaattaggagatacaggttagagggtgctctttggccaattgtgaatacagtaattgatcaaaaaaaaaaggaggatggaagtacgtacacacatattaacatgataattatagctaaagtggtactcttttttaatagcagtgcatcctagagagtaaaatatgatggttctcaagaaacattctgctggggaaaacagtgtttgaatcttagtattttatggaactgcttttttgcttttataaaagcaatttttgtattgacttttggaagaaaatcagttccaataaagcacacattttcatttgtatatctgtcagaagctgatagatttactatactattctgttttggaataataaaaattgcaggcataattaaataaccaaatagttatccccaatgagagagttgctgtatagtttaagagacagatgttcagatctgtctttaattaatctctgagtaataaggagtaataaatttggtcatttaatattttttccttttaaaatgttttatattagggaaaatgctcacaatagtgttttcaggttttatagaattagttgtctttaataaccaatcataggctgagcatggtggttcatgcctgtaatcacagcactttgggaggctgaagtgggaggattacttgagctcaggagttggggactagcctgggcagcatagtgaaaccttatctccacgaaaaatcaaaaaattagccgggtatggtaatgcacacctgtagtcccaaagcactaggattataggtatgagctgttatgcctggccaagatctctttttacaaaaaaaaaaaaaaaaaa

SEQ ID NO: 2050 - DNA, 2006 bp, Homo sapiens
ggcacgagctttgttcatacctctacagaaaacctgctaacagttgaattgtttgtacctcttcccactgccccacctccagctttccccagactgaatgtacttacgtatcaaatacgtttctaagttgcctggattacttctgtawttcttttttgttctcttcctgcgattgtggtattcatgggaaatgcaaataggttgatttgttttgttttagcagtttttctcctttcccattctcactgatgtttaattttattctttgaatatgtagaatattatgtattttgtatagtaaaaactattaaaaaggctatatactcggagtctctctctttctcccatcccttctgctccattctccacactcctcccttgtaggtgatgaacctcattgttctctggtttatcgttgctataaagagaaacacatacgtgcttgttttcctgttttctttcctacacgaaacgtagcatgtatattactctttttcactttgaccttttgactttaggatatacagattgctccatatcaattcagaagcgctcctcgtcctttttcagtactccgttgtgtatatgctccagtttatttaaccagtcttctgtgcttggagatttatgtaggtttccagattttgcagttacaattaatgctataatgagtcactctgtgcatgtatgttttttatattgttggaggtgtatcttcattataaattcctaaagtaggacttctgggtaaatgcatatgtagttttgatagatattggcaaattccccttaaaaggggctgtgccagtttgcattcccagcagtgtatgagagtgcctgtttcctccacagccttatcaacagtgtattgtcaagctttgaacatttgctaatatgacaggttgccttcttcctcatctctgcagtaactgtcttcatggtttcatagccttctccctgatacccctccccagtgtcacatttgaagacgagcactgaggatgaggaaccaactgaagaatatgaaaatgttggaaatgcagcatctaagtggccaaaagtggaggatcctatccctgaatctaaggttggtgacacatgtgtttgggatagcaaggtagagaatcaacagaaaaagcctgtggaaaacaggatgaaggaggacaaaagcagcatcagggaagcaatcagcaaagccaagagtacagcaaatataaagacagaacaggaaggtgaggcatctgagaagagcttgcatctgagcccacagcatatcacacaccagactatgcctataggacagagaggcagtgagcaaggcaaacgtgtggagaacattaatggaacctcctaccctagtctacagcagaaaaccaatgctgttaagaaattacataaatgtgatgaatgtgggaaatccttcaaatataattcccgccttgttcaacataaaattatgcacactggggaaaagcgctatgaatgtgatgactgtggagggactttccggagcagctcgagccttcgggtccacaaacggatccacactggggagaagccgtacaagtgtgaggaatgtgggaaagcctacatgtcctactccagccttataaaccacaaaagcacccattctggggagaagaactgtaaatgtgatgaatgtggaaaatccttcaattatagctctgttctggaccagcataaaaggatccacactggggagaagccctatgaatgtggtgagtgtgggaaggccttcaggaacagctctgggctcagagtccacaaarggatccacacgggggagaagccctatgaatgcgacatctgtgggaaaaccttcagtaacagctctggccttagggtccataaaaggatccacacaggtgagaaaccttacgaatgtgatgagtgtgggaaggccttcattacttgtagaacacttctcaaccataaaagcatccactttggagataaaccctaaaaaaaaaaaaaaaaaactcgag

SEQ ID NO: 2051 - DNA, 1242 bp, Homo sapiens
ggcacgagatttcttagaactgcatgtgaatctacaactagctcaaaataaaaagtttaattataaaataaaagctacatgaaatgaagcaaaaaataattcacccttgtcacgcacacagagtcagagactgtaacataatttgcaggatctagagcagaatacaaatgtaaaacatcttgttaaaaaattattaataattttgagacattgataaagcattaagccgcctgtggggccctttaagcatgataaactgtgctaccacacagattgcacattcacgtatctggccctgcaaatggaatgatttttgcccatgatcaattcaccatggcctctttgggctcagtgaatttgcttcttcaggagggtaattttctcttctttctctgctaagctgtttaacagtagttgccctgcctaatgggcttcatccatccatttctctcagattattttcatgatgcactaggatgaagcacaccctttctcctagtcttgaggaaacgtcgatattcagaatatttaaacgcaggcactgaccaatcagaagagtttctggccaacgttccacacttgagggaaatgacattatctgagccctgaagaaaaacgttgtagatattctccagatcaaagcatcgacaggaagattttagatgttgaagttcgtaatatttcctaaagcaggtatgaattactagtaacttaataggtatattaactgatgaagttttcatttctcagaacaaaccagtcaaggaaggtgctattatactccttttattcatatagatcttgaggctgagacagtttaatcaatatgctataattattgtgtaataataaattaccataaactaggggtgctatgatctcaatatttgtatctcccactcccaaattcacatgttgaaatcctgactcccaaggtgatggcattaggagatgaaacctttgtgaggtcattaagtcatgagggtagaataccgatgaatgggattagtgcccttacaaaaggggcccaccaaagctgccttgttccttctactatgtgaggacacatctagaagttaccatcaatgaaccagaaagtgggccctcaccaggcaccaaatctgccagcactctgatcttggacttccagcctcctgaactgtgagaaataaatttctgttgtttataagttacccattttatggtattttgttacaggcacatgaactaaaaaaaaaaaaa

SEQ ID NO: 2052 - DNA, 1467 bp, Homo sapiens
ggcacgagcttgatgtaaatggactttggttaataagaatatgcaagtattggctcattaagtataataaatgtgcaaaggaaatggaagggagggtatatgggtactctgctgtctactcagttcattaaacctcaaattactttaaaatatagtctattaatttaaaaaattaatcatgttaacttacactatcatgttttctttgattgttgaggtcatttctgggggtctgtcttttatttagtgacagcatgttgacttgcccctcgctcccacttgtttctgacataatttcataccaagcatatatccacagtagacctcctttctttcatggaaatgcacagcttatataaatatattgtagaaaattgctgcttttacttagactaaaagacacaagagtcccctgtaacaaacagcttgaagttattcattcactgaggtttgtacagggttcctgaaactgtcctgtttcaggagctgccagataacctgatcctagagtgaaactcactttggcattcagattttgtctatgttgatatacctcaacagtttaagatcttttttaacttacatggctccatgaaagaggatgtgatgtttcagtgttcagtttggtactattaattatcccttgtagccttccactagaagtgatactttcagattgaacattgtttcttaagttttttcctttccacccctctctcttcttcttcagaaataaagctctgcatgtgtgttggtgtgttttaagtataatttttaatctgtttgtggaaccacagaaatggatccaagaggtaggtaaggtcttaaattgaatttgatgttaaataagctggcctttgacccataggcaatgagtgaggagcaccgttgggtgtaagactagaagcagaaatactaggcattttagaggccaggtgaagggtgaataaggacatttaggtcaattgaaataaaaagaaaaagacagatgtgaaatgtagaagacttaattatggtaggaacttagtgatttggagcctggcagcctgagcaggaaggtgaaaacattgacagtaggcaagtttagaggaagagctagttttagatgaaagattggaatttgtacaagttgaattttagatgaagtgtagtggttaaaattcaggactctgggccgggtgtggtggctcacgcctgtatccccagcgctttgggaggccgaggtgggcagctctcttgaggtcaggagtttgagagcagcctggccaacatggtgaaacctcgtctttactaaaaatacaaaaattagctggacgtggtggcgtgcacctgtaattccagctacccgggaggctgaggtacgagatcagttgaacctgggaagcggaggttgcagtgaaccaagattgcgcctgggcaactgagcgagactccccatctcaaaaaaaaaaaaaaaaaaaaaaaaaa

SEQ ID NO: 2053 - DNA, 851 bp, Homo sapiens
gcatgaacacaaaggagcttttaagagatgtccataccctccttttataataatacaaataaatgcaaaagtcaaagcaaccccgcatattatgtttgattctcctggtaatacccacactacttcagcagtattcttgtacctgccacattaagtaatttaaacctgctatttcactgagcaagatagataaaacatgtcatctccttgagattagtttttgaaaatatgtattacctcacagcagcctaacgcatcttgccgtattgccctgctttcatcttgtcaacagaattccactgggtggaatttgccatgtttgttttaaagttgtttatgcctaaacaacttgaaaaaattttaaaaaggtacattttcctcccattttctgaaagtgtagcaaatatgcaggtaataagtatccttataaatgtccagattatgtataccaagtggaattcttatatgggtgttttgcaatgtgatatttgtaatattaacatgagtataagattactgatttaaatctgatattaaaattaattgtggctgggcatggtagctcacgcctgtaatctcagcactttgggaggccaaggtgggtggaccacctgaggtcaggagttcgaaaccagcctggccaacaaggtgaaaccccatctctactaaaaatacaaaaattagctggacatagtgatgagcgcctctaatcccagctactcaggaggctgaggcaggagaatcgcttgaacccgggaggcagaggttgcagtgagccaagatcaggccactgcactgtagcctgggagacagagactccatctcaaaaaaaaaaaaaaaaaaaactcgag

SEQ ID NO: 2054 - DNA, 1266 bp, Homo sapiens
  SITE (497): n equals a,t,g, or c
  SITE (578): n equals a,t,g, or c
  SITE (606): n equals a,t,g, or c
  SITE (615): n equals a,t,g, or c
ggccacgtagggtcaaaaccacggttccagcaggaaataagcactgggagaggacaggacacgtacccccttccgccgacaccccccacccgatggcaggagggagcccaaaccttgcagcttccatggctcatggctcatgacaatatcattcttaaaattctttgagtttatcaatacgttttgcccttacctgccctacaactgtaaataacaaaatgtatgcatttcctactttttatttgttccgaatgtattctcaagcttcaagaacggttcccatcctaccagacttccaccgtatcaggattaaaaaacaaaacaaaactctgktattctctccatagcttatggcttttaaaaaataataatttgaacaaacaattcctacgtggcatagatctttccatcctggagaatgttactatttcagtctgtcatcttttgtagatattaaaaacctttcgtatgkcaatttctttgctcctcaccaccancttttaggcaggtactagtattagctcgatgcatttgacacgtgtttaatgttattcaatgccagacactgaaataggccntagggatgtataacatattctgtttggnaaattgagnctcaaggaggctaaataccctgccccaggttatatagtctgggattcagtctgagacaggcccccaggtttgttggactccaaagcttgtgctcttaatcactatacttacggttgcctggtagggttgtttgggttgtgcaatgtggcactgagcagctgcactgggtaatcctgccattttgtagccgtccctgctgttttgtctcttctaagtggggagagaacataatttcgtacaagagaaagatgggatctttctcttctttcctattgggactcagcatcttggtggccttacactgtgtgctgaatgagtctatactgttactatctatagtaactcccgggcccttcctgtgcaagaatttagagccccaagctcccctatacatccccacaacttgcttgctcagatatcactttttacctgcttatgaagcctcaaaaatttttatctcagctcacggtaagaaatacattttacatcatgtctcaatacacacacgtatgtctttacacacatcttaagtatatttaagcatacggcagccaaagcttggttgggctatagcaataagtgaccgctaccctctctcctatactcctgagtaaccattgctctcttaaaaaaaaaaaaaaaaaactcgag

SEQ ID NO: 2055 - DNA, 1623 bp, Homo sapiens
  SITE (1333): n equals a,t,g, or c
gaattcggcacgagcagagattgggattgtttgattgggtctttagcagtggtactaatagcaacttctgtctctagaacattggaaaattaaaatgtgtttatctaccgtttttttcctcgaggttatatgaaggtagaaatgaatcagactagatgattagctaagcgagactattaaccctcatcccttcccctctagacaactatgaaattagtcattatgtatkcsatccttctwgcagtctcttctctgacagttataaaagtgatttaggctgcataatgttgtttgaatgaaatgaaaatatagactagagctgtttttttttttatttccatcagtctcttcagtgaaaactaacatttgagcatgattctttttttaaatcattttgtgacagtttagcaagggttgtgataagcaagttatggtatggtaatatttctagtgtccacgtttcytcacatgtctggtgtatgggaactactaactccatcrggaccttgcctatagtaggtacycmacatttactgaattaaatcaataaacatttttaatgaattacagtacaagtcagacctctgtatctgtgggctctgcatctgcaaattcagccaaccatggatcagaaatattagaaaaatggaagaacagtccagcaatacaagtaatatgaataaaaacaatacaacaactatgtacattgtatcaggtattataagtaatttagagatgctttaagtatactgaaggatttgcgtaggttatatgcagatactgtaccattttatataaggaacttgagcatctgtggattttggtatttgcatggttcctggaaccaatcccccagggatactgagggactatagttgatcataccacctgattttagagattttctgagtctcagaagttaattaagtaaactacaatagtctgttcttaacctcggaggatacattccaagaacctcagtgaatatctgaaaccacagatagtattgaatccaatatatacacggtaatattttttcctatacatatgtatctataaagtttaaattctaaatcagacacagtattaacgataataataaattartgcaagactgggcatagtggttcacacctataatcttaacactttaactatgacgttgtctytgaaaagaaatcagctagcccaaggtggctcatggctgtaatcctagtgttttgagaagctaagtcaggaagattgcttgagcccaggagtctgagaccaccctaggcaacatggtgaaaccctgtttctataaaaaataccaaaaaataggctgggcgcggtngctcacgcctgtaatctcagcactttgggaggctgaggcgggtggatcacgaggtcaggagattgagaccgtcctggctaacacggtgaaaccccgtctctactaaaaatacaaaaaattagccgggagtagtgggcgcctgtagtcccagctactcaggagactgaggcaggagaatggcgtgaacccgggaggtggagcttgcagtgaaccgagatcgcgccactgcatgccagcctgggcaacagagcgagactccatctcaaaaaaaaaaaaaaaaaaaactcgaa

SEQ ID NO: 2056 - DNA, 1441 bp, Homo sapiens
  SITE (357): n equals a,t,g, or c
cacaggtgccaggatgccaagggatacagaagaaggatggttgcttctctacccaggagtgccctgaggtgtcttaaaaagaggagcatttatgactcaggcagggtggcacattccagacggcagtgggcaggagcctgactccagagcgccttagaggctgccgctgggagttgagctggaccctgaaggcagtagggtaagccataaattagggttaaggaaccaagggaataaggggatcagaccattgcatagctccagcagcaccattactagcagcctgtgtgaatgatggtcccctcttacatgcccaccatgcaagggctctaggccattcttcactctttaatgcanaaaagcaaaacttccagctgttttcccctacccaaaatgtgtgagcctgagcccagccccaggatggatcttgtcctaggtaaccaagaaggccttaagtgtcagaagaggtagctccaggctgaataaagggacaaatgaagcattactgcactgagatcgcccgtcgtggggtgggtctatacccatctagtcattaagcctcaataatttggtttctaaatggactattatttgctacagatcaaaagttgttggaaactatattacacagataaatagaattgtcctgcaaataaaggaagtaatctcttctctgtttgagataccatgcagtatttgtccaacttgtacaaatagttctgatccatgagaatcctccactttcaacttacttgctgctatatcccaactattataaggccatggagaccagtagcctggtttccattatctttgctctgtttttttttatggcatggttgacactacctccagtagcaaagagttaacttgtcatcagagctataaaatcacaatgataagtgaaaagttctcttttgtactttagcatccaagagaagtgtaattcccaactacaatgctcaaaataatagagagtttttactttgggcctgaaaatacttataggtcaggtctcctagttgggtccatgctgttgttggtgttccctcccaagtaaatacatactgaatttagcaaattattcatttgtgatcctctgtgccatctaaaaatatatatagtttaaaacgctggccaggcgcagtggctcatgcctataatctcagcactttgggaggctgaggcaggtggatcacctgaggtcgggaattgaagaccaaactggccaacatggtgaaaccccctctctactaaaaatacaaaaattagctgggcatggtgttggactcctataatcccagctactagggaggctgaggcaggagaatctcttgaacccgggaggtggaggttgcagtgagccgagattgtggcactgtactccagcctgggtgacagagtgagactccatctcaaaaaaaaaaaaaaaaaactcgag

SEQ ID NO: 2057 - DNA, 576 bp, Homo sapiens
gattcggcagggcacacatgtgcatgcacacttccagcctcctcttcctgctggtgcttctcagtgatacctatgagaaggatcactttccttccttatttccttttgtgggataggatggatctaaaagggacacattaataagaaggcatagtgattaatgtattcagcaaaggttttttccagtcttctcttattaagaaacagactttttcccttgaaatgagatttcattggccttctttatgtaagcttattgtgccagcaattgtgcttgttgcagtaaaagaagattccctcttttgtgggggtgctaaaaatcccacctacatacatccacacaattctaccttagatacccagttcatagtgtgaacaccactgtcctaagtggagatttagtttaaaaaaaatctttctggctgggcacagtggctcatgcccataatcccaacactttgggaggctgaagtgggcagaattgcattagcccaggagtttgagatcagcctgggcaacacggcaaaaccccttctctacgcccccccccacaaaaaaaaaaaaaaaaaactcgag

SEQ ID NO: 2058 - DNA, 5048 bp, Homo sapiens
  SITE (2497): n equals a,t,g, or c
  SITE (5010): n equals a,t,g, or c
  SITE (5035): n equals a,t,g, or c
gactagttctagatcgcgagcggccscccttttttttttttttttttaaagcaaaccattgtatgtgtaagtgtttaagttacctttttgtctattggtctctttgccagccctcccctttcccaatgaaagccatgtcaaattaatcactggattgactgcttcatctttttatttttaatgaaaggtgtaccacggttgtaaagcaataagatttgagatgaacactattgaaacttcgctttttgctaaaaaatagcaagttgaatagtaatcaaaaaacatagaaagattttagttcaaaatgattgctcctttctctacctggacttttaaaaaatcaattgtcatctaatatgagtttatttgtctatagacacaagtatcaatgtctaaaaaaaatcatgactttaaacttccaccgatgaggcaggtaggagataaagatgaattctgaactgttactaaaagtactcattttttaccttgtagggagggtgggcaatggggttacctgaccttatttgagggtatgggctttcttttttatttcatcacttgttatctcaaagagactcggagccagtgatccttttatcctgctacagtctttagggagctaaaaaaaaaaaaaaagcaggggctgccaaaactcttgatttcatatttccttctctaaatatatatgtatcctgttttttggataaaattttaccaagaatccaaaaaaaaaaaaaaccctagaatttaatcaacaagatcagtctacaggtcacagtggatttcttttcaaactgacaatgtttaggttttaagcaaataaagttccagttaatgtgaaactcagtcacaaagagttgagatttttcctttatgaaatagaattgacattcttttatgctataaatgtgcattcaggtcccattaaccatgctctgcttttatttggggatagaacattttctttttcatatcccgatcttcccatttcttcatagaaatgtgataagaagtacatccctgtgatcctgctgcttcgtagagcaccactgcacaccctaccccgagtgccaaccacctctgctataggacactattttcctggccctattcttcacttacttcccatcctgtccttgactaggaatatgttaaatgctgctcccatacaattcagttagctcttgtctttttatttggtccaacccctgctttactgctcatgctgcttaaagcaggagggactagagaaacaaggcattttaggaggcctgtgtgcagttgaaaaccgacttttacacgccttataaaagcagtcaggagatagatccgtaggtttgatccttcacatctaataccaggcgctaatgggaacaaggtttaaagggtcctggtatgctaataaattgaaaaattagtgaaatttaaacttctgcctttttttcctgccttttaatctagatttgcttcctcaatatcctactttgtggtttactaggaacatgcttactctgatctttttttaaaaaacacacagtggcagagtcatttcactattgcactgtgtgttaaagaatgaataaggagttttcagttacatggccaaaaatacaggacttgaacataaatagcagttggatcattctctttcatgacggttaaattcagaggtgtgaactttgtaatgagggtgttaaagattaatctatttgcctaaatgggtttgttcaggtatccatttttaacaaagaagtttgtgttcatatagtaaaagacctatcagtgtttccaccatgcacttctattttttaggagtttataattttaagtcttacattcctagtaacatttgggcttttcttaggttatgtttcgtgaagatttggggggagggctcttttaaaacttcrgcctcagttgtttaacagtctctttaatatattaatctgcactaacatctctgtgatatatgcacatattttagaggtaatcatgtcttctagattacttgtgtgcatttgattgggcttcttgtttagggtcccttttaaaattaattcattagattgaaaaatgtattctatatttctgatagactggacagaaggatctgtgtccccaagtgagacaggctctgaataacctttgttttctccactttttattgatgatttaaaacactctagtcttcccctcaaatcatgcatgcaaataggaggacagtggtggtgactcaactggatacaggtgctcaatagtcaggcttgatagtgatgtcaggacgcattacaagctgtaagccgatactgactggccattggcaccatccttgactaaccttcctctttttctctagtgtgcctatggtgaaatggcaatagcattcactgtcgtattttgcagtgctcaggaagtgggacgttaactttgaaggtgcttgtttgtattagctctgctaggtttacctctacaacgtagatttcagcagctatgyganctgacactacattctagttcttaagattttttttccagatccccccttccccagctagacatacgtagcatactttcatcttattcagtctttctgtaacctgctgctgcttttagtcctcctcacctcagatcggaatcaatggagtgggcccagaggatacattttaattccagtaatggtaggtagatttgtcctgctttctaaaacatctcctcatttcatatttccactccatattgattccataagggaaaattaatgggtgtttcctcctttagggaggtaatgcaaagagtgtggacatcttctaatcttgaggaacagtagttgatttcccttgaaggagcttacatattgactgttttcacaataacctgtttgccccagttcaatcctcattttaatacttaatttggtactggctcaaatagcattttcttacagataacaaatcaagagtgaaatttgaggttatactccagtaaagtttttaacacttgtgaatatggtcagctagactaaacttgactcttttttttaatggcttttttatctgtgaacattcagataagtggattttcaagtactggttggggatgggaatcgtgcttttctttaaacttcagtttacgagatgctttgagagcgttaggcaaaagcagaaataaatatcaggagcaacggggaaagctttataaaagatcatggtggccactgttgcagctttgaagaatgagtgctggcttgaacagttctttgcctgcatcattggtagctgcactgaaaggaaaaaactttcaccttaagaatttgaaaaggaagaaacctgggctctggtcttcatggcatttagactgagatgcttaaacagaacagaagtaatacgcatttcctgccataggatagggaaaatgtaacaagctggttgctcttgaggttagaaaattgtctgtttctctgtggatgaagctggatttacttgaaaatggagagttggcttattgtttgaatattgggacatcaagctatctatagccaagtttcagtcgcaaccagttttccctttgtctggggtaaattcgatacaaaatgattctttttgaatcctgaatccataaattacacttttttttttcaaattcacaaaattcacagtggtgctgactgtgtaataaccactattgggaaacatcccgtaaacctgcctgttgccatgccaatggagtgactgaactggtgacatctgtttgagcatgctttgtgtggctggtagaatgccaccgttgtgcatacactttgtacatcaggggtgaagggagggttttctagattattgggggagggtaaaattgggatttttttgttgttccttttttgatggggtgtgggggtatagtactcagcttatgccctaaaataacatgtataaaaacccctgaagtattgtgtgggtgtgtacgtgtgagtgtgtgtttgtatacgtctggcaattaaagctttgtcttctggaacttagtgaattcttttctctttttcctccagaagtatttgttacaagatttgtaaataagagctctacttagtttgtttaccatgaacatgttgcagcaaaccttatgcatctaattcctacaaggttaaagaaaggcttttagacttgccaggttaagcaacagccaagttctcagtaattgtttgccttgatttatcttttagacttcattttgccagctctaaaactcccagtcttccttgattttagtccttaatcttttatgttctgagcaggaagggtaaaagacaggaacctgcttcactgtattaactagtccatgggctgagaccggggcatctcttttcttcatactgcaatgttgctagatacatgatcagacaccagagggttgggcattcttgcaataccttaacagtgctgaaatctgcagcatggtactaaggaagttaaagtttgaatgtaaccactttatttaaaaggtttttttctttaatttaaatgaaatggggttgaagtgaacatgattttgttgaccatgttcgtgaattacagatgcaacatgcattggtagaatcgtgtgatggtcttttgtgatacttaatttttacatatcccagtctctgtatgtatctgcatagacaaagaaaaaacaaactcctgctttgcttttattgaagggtttccaggactgcgtgtctgctcctgagctctgttttaagtatgtgtatcctttgcttgtattttgtattaaaaaaataagaaaaagaagcctttattgttgagcatgttggcattgtcccctttatttttttctctttttgggacatatgaagcaagttattctttttctgtatctttttttcttttgtaaactttttttttgttttgtttaaaaatggctttataaaagggcttttataacccaaaaaaaaaaaaaaaaaaaaaaaaaaaaagggcggccgctctagaggatccaagcttacgtgacgcgtgncatgcgacgtcatgagctcttgctnataagtgtgcacc

SEQ ID NO: 2059 - DNA, 1134 bp, Homo sapiens
  SITE (151): n equals a,t,g, or c
  SITE (152): n equals a,t,g, or c
  SITE (441): n equals a,t,g, or c
  SITE (503): n equals a,t,g, or c
gctcgtgccgaattcggcacgagatgcagccctgtgtcatcagttgggaacagtgctcttttgtgtccccacgggggcctcatgtttacatttgcttccatgaccaaagaagattctaaactgtgagttaattctcttcatgtgatttttnnttcttcttttctctttttgatgattaataaaatatgtttaggaaatttctcatctgacatagtctgttttaagaatttagtcctttgctgaattgtggggtttttttttccccttttaaaagagaagaagactgcttctccaggaaagacaagaggctgcccgaggctatttgtctttttgctctttccttgtccctcttgaagacaacacagccaccctttctcttcccccgctgctggtgaccagtgctgagacctcttttccagaatcacagaatcaacatggtcntggktataggtttgttctgccatggccaggcttcagacaattaarggaggaggctagcaggntggcagagcaaagccactgcactggtcatctggaattctagggtcttagacccaaattttattccatgcttcargtacttccagaggtgtycatctgtgaattycycccgattttaccaaaaatcgtgatatacgagaaggtagaatgcttccaacattgtcagaaaatcaggaaaaggaaattggaacacataaataaaaatgcccttggggttaagctagagttttattattcatatttcagtactttaacatcatttaagggagttcaaagtttatatattctctacattttctccctcctctttctctccctccctctctgcatcccgccttccctgttgctctctcactctcgctgtgcatctctcttctctttcctccctccctttcttcctgtcgttgttattgcaaatgtcagacttccaggaaaatacaccagtaagcaaatgtgtgttaccattcagtttaaaagttaaatggttcaaatatgattaaaggccccacagtgcttatccttctgttgctacttctctttctcccacccttcctctcacactaaccactgtactgaatttagagtttatctgtctcagaaagtattctgtaaaaaaaaaaaaaaaaactcgag

SEQ ID NO: 2060 - DNA, 1586 bp, Homo sapiens
  SITE (24): n equals a,t,g, or c
  SITE (70): n equals a,t,g, or c
  SITE (271): n equals a,t,g, or c
  SITE (283): n equals a,t,g, or c
  SITE (1525): n equals a,t,g, or c
ggcacgagaatgaaccttaatttnctttttttttgagtcagagtctcgctctgtcgcccagactggagtncagtggtgcgatctcaatttactgcaacctccgcctcccgggttcgggtgattctcctgcctcagcctcccaagtagctgggattacggatgtgcaccaccaggcttggctaatttttgtatttttggtggagacagggttttcccatgttggtcaggccggtctggaactcctgacctcaggtgaatccactcacctcancctcccaaagtnctgggattacaggtgtgaactcaccacgcccagcctgaagcttaattttcaaagacccaatctgagggtctgggagggaccctagcaatgtgttcacttggttaatttttaaaaaagttttattggtatataatatatgaatgagaaawttcataaatattataagtgtgtagtttaagatttttcacaaactgaacacacatatataactagcatccagatcaagaaacagaacattgccagtatgtggtcacatatctttgaagaatttgcaaatgtaagttatctaaaccacagtcagctaaaattgccgtctttttacctgacttcccctttgttacactcttccttatgttgggtggcattggaatggctgtgggcacttttggggtctggctatggggaaattgacttggagagatatttagttggattttagcaggatatgtttacatggttcatagcctctttgtgtatagtcaaggtattactagccatcccagtatgggaatggtttctaggaatactctatgtctgttgtgctaactcatggggcattgtgacataaacgtgcatagctagaggttgtctagcaatatgaatgtgtcctatggcatctggcacccaaagtgtgtggttagtagaggaaaaacaaggtttgatgtcaaaagccagtctggggaaaattctttaagattttgtagctttaatgaaagagacttgttaagaattttcccaggtttgaccatagtcctaaaagttgatataacattatttattgatgatgttcctgtgctaaaagaaaacttttctaagccawcaataacaacaggctgagcgtggtkgcttacgcctgtaatcccagcactttgggaggctgaggcaggcagatcacttgaggtcaggagtttgagaccagcctgccaacatgacgaaacactgtctctaataaaaatacaaaaattggkcaggcgcagtggctcatgcctgtaatcccagcactttgagaaactgaggtgagtggatcacttgaggtcaggagttcaagaccagcctggccaccatggtgaaaccccatctctattagaaatacaaaaattagtcgggcttggtggcacatgcctgtaatcctagctacttgggaggctgaggtaggagaatcacttgaacccaggaggtggaggttgcagtgagccgccaagatcgtgccactgcactccagcctgggcaacagagtgagantctgtcaaaaaaaaaaaaaaaaaaaagaaaaaaaaaaaaaaaaaaactcgagggggggccc

SEQ ID NO: 2061 - DNA, 1703 bp, Homo sapiens
gatttaatagctctttgaacctaattcagttcttttcatggtcttacctcaatgcaggtccaagacaaagtttctaggcctgttccttgctatttgccccagtgtagctctccagacaaaatggccttctttcacttactgaaaggcactgggttatttcctccctcgctgtcttcatctgtgctatgctttgtggstgatctttttgmctggactattcaccgttctgctcttctcttcctcttgcccctctccgtcttttcctgctaattccagattacctttaagatcttagtttggatgtcattgtcctagggacacccatcttgacacctatattatatwaggttaatttttccagaatgtgctttcataagacaatctatacttctcagcatttaacataattgtaatgaattaattwctygtgtaattattctttaatgcctgtcttcttcactagattgtaagccttctgaaggcagagaccacatctgtcttctattgctctggcttctaggacagtgcctggaaagtagttgtttagccataagtatttattgaatgaatacaagggctgtgctgtgctaggttctcattcattcagcagacatctgtgragcacctgctctgtgccagccccttggcatgagaggaaggtgggacataccaagattaacaaatcgaggaaatcgcatctgctagaggagcaggaacatagactcctgtaactgtagcccatggcaggaagtggagagtaaatatggagatgaagttagaaaggcaagtaggtggtttttgatgctgctttcttgttcaataaattgagtacctgctgtgtgccggggctgggcattcagtagtgaagacgagagaattcctaccttcaggaagattatagtctagcagggaaaagaagcaaagaaaccttttcctcctaggccaacaggtatttatggagagagtaggtgagcactttgaggtggtccttttggtctaagaatctgtattgagacttcacacttcattagacctgggcgaggcagttataaatactctcattaaccagagtgaaattccaagggaaaaggaagggaggataaggaacattgtttcctctcattgcatctgtggttaattcaggctctgaaatccttcccatgggtcatggacctatggtttcctatcctaagttggaatatgtgcagttaaatacctaaccattctcagtgtgccattgtctcatttgattcccacatagccctctgaggtgcacaggcaggaatgcctatttttcagctgggcaaacaggctctggaaggcagacttgcccaaggtgacacagtttgaactgggaagggatcagaaatctctctggctggctgggtgcggtggctcatgcctgtaatcccagcactttgggaggccgaggtgggcggatcacgaggtcaggagtttgagaccagcctgaccaacatggtaaaaccccacctctactaaaaatacaaaaaaaaattagccgggcatggtggtgcacgcctgtaatcccagctactcaggaggctgaggcaggagaatcacttgaccccgggaggcagaggttgcagtgagccgaggccgagatagtcccattgtactccagcctgggcaacagagcgagactctgtctcaaaaaaaaaaaaaaaaaaaaaaaaaaactcgag

SEQ ID NO: 2062 - DNA, 1114 bp, Homo sapiens
ggcacgaggggattataggcatgagccaccgtgcctggcctattctgtagtcttttgtatattacttaggattttctacaaatgcttatgtcatcagataataaagatagttttacttttctcttgcctgttcttatttcttttatttgtttttcttacctcactgtactgggaagtaacaccagtataatagtgaataaaaatggtatgagcaggtgcacatggctttttcttgatcttggaagggacttttttatactaacattaattttttaaaaaaaaattagtcttatttttcaacctgacttaagtcatttaataattactaggaaccaagattttgttgttatttgtcagcatagtaatccttttaagattatattttaaatttttttagaatgaagaaaatgtgcctttttatatgttatttggacttttgataaggaggaatcgaagaattgcatttgagaatattctcagagttcaattataaatctttttagaagaaatttaaagaaaatattaatagtaattctatcagatattcatcaatacatataatttgatttggtttaattaggtaaggtataggatgcaagaacaacaaaatagaattgataggtgtaattatagaaagatactggtagctgtgtgttgttttttctcttagacacagacacagaatttaacacctggaaagcagcatggaactgttagcagtttatatatatataatagtggtcattaaagaagaaaataaatgtttgtatgtattttgtttataattttagaagtacagttcttttaagcctgcacaataagctttttaagaaaggtatatataagtttaacttggccggcacggtggtggcaggcagatcacttgaggtcaggagttcgagaccagcttaaccaacatgctgaaaccctgtctctactgaaaatataaaaattagctaggtgtggtggcacgctgtaattccagctactctggaggctgaggcagaattgcttgagcctgggaggcagaggttgcagtgagctgagatcactccaccctactgcagcctgggtgacagagcgagactctgtctcaaaaaaaaaaaaaaaaaaa

SEQ ID NO: 2063 - DNA, 624 bp, Homo sapiens
gaattcggcacgagacagattcattttgcctgatgtcaaattccataggaatggaatctcatagtatctatcatttgcgtttggcttcttatattcaacatagtgtttttgaggttttttttttaatgtgcttgtaccagtttattttccttttttattggttagtagtattttatttggaatgtaccacagtttatccattcacctcttgatggacatttgagttgtttgtcatttttggcaaaacaagtatttatctcaagaagaatgtgactggagtgagacctagccattggtgggtaaaaaactagcaccaaaggcggggcgcggtggctcgagcctgtggtcccagcactttgggaggcaaggcgggcggatcacgagaccaggagatcgaggccatcctggctaacacggtggagccccatctctactgaaaatacagaaagttggccagggcgccttggcgggcgcctgtagtcccagctacaggctgaggcaggagaatgacgtgaatccgtgaggcggagcttgcagtgagctgagatcgcgccactgcactccagcctgggtgacagagcaaaactccgtctaaaaaaaaaaaaaaaaaaaaaaaaactcgag

SEQ ID NO: 2064 - DNA, 533 bp, Homo sapiens
ggcacgaggtcagctgtaccaggaacaccatgaagaagacttctttctctacattgcctacagtgacgaaagtgtctacggtctgtgaagctgctgcccctgagctggaggggggtctcattctacaaagagagaggtggcccccctttcttgacctcctcctccttcaagctcaaacaccacctcccttattcaggaccggcacttcttaatgtttgtggctttctctccagcctctcttaggaggggtaatggtggagttggcatcttgtaactctcctttctcctttcttcccctttctctgcccgcctttcccatcctgctgtagacttcttgattgtcagtctgtgtcacatccagtgattgttttggtttctgttccctttctgactgcccaaggggctcagaaccccagcaatcccttcctttcactaccttcttttttgggggtagttggaagggactgaaattgtggggggaaggtaggaggcacatcaataaagaggaaaccaccaagctaaaaaaaaaaaaa

SEQ ID NO: 2065 - DNA, 4015 bp, Homo sapiens
attgcaacccccactttttttttttttgctttccatttgcttggtaaatattcacccatccctttattttcagcctatatgtgtctttacacatgagatggatctcctgaattcatcacatgaatgggtcttaactctatccaatttgccagtctgtgccttttaattggagcatttaacccatttaaatttaggattaatattgttatgtgtgaattttatcctgtcattatgatgctagcttgttattttgctcattagttgatgcagattcttcatagtgttgatggtctttaacttttggtttgtttttgcagtggctggtaccagtttttccttttgatatttagtgcttccttcaggagctcttgtaaggcaagcctggtggtgataaaatctctcagcatctgcttgtctgtaaaggattttatttctactttgcttatgatgcttagtttggctggatatgaaattctgggttgaaaattcttttctttaagaatgttaagtattggctgctactctcttctggcttgtagggtttctacagagagatctgctgttagtctgatgggcttccctttgtgggtaacctgacctttctcttgggctgctcttaacattttttctttcatttcaaccttggtgaatctgatgattatctgtcttggggttgttcttcttgaggagtatcttagtggtcttctctgtatttcctgaatttgaatgttggcctgtcttgctaggttagggaagttctcctggataatatcttgaagtgtgttttccaacttggttccgttctccccatcgctttcgggtacagcaatcaaatgtaggtttggtcttttcacatagtcctgtatttcttggaggctttgtttgttctttttcatttttttttctctgatcttttcttcatgctttatttcattaagttgatcgtcagtctctgatatcctttcttccacttgatctattcggctattgatacttgtgtatgcttcacgaagttctcctgctgtttttcagctcaatcaggtcatttatgttctttaaactggttattctagttagcaattcctctaacctttttttcaaagctcttagcttccttgcattgggttagaacatgctcctgtagcttggaggagtttgttattacccgccttctgaagtctccttctgtcaatttgtcaaactgattccccatccacttttgttcccttgctggtgaggcgttgtgatcctttggaggagaagaggtattctggttttggcattttcagcctttttgtgctggtttttcctcatcttcgtggatttatctaccttttggtctttgctgttggtgacctttggatggagtttttgcatgatgttggtgttgatgctattgctttcagtttattagtttttcttctaacagtcaggcccctctgctgcaggtctgctggagtttgctgcgggtccactccagaccctgtgtccttgagtatcaccagtggaggctgcagaacagcaaagactgactagaaaaaaatcaccgtgagactagtgttaagcatgagaactagtattaaatgaaagttataaagaatagtgtgtaatgactatatgttttggcaaagaaatataattcagctgtaaaaaacagtgggaagagcatatgcaaaaaattttaaaaactattttctgccatcatacttttgactgtagtgtttgttttgttgctcaggtattttctgtgtattgtgcagcagagcaaatgaataattatacattattctaattttgttatctcctgtgtccttgagagctaggaatcttaatgtggaagaaattatatactgtttatatttatatagatgtaagaaggctaaatcctctacttctgatttttaattagaagtatcagtatgaacttgagattctttaatgtcatttaaaaatagtatataccttatatttgtgtgtatatatatatttgtgcatatgtatatgtatgttaatctgagaatgttttatgtgtattgtggcataaatcaaatgaatatttatgtgatattttaatgctggcatttccttgctatgtctatggaaaagtcccagaaatgaacaaacctagttctgtgaatgtggtcttgaagtgctgttttctgcctgggtgcagtggtccattcctgtagtcccagcactttgggaggccaaggcaggtggatcacatgaggtcgggagttcgagatcagcctggccaacatggtgaggccccatctctgctgaaaatactaaaattggtcaggcatggtggcagacacatgtaatcccagctactcgggtggctgaggcgggagagtcgcttgggccctggagggggaggttgcggtgggccaaggttgtgccattgtactctagcctgggcgacaaaagcgaaactgtctcaaaaaaaaaaaaaaaaaactcgagactagttctggaagaagaaaaatacttctatttgagaaccctattgaggttgcatgccaacttctggagatgttcagacaagaaaaaaagaaatgtggtaaattctaattttacctttttatgtctattttatttacatgacttcttttcagtatccaaaacctaatataaaaaaaaaatcacataatcatttttatgcattcatgtgtaattcaggtatactgtcatattcataactttcaaatgattccaatcaaattcatcctaataatcatctaatattatttactactactacaggaactgaaaaacttatttcatatatatcacttttccatatctatttcacacaaataaacaactaaatatttggtacaacttctaattccacattaaccattcatattttacaacctaaaaatatctataaacaagcacctttgactttgtaatatttacatatgctcaagggaacattttgccagaagatcgtatggttggcttcaaaagaatcttttaaattttcatgtatacttagattaaatttttaagagactagctccaactaacatgagaaatgaaagaatacaaatgactgtaacttttcaataaccttttctcacagactgaaagaatatctgaagaaaacattttgaaattactacttaactattatttgatgtaattctaaaatgtttataaacccgtaacttgtaactttccttccaagaatctttataacaggagtactatttttcttatttgatttgctttgtttagcttagcttagctattaaaatggctaattatactgaagattttacatctttccaacttaaatcagcaatgaatatacatcttcctttcagctacaaggaaacatatacaaatgaaaaatatttaaactgaattcttaagttattagtcctaatatatcccatatgctaacctaagaggcactctccttaattatcttcaaattctcatccttagttcaaacatattccttaaaaaagaaaaaacaaaagattattaaaaattatacttactttagccaacaattcttgtgtttcaggagtcagtggagcatgagaaaacttgcagtattctccctgataacattttgttcctgtatggtaaaacttacaaggatattcatgtaacccaagtgttaaggaagagaacaattttaatccaattgaaataatgttattaacttaatgactttatttttcctaaataaagacctctgtggccgggcgaggtggctcatgcctgtaggaggcggaggtgggcagatcacttgaggccaggagttcaagaccaacctagccaacatggcgaaacctcgcctttactaaaaatccaaaaaaattagctgggcatggtggcgcaggcatgcctgtaatcccagctactcaggaggctgaggcaccaaaatcatttgaacctgggaggcggaggttgcagcgaaccaagattgtccactgcactccagcctgggcaacagagcaagataatgtctcaaaaaaaaaaaaaaaaaaaaaaa

SEQ ID NO: 2066 - DNA, 550 bp, Homo sapiens
  SITE (376): n equals a,t,g, or c
  SITE (407): n equals a,t,g, or c
  SITE (516): n equals a,t,g, or c
gaattcggcacgaggtggagaggacgggcaggtgttcacgtgcccagttaagagtgagatgggtttttatcttcgagtgctacgcctcgtttatgtatttcaggagttgctggggcactgtgggtcagcggctccgggcacctcctgtgcttgaggcagacaccgtctccccgacctcgcttcaccccgtgggtgaaaatgctctgggagctgagaaaaactagtttgtgatcttacagactttcagggctgcacagttttgtaaataggtaaaacactttccagtgttacgattttagtaaattcgtgcttttaaatgatggaaaaaaaaaagaaaaaaaaaaaaaaaaaaaaaaaactcgagggggggcccggnacccaattcgccctatagtgagtcgtattanaattcactggccgtcgttttacaacgtcgtgactgggaaaaccctggcgttacccaacttaatcgccttgcagcacatccccctttcgccagctggcgtaatagcgaanaggcccgcaccgatcgcccttcccaacagttgcg

SEQ ID NO: 2067 - DNA, 812 bp, Homo sapiens
ggcacgaggccactcagctgctagcactctgttctctcccctcatcctctccagaatgtattttagaacttgactcttctaatgactgaagaaaaggtggggtatgggaagatggcctgggactgcagggtcacttacactcacctggctaagagttgagatctggctggtgccctggagtggcacctgccactcacctaatcctaaacaatccagggtgtgggcccaggattgccctctgccttttgaaacaccctccctggttccggcttctaagaccaacagggaggctactttggtggcagggagctgactcaccctccagttggaactggtgctaaaagcctccatttaacgacagccgactgcttggccccaagtgggctgccttgtgggggggaaagttcagtggaaagtgttggaggaagcagggtggtgtgtgaatatccaagtagtgctggtgctattaagctctgacacagtcagggaggtcagttaaaatgtggtcttatggccgggcgcagtggctcgcgcctgtaatcccagcactttgggaggctgaggtgggcagatcacctgaggtcaggagttcgagaccagcctggccaacatggtgaaaccccgtctctaccaataatacaaaaattaactgggcatggtggcaggtgcctgtaatcccagctacttgggaggctgaggcaggagaatcgcttgaacctgagaggtggaggttgcagtgagccaagatcgcgctactgcactccagcctgagtgacagaacaagactccatctcaaaaaaaaaaaaaaaaaa

SEQ ID NO: 2068 - DNA, 898 bp, Homo sapiens
ggcagagggaaatgtaaactttaggttctttaagtcactgttacaagagcaactcaaatttggaatatatggaagggagattataatgcaaattaatgattattttctatcctaatgtttcatttggctgcttttccaagttattctggatggttactggaccccaagattacctagccaactgtcagttttgaggaagtacctgagatgttaggaagacagaactgcactgtttgtcctcatttctgctttctgctgataaatggattgaaaaggaatatgagataagaaaatgaaacaaatgtatttatttcttgktgcctttctggcttcctccactatttagtttcagttattcagtaggctgcgtaattatacttattcagggctggacaaagggtcagtamcctgataagcgtcaactatttctctgattgtcaaatatgtagtcagtatgtttaatgttttaatattctatgatcaatgatgcataggtttatcaatagctgctaagtttcattgaggtaatttatggaaatttactcatagcaactaacaaacgaggaagtattacaaaagatgacagattaggccaggcgcagtggctcatgtctgtgatcccagcactttgggaggccgaggcgggtggatcgcctggggtcaggagttcaggaccagcctgaccaacatggagaaaccctgtctctactaaagaaaaatacaaaattagctgggcttggtggtgcatgcctgtgatcccagctactcgggaggctgaggcaggagaatcgcttgaacccgggaggcggaggttgcagtgagccgagattgcgccactgcactccagcttgggcaacgagcgaaactctgaatcaaaaaaaaaaaaaaaaaactcgag

SEQ ID NO: 2069 - DNA, 899 bp, Homo sapiens
ggcacgagaagttgttagctgacaaagtgatattaaaggagatcctccccattttgttagtatctgtaaattcatgtatctgtattttctgagttttgtggtcacagaaagaaagaatgaacaaatagagtaattttctgtactcacatttcggtaaaatgaaggtgggatatacaagtttacacttacagtctgtgcagcccatatacgttttctggttctggggttgtttttatattctctgcatggagactggcaacatcagcatcacatgagtaccacctgactctagtgacctagtctctttcaacctggatttttaattgtttggtctttttgtttgtttttaactgcttctgcaggctaccccataggagtgtgcccagaatagcctgttttgtctttagttctgcaacatcagaagacaaagagtaaatattatatgtgcatgagggatgctcttaaaaaatggttcattttactttcagtaagaggccaggtttcttgatgcacaacttttttgtttgttttacagtggaagatagatgataagcctgtaaaaattgacaagtgggatggatcagctgtgaaaaactctttggatgattctgccaaaaaggtactttcttgaggaggggttggttagtatctatacagctgatggccatctctcctgggaaatcttttccttttgtaacttggagtgaccttagttttcagtgttagaaattaagtcagaaagcagtttctaaaatttctcacagaaaaagtcagaggaagtgtgttgaaatatcaccaacatggcacatgtatacatatgtaacaaacctgcacgttgtgcacatgtaccctaaaacttaaagtataataataatcaaattaaaaaaaaaaaaaaaaaa

SEQ ID NO: 2070 - DNA, 484 bp, Homo sapiens
ggcacgagcaaaggacatagaattaaggaattaaccttagagaatgtttacattttaaagagtggagaagaatcaaagagtagtcaaatatgatagaaaatcctgggcgactatttctgagttctgttttgttttgtttttttgccctttaagtagctctctttagtaggaaagggaagaatattgacttgggttagttagttctgatttcaaatttcccctttatcacttacttggcagtatttaaccttttcagagtgtttcactgtcagaaaataggaattcagggttgtgaagattacataaaataaatacataaagcacagtgcttgtgacagagtttctttaacttcattagcaccttccctgtgacttcaagtatagacaggacttttatacattagaatggaatatttgtttaactttgtttatgtctcttgttttctccttccttttgcttccacttaaaaaaaaaaaaaaaaaa

SEQ ID NO: 2071 - DNA, 1391 bp, Homo sapiens
  SITE (1058): n equals a,t,g, or c
  SITE (1093): n equals a,t,g, or c
  SITE (1143): n equals a,t,g, or c
  SITE (1156): n equals a,t,g, or c
  SITE (1157): n equals a,t,g, or c
  SITE (1214): n equals a,t,g, or c
  SITE (1215): n equals a,t,g, or c
  SITE (1232): n equals a,t,g, or c
  SITE (1247): n equals a,t,g, or c
  SITE (1285): n equals a,t,g, or c
  SITE (1295): n equals a,t,g, or c
  SITE (1307): n equals a,t,g, or c
  SITE (1315): n equals a,t,g, or c
  SITE (1325): n equals a,t,g, or c
  SITE (1340): n equals a,t,g, or c
  SITE (1366): n equals a,t,g, or c
  SITE (1368): n equals a,t,g, or c
  SITE (1373): n equals a,t,g, or c
ggcacgagatcacctcctccctcctttcacttttcattctgatggtggttgcaccgctactggcttcactccctgggctggggcccctggactcaccgggtgcagggattgtaacgatggggccctggactgtgacgtcaggccaggcggggcggggctgcaactgctccacacatgtagctgcgggactatgcccagcttgggccgggaactctggcccacggctgataagagctttttcagccccagggtggaggctatgctgctgctccttttcttgttctggtccaaaggggcagccgagggggagccgggtcctgtgccagctcctgctggattctctgaaacacaacggtggaggtgagggggcgggggagggccgggagggtggccagggagactgtaccctgggggccatctcaagggccgcagatgggccagcaccaaatgcctctggcacatttggggccaggaactaacaaccaggctgtagaaagaaaggccaagtggaagccgggtgtggtggctcctgtctgtggtcccagctactcgggagatggaggcgggaggttcacttgagcctggaggtcagggctgcagtgagctgtgatcacgccactgcactcaacctgggcgacatagtgagacccaaaaaaaaagaaaagaaagaaaaaaggaagagaagaaagaaggaaagaaggaaggaaggagagagagagagtaaaggaaaagaaagaaagaaaagaaaagaaaaaaaaaaaaaaaaaactcgagggggggcccggtacccaattcgccctatagtgagtcgtattacaattcactggccgtcgttttacaacgtcgtgactgggaaaaccctggcgttacccaacttaatcgccttgcagcacatccccctttcgccagctggcgtaatagcgaagaggcccgcaccgatcgcccttcccaacagttgcgcagcctgaatggcgaatggcaaattgtaagcgttaatattttggtaaaattcgcgttaaaattttggtaaaatcaagctcatttttttaaccaattangcccgaaatcgggcaaaaatcccttataaaatcanaaggaattgacccgaagaataagggttgaatggttggtccaagttttggnaccaagaagtccnnctttttaaaagaaccgggggaccttccaaccgtcaaaaggggccggaaaaaaaccgnnttattcaaggcccaaanggccccacttcccgnggaacccctttaaccccttaattcaaaaggtttttttnggggggtccnaagggggccccnaaaaggcncttaaaattnggaacccccttaaanggggaagccccccccaattttaaaancntttgnaccgggggaaaaaacccc

SEQ ID NO: 2072 - DNA, 1125 bp, Homo sapiens
ggcacgagattctgggacttacctacatttgggagccactaaaaagcatctcctaatgtgccatatcagttcttccaatgttgcctcctcccagaagtctctcatgccttccctcgccctagctatggaacgtggtttttcttgtctttgaacctttatgggtcaaatgttattatcagtattattacttctccagtggctctgttctcactctgcctccaatctcagcagtttctcttctgtctttacccatctaggtagatggtaaattccttgcaagtgggtaactctcttagaacaccttacaacatctcacacatagggtgacctgaagttcagacattctaaagtgtcattgaagactcaatgttgacttaataattggtttgttttcaagagaagaaaagcaccacctccagaatgaaagatggctgtatttcagagacactcttaaagtataatgcagcataacaagactatgaattatcagtccatctgttcacaataacttaccctgtgtgttgagattatcttctgaaaggtcaccttcaaattatatgaacagaaagaaagaaaaatactcctaacacaaccaacatgtctcagatggagactgacaatggaataattacttccaataagtagcaaacttagcatgtgataataatggccaataatactctaatagttcttgtcctagtattgtattccaggagcaattctaggcacattacctcagttctcccatcaaccttccaaaggtcattttacagatgaggaaactgaagctcatacagttactcatctttataagttccttttaaggccaggcacggtggctcatgcttgtaatcccagcactttgggaggccgaggcaggcggatcactggaggtcaggagttcaagaccagcctggacatcatagtgaaacctcatctctactaaaaatacaaaaaattagccaggcgtggtggcgggcacctgtaattccagctacttggaaagttgaaggaagacagtcacttgaacccaggaagtggaggttacagtgagctgagattgtgcaactgcactccagcctgggtgacagaatgagactccatcttaaaaaaaaaaaaaaaaaa

SEQ ID NO: 2073 - DNA, 366 bp, Homo sapiens
ggcacgaggctgtgtgttcatggtgtgcctgctgcttagaaccctgtgccctctttgttcaaggggtaaaactggattggaggtaaacctcagtctctttctgtacattgaaggaagagatcaatgatcttcaaaccaatcattacagatttccccagttgaatttgacttagcttttggatgttgagactgataaggtgattgaaaacctggccttaaccacagccaatgatattgagagttcaaggagaaacacacagccttttcaagggtttagaatccgattgggattgggaggaggtgtgtatccacgctacctcatggaagagtgtttctagtttaaaggagacagaaaaaaaaaaaaaa

SEQ ID NO: 2074 - DNA, 1066 bp, Homo sapiens
  SITE (630): n equals a,t,g, or c
ggcacgaggtttcaccgtgttagccaggatgatctctatctcctgaccttgtgatctgcctgccttggcctcccaaagtgctgggattacaggcgtgagccaccgcgcccggccaagccgcatccttttaaattattcatctgttgaaggatgtttgaggtttttcactttttggcttttgtaagtaatatggtttggatctgtggcgccattcaaatctcacatcaaattgtaagcctgaatgttgtaggtggggcctggtgggaggtgactggattatatggttggattctcatgaatcatttaataccattgcctttggtactctctttgccataatgagtgatttctcctgagatgtcactttctttctttgtttttttgatatctcatccatcgcagtttaayctacaaatgaaatttctacagaaacaggaactattttaacaaagaaaaaaatccctcattcagacttctttgggtagtggtaatggctgcaaatttgcagcattwgraaactacactatcaacaagcttycctttawgaactgagatgtmcaaatgtagaaagcagatgaaagtgaattattyctycaacattttagtaaaactyctgataaycagagttcnaagcacataacaactcaagcataaatgaagatggagagcctggggagtttgatttcttaaattttccaaaaaggtattattgcaaacatataggatttccccccattttaaccttaccagtttcaaaggaaagtaaaggtactggattacatgaagacagcatgtgtgcgagtgcacacgcatgcagggtggcaggtagagtgtctaattcctttttcttactacccaagtctcacttcacagaaatcattaggtaaaggaaaaccaacgaggagttctgcagttttcttttaataactgaggctgaggcaggagaatcgcttcaaccctggaggtggaggttgcagtgagccaagattgtgccactgcattccagcctgagcgatagagtgagactccacctcaaaaaaaaaaaaaaaaaaaaaaaaaaactcga

SEQ ID NO: 2075 - DNA, 605 bp, Homo sapiens
  SITE (449): n equals a,t,g, or c
tcaacatccagccttagaaatagctccctttaggtcaccaaattaacaggagtttctaaaggatagcagcttttttgcaactgctgcatctgttagattcatgttctctttgctcccttctccccaagcttctatttcatgatctttttgttgttttgctctacttttcctctttttaaaacctctgcattggccacccaggatttaagaggagcttttctggaaagctgtctgaaacaggaacaaattacacagaaacactgagagctgtgaacttgtgtgtatacctgacatagtgggagaggggggcttccttctaagtaatagagaagagtgaatattctaatcattgagtagtggtcaggcctgtaatcactgctttttcttttgctgagctcggtatcaacggacaagctcaaaaattgtagctatttaaaattactctccangtaaagggttccygttcctttgatcctatcacagactattcctttttttctattgaggaggttcataagatctcgtgggcaagggctgaggagatgactattgcgtagtgtagttgttttaaattaaaaatttacctctagttataggtgctactt

SEQ ID NO: 2076 - DNA, 3116 bp, Homo sapiens
  SITE (1342): n equals a,t,g, or c
atccacccgccttcagcctcccaacgtgctgggattacagccgtgaagccgccgcgcctggcctagacttgtgtgttctaaacaggttaagtagcaggttgggtttttatgatagtgcaaggaatgactcatgcctctgagcttctaaactgaagctgctgtaactaaaggaatctgaaaagaacaaccctgaagcagaggcctttattgtcttggttgccagtagtaccttgttttgccatgtagcagacaacacacaaaataatgcagttgtggtgtgccatgctatgtgcacagccccttggattactttgttttaaaaagcatcagagttgggggtactttagggaaacctttgcttaccttgttttgccagtgataagagcagtgggttggagggcacttggccagttttctgttcagcttttcagtgaatgtacccctttaaggttcagacttaaacttccttaaaaagtggcgttgttcatagaatcgttggactcattaatgaatcgttcaactccactcactgaagcccagacctccgtgcccagggcccaatctcgtcaggctgccagagaaagttggtgctgctcatactggtctcacagtctaagtaagtgtctgtgatgctcccaagcaaaggaaatgcaagctctggaaattcgttaatgtatttgatgtcttagtgttttagtgactagggagaccattaactagtttatcattaaccacttatcagtgtattgatgttaaagcatttccctgttagctaaaagaggcctgttcatacaagccaactggtatatacgtgtggttcatccatcatctgctgcacatagcagactagaattctgggaaccctgtgcaattcagtctgctctcccttgtggaccctggtaaagaaaagcctcagctcatagtgaacacagcagacctagaaatgtagcagcagcctactgagtagctttcatttactgatcatctgctgtgactgtggccctgtctggaggttcctaggttttgagatttagagcaatgcattctggagacagaaccagcagaacagccatttttcaatttttctttaaatcagtattccatcaggcagataactgctgtattcatgaatcttgagagtgttcctgagacagaattaatggtcatttgggaaaactatcgccatggcttcccatctgtggttttcctctaaaagccttggagattagcccttccttgccagtgagaacggtgaccgcctcctgctctgcacggtctgcggcagttgcccttctggttaggtgtgtcaggttggcttattttgggttcaggcctggcgtanacccacaagtggcagacatatcacaagagtccccagactctgcctagaaacagtgtttgccctttggccagtgacgtggttcatcccggcccatgttgagccatgagtggagtttccaacagagggaggaatgtgtgccttgttcaaggagggcacgacccttaggcctttttcaaccagatttagctgaagggcttgacacctttgaattacagcagttgactcagagtgcaagaagtctggccattttggaaagcaaggtttcctttcagccctgtctactgaccaataccccgactcaccttgtgtggcgcacttcagaatcagatatacctagagtatacctgtggtttggttttataattaatcagctcgttacttcagcccatgaaaatggcatccagggctgccaggagattcagagctcaaaacaaggcgagcttgagttctgcactccagatgtgtgccaaaactagtaaaacttaacggacttacaaccttgtcagtttttttaatgaggcagggatactctgtttttcacactaaacatatgaatgcagcactgctgcctcagctcagcttcgtgcctgggttccccactggtctgggaagactgttgtgctccatagagcagtgcacatctgacccagagggtgggtgttcataactgctacttgctctgctctaccatgtttaaagaaatatttggatgttaaattaactcactatggtttttcacctgggaaggaaacaaattacgtactagagggcattgattggttaaaaacttgtgtatcccgggaaggacctgcggtacaggagtcagccatgtctgtgctgtgtggaaccacctgatgacatggttaacgaggaagacgatgtgttgaccggctgccgtttgaggactttggtcacccagactagacaccttctgtgctcatgtttggaaagctgaaagggaaggacagctgtgccctcctgggagctcatgtgtccctggcgctgtgctagctttcctttacagctgtttacagacaaggcaggcctgaggcagatggccactgctcttgtgatgtttgctcagaggaatatgaacattttatttttgaaaagggatgatgtggttttttgccaggtgtttataattaatcctttaatattatggttattaacctcttaaacatgaatgaattcttgattgttttaacacagtacctaagactaatgctttctgtggacaccactgagctctgcctcaactccaccctctgcgaccggaggactatgcccctagtaactgctgtcggtgtggacgctgtgctggttctgttttctaaaggagcagaaggacaggtctctgagacaggatcgttgtccctacaggaggaacagtggccttgcttcttagacggtcttcactgtgtgttttaaaacaacaacaacaacaacaacaacataaaactcttttgacctgtaacttaaagatcataaacttcaggcaataatattttctgtgtaagcttttaaaattatttttggggatcatagcttgttttattttgtgctataaaattaacagtattaaatgacttatattcttagaatacatcgagtgtcttttcttaacagattagtgcctttttatttttgtattccgttttacgttactggtcccagcatcaaaacccttgtttccatggcctgtttgtatattgtctcaataaaacttgcatcagccggtggtggcggcaaaaaaaaaaaaaaaaaaaaaaaa

SEQ ID NO: 2077 - DNA, 1073 bp, Homo sapiens
  SITE (694): n equals a,t,g, or c
  SITE (1050): n equals a,t,g, or c
  SITE (1056): n equals a,t,g, or c
  SITE (1067): n equals a,t,g, or c
  SITE (1072): n equals a,t,g, or c
agctccaccgcggtggcggccgctctagaactagtggatcccccgggctgcaggaattcggcacgagaaaaaacagatgagagcctactcactccaaggggatggttttaagccactcatgggttttaagctcccatgatccaaacacctcccaccaggccccacctcttaacactaggctggagtacttgctttctagtgtggtctcatgagattcggacaggggcacatatccaaaccatgtcacatacaattcaaagaattatagcaatgtgtaagtaaaaagatcttaatcttttgtagtaaaaacagaatgaagaagtataaatggtgaattttcatcttggaggacaggagctatataaaaacccatcatgaaaagtctcagctttgtatctgggagaaacacatgatgaaaacgagcttgttatgttttttgttctctkgtaggcctagtcattcattttgsatgagttctaagccctggttaacaatctcccttggtttcttctgtagctcttattataccacactagaaaagcaagtactccagcccagttcccttactttctaagtctttttccattttcaagccatgtgtgktatgtgctgattttggaatggtctggaatgctctcttcttaacctcaacctctctgagaccttaccaatccgcagagtccactggagtctnacctycaagataacttccccaacctctctgagaccttacccatccgcagagtccactggagtctcacctccaagataacttccccagccacctaaaccaagccccagcatccccagcatcactctagtgcttagttattattcggggatgaggtgaggggttgctagatccacatgaaaactctacatgctgtgaagtgcagtacagatgtgagagggcaacactgttttccttgcattattatttttgttttacctgttatgtgtttgtcctgtcatccccttcccccacattatgaccctcctagaggtcaaaagctttatgtttcttaacccatccccaagtgcagaaaaggnaggggnaccgaacccgngtcgna

SEQ ID NO: 2078 - DNA, 2195 bp, Homo sapiens
  SITE (2169): n equals a,t,g, or c
  SITE (2179): n equals a,t,g, or c
  SITE (2187): n equals a,t,g, or c
  SITE (2192): n equals a,t,g, or c
ggaaaagccatattgcggatcctcatagggatggtatttgtactaataatcagagatgtaatgaaaaagatcaccattcctttagcctgcaaaatcttcaatataccgtgtgatgatattcgaaaagcaagacagcacatggaagttgaacttccttatcggtatattacctatggaatggttggtttctccatcacattttttgttccttacatatttttctttattggtatctcttgatggagaagtattgtttatgataagaaaggagggtatcagttactgatacccaaaaatatattccaggtaaagccaggtcagaattaggcttttgcaggaatttaacttaaataattatttaagtaaattcataagagtcagtgcattttatcattgcacatccagatactgttttaggtgagctgagctatttcgttactgagaaaatgataagtatccatttagaatgttcatgtaatgtttggagagttttgtattatggattcaacttatatataatatatataaggtacataatatgcaattatatatctgatatatattatatataaaataatatacctaagtgtttttttaaactatgggagtgtattataaaatcaataataatatgcaaacagttgtgcctgtgtatttgaactacatacaggtatgttgttattaacagatatatttaacatttatttactatgggagccatttcctaattgaattgcgtaattactagaccagaatgcatatgctactatacattgatttactgcctgtttttacactgccattacctttcatgttatccatgatgttgaacatgggaggcatttttaatggaccaaatttttagaaaaattagtttttggatttttttttaagttctgtatactgttttgaatgaactttatttgcagctattctggatgtcagtttaataattcaggtactgaattttattgcttgctaattgtgcctttccgttgctaaattaagaaatgctatgtgtactgtgatgtaaaaataagacattaactttatcttaagttacatataatcaagcaaatattttaaaaaatgtatgtcagggtgacaggcataaaagtaaattacccttaactctttagcctttatttagaaagaaatgtggaatgggctaaactttctcaccaatttattagaaagctaaatggataaatacttccctttttgtagatatttttctgtgcattgtaagttataggagcaggacatattttttgtacattgtcttgattgtttatactgcaggtaggtatttccagtgaatggaaacgttgaaatttatagatgggacaatgcacatacttcatatgtaaacaaagcatttttctaaataatttggaaaggattggatttagcaccgttaacttttaatacccatttattggctatttaaggtaaattataaaacctaaaattagtatcagtattttagatcctattattttttcaactttctattattttcacagtggaaaatttgcgtatagtattaaactattcttttttctgtctacctttatattttgaagtgtggttgtacttacgttaatagtaagtgtatttgtagaaagtttttcataaagaagagattaactttccatataaataaataccaggtatgaaattactgattttagtgcaatatctgtatgattatccagaactatcacttcagatgtttctattttgggcaccataactatttgagctcatatttttataattctgattgagaatttaggggcatggtaatttttaccaaaactgaagctggtaattttaagtaaagcaactaaatttaccctttacttattagttaaaaggaaaccaaggcatgtaggaaaatattggtacgttggaaaatgtgaaaagagctttactttcaaaatgtatgtttaatgaattgaattttagggaccgtttcccataatttgggcctatgctatcctgttgatttttatgtctagcttaaaaggtatttgaaaatgttccatttgtgttttattattttctgtcctatgacagttctatgctaaatgtattttaaaataaaagccaaattgaagattaaaaaaaaaaaaaaaaaaaaaaaamcycgagggggggcccggnaccaaattcncccaaaanggggnccc

SEQ ID NO: 2079 - DNA, 1057 bp, Homo sapiens
ggcacgagccttcttcaagaaaggctgtccaactagctctcacttcctctcgtgtgttcagtgtcacccggaagcagagtttaatgtgactaaagtcaacattggctcacactgtcagggagtgtgggaagatgagtaaggactcatcgcagggcgatacccacagcttaaaataggcaccttcccctcccaggtctggttagggcagttgttacatatgaggggcgtggagttttgtcttgtattttggccttgttggtaaagcattccaaagcttcgacacaccctcctttcagcccattaggaaaggctgttgattgtaatattcacacagctccctgggctatggttaagagccttgcagaaggactgggagaagccctgtgtgtttgaagtattgtagcatcagaaaaaaacaccggaagaaggcaggtggggacaaggtgcctatgtctgctccttggaattcctttccttactgtccgaggcaactacagggaaagcaaagcgtgagcccccaaatccacacctgggaggaacgttcccctttgcaaggcatgggactggctggccctgtgtctcacgggggctctgagttttgaggtcacactagcctcctgaggcctggctgagagggctgggttgggggtcaggaggccccctgtagccacgaagcttcctctggggcattgttaaaggttcaccctctttttttgtggggtatcctggaagatctcaagaaactgagcttggaagaagagaggctgagagggtctcccgccgcctgcgttctctgcagctatggccccacagcctccagtgaccatggaggggaaggtgccacccgccttggctgctgaaagggtgatgctcttatgcctgagtcttggctcctgtggtcctgcagagaccctgtgggggccgcccggtcgtcacctgcactcatcttgggttttccttccttttccaccctaagctgaaggtatttttttcctgttttcttcactctaacttggggaagaaggaagatcctttatggaaaaaaaaaaaaaaaaaa

SEQ ID NO: 2080 - DNA, 1626 bp, Homo sapiens
  SITE (1102): n equals a,t,g, or c
  SITE (1206): n equals a,t,g, or c
ggcacgagcccgcttcaggagaaactgtatgtgccatcccttttctcagagcattatgcacagataattgtgtaactgcatgaaacatatattaaaattaggtcagaagtaaagtatggttggaatttgggtatgcgtctgccacttgtctgtgtctcaagcacttaaaaacatatcctattcctggcacagttcagtgcatttcgggaagtgaccaatagtcagggaaataatcaaggtttctggaacaaaatgcaagagttggcctgagatcactgctctacctagagaggagtagggcaaggccagtctkggccatgattcagagtaaggatgactgacccagccacaggggaggacagtgcccaggacctgtgtactcctatgttcccaatgcctaagagtgcccagcccatggaaagtgttcagtgaatttaatgaataaatgattctacagaaatgggcacggggaaggagaaagggcctgcagtcttttatttttattttattattttttttttgagatggagtctcgcactgtcgcccgggctggagtgcagtggccacaatcttggctcactgcaacctccaccttccaggttaaagcgattctcctgcctcagcctcccgagtagctgggattacgggcgcccgccaaccacgcccggctaattttttgtatttttagtggagatggggtttcactatgttggccaggctggtctcgaatgcctgacctcatgatccgcctgtcttggcctcccaaagtgctgggattacaggcgtgagccactcgcccggycggtcttttattcttcatacaagtgtccttcctgcacatcccagagctatctaagacccattctgatcatcactaatgccagttccctcttctgtgaggggcagtaacacccctggtgctgcctacctcacaggattgtcctgagagaccagcgagattctgcatgtgaaggggctttctctgaatagtgaagttctacaatgtgactcatctttgcggaccctgcctycacgtgagggtgggagacctctgctyattgscatttcttttcagattctgcartgttaarttggaaggtwnccacggaagccacattattattacataggaagtgacatyactttccarcttgttttggggggccaaaatcttgctatgktcttggccagcacctcagtttccancctccttccaacccattgtctttctttgtaactctgcctaacaggtctgggaggtccaactttgactgaggatgttaccttcccctccccagtgctgacctcctccctcctagttacttggcataccgggaaccacatcatcaactcctgtgggtaaaaggtgacacatgagccataacactgcttgctttcccagagatgcctgggtttccaggagctgccacatcactcttcctcttttgcatcttaatgttggcagtgggaaagagttagaggtggattcctggacccagtctggcctgcattatttcagcatgtggaatagaggtcactaaccggtgtgccacaggctagtctcagcttgcaaatgtattttgtctccataaaaaaaaaaaaaaaaaaaaaaaaaaaaaactcgag

SEQ ID NO: 2081 - DNA, 1692 bp, Homo sapiens
  SITE (23): n equals a,t,g, or c
  SITE (24): n equals a,t,g, or c
  SITE (72): n equals a,t,g, or c
aaggggcaaaagctggtagctcnnccgcggttcgtcgcgctctagaactagtggatcccccgggactgcagnaattcggcacraggaactcctggattcaagcaatcctctctccttggcttcccaaagtgctaggattacaggcgtgactctggcacccggcctcagtgtgtgctcttaattgctacactgtgccgccacttggcaatgtcacggccgcttactcttacctatgcaatcctagcatgcctttccttcttctgcttcatgctattgagcactctttgtcatcccacagaattcagttcagccatttgagaaaagcctttcctgactctaacagacaagttatgcacctctttcctgtgcttacatagtagcctgtaccaacattacatttctcattgcattatgattgcaacatctgggcacatctctctaggacgctcagctctgtggaggcaaactctttctcattcagtttgtatgcccagtttaacacctaagcgttagcacacagcagatacttggtaaatgtttgttagctgagtaagggaaaaatagatcttctagccatgaagttttaatagtgttgatgtaaaccagaaggaacatttcaaataaattatgtaattttcaataaaaaaagatatacccttgatctgtaactcacaaaaataatgtattcttctgaaacagtatacaacgaatgtttaattaaccatttgattaaatggctgagtaccctgggccaataaagcaaagtttcattaactcctctaatattcttaacggaaaacctgaagagctgacatatagtagtaaatgaaatgtgggttggtatctcagaccatcacaaatcacctcttaatacaacttcttatcatcacttaacttgaaatactttcaaagatgaagacaaagggtaataaagaagtagcaggatggagttgtactcttggtataagagaaatatacagcaagtcattataatacattagttagtaacagtgacttttctaaggtttcagttgatggttattcatccactacttaattctttcctcttaacaacctaaatgaaaagtcactgcttttaaaataacattttgtcataactctataaaacttttttttttgagacggagtcttgttctgtcacccaggctggagtgcagtggtgtgatctcagctcactgcaacctccgcctcctgggttcaagcaactctcctgcctcagcctcctgagtagctgggactacaggtgcacgctgccatgcccagctaatattctgtattttagtagagatggggtttcacccgttgtccaggctggtcacaaactcctgagctcaggcaatccgcccacctcggcctcccaaagtgctggrattacaggcgtgagccaccatgcctgaccacattaaagcttttracatgctaatctgagtggttattgatgatggtaagatcaagttcggttgttttgtagtcattagatttaatggaaataaccattagcagagcaatgccttgtgttggattattcactatcccgttagtatcctttgttttcactttgataatacgattgccttttattgagtagaaaggaccagtatgctcaaggagttattgattcatagttgagatcaaaaaaaaaaaaaaaaaaaaaaaaaactcagacggggg

SEQ ID NO: 2082 - DNA, 975 bp, Homo sapiens
  SITE (813): n equals a,t,g, or c
  SITE (843): n equals a,t,g, or c
  SITE (917): n equals a,t,g, or c
ggcacgagcctatctccttacagcccgcagacacaaggtaggcaataaaaaatggtttcaactttttcagtatttttacaccaaaagatgctgtcttacaagacctctatcttttgtttgttcctgtttttccctcccttcctcaccaggggagagaaaaaaacggaaggaaagaaaggaggaaatgaatcttaatgagcatctgctgtgtgctaggcacttttaaaaatacctaaggtcatcagataatttacacagaacttgggtggtagtgtgtgaaagactatgcataactgagatgattccatggcagaaaattccaagccatggaaaaaccacatcgtatttatgatggtgcacaaaccgtgatgaagaagagcaagagggaggaaggaaggacagatcccctatcgaatggcaatacttgaggattggggggtaaaaccctaaatgaacttgtagattaattcaaagccagacttactgcttctatagagagactagcacattgtttatatatcagaaagtcctgaattaatttcatgcttaatgccaaaggggttgccataacctttgcctctaagcaaggctgtctctaaataatcatcatatttttaaagttactcagattgcaggatttcctttgacagcctatttctgcttatatcacttttactatagggtgttttgtctttatttctgattttctacccccttcaaccaaagtgtgtttctgcaagcctgttctttgtggaactaatggcttttttttttttttttttactgaattataaataccatgaggactttgtntctcccacagttctcatagtaagctttgcncagggtttatggcctgtaaatatttgttgaatgaacagtggaataaataaataaataatggtgatataccaatntaaaaaaaaaaaaaaaaaaaaaaaaaaaaaaaaaaaaaaaaaaaaaaaaaaaaaaaaa

SEQ ID NO: 2083 - DNA, 1276 bp, Homo sapiens
ggcacgagcttgtatctatctatatacacactttataaataaatgagtcaagatttttaaaacaaaataccaaatttttcagtatcatttgaaatttttcaaaattacttttttaaaatttctgcatattcattcagtgaagttgaatgatccagtgggcactctgtattccttcataaactgtgtggtgaatgtgcgtgtgtgtatgtatgtatatgcacgtgtttatgtgttttctggggttaatttccttaaaataaaaaggcaactgtcaagactaaagctataataatttttatgaatcttagaaaatgttgaatttttagtgattccagaaattgatctctatcgatgaaactgctttctcaaatacgtcagcaatgggattcaggctttgcttacaatgtgaaggaagttcttagtctcatttgcacaaagaaggaaggagggctaaagataaaaagaactcatagtcttttccatagttttgggtcatgttcactgtaaaaaaaaatcacaagatgccatttttacacagccttttaatctacacatacggcagctaatattccaaaaaaataatttcttcctttgtagccatttaaactaacagctagaatatttcttctcccaattattaaaaataagctgtttctgagtcggtgctgactacatttactgattgaagcagccaactccaaatataccatcttttagtattgacacttaaaataaaacttctccccagaaaaagagttctataaatgatggctgtagaaataggcactgtccaggcagttgttttgtggaagtagtgttgttattttctggtgttttccaagtcatctcagatggtgcgtgaaaatgagatgccaaagaaggcttaaaaaagataccctgcaccagcttcagaatgtaagcaaatctttcattccagcgcttaaaagttttgagaaagctaatctaaagttaaatgtttactagcatctctccgattatattttagaaactactgcacaaaaataaaacaaatttcttattttctctgggttgaaaagtgcacataaaatggaaaatgctttttataccactatttccagcagggattttattttcatttgtcatttgccagcctggggtatgttgggagaaggaacaattgatttttgaaaaggtgcatttgtgtgaaaaccaaaaattgtgttcaacaaatactactactaacccatatgtggatatatgtgttttatacatgagtaaaaaaaaaaaaaaaaaa

SEQ ID NO: 2084 - DNA, 1212 bp, Homo sapiens
  SITE (551): n equals a,t,g, or c
  SITE (730): n equals a,t,g, or c
gattatctgcttctaggttgctaaatatcaatataaagcatattattccagtaagtgccaatgcagttgttagatgctggcgctgaagttagtgctcactgcattctctcttgttggctgtctacttgagtcaccgattggcacagccagagctataaccagtctgtgaggattgatttgccctgacttgtatcttcatgtgtggtctataaggtctgccagattggcttatagtcacaaccagcatgtcctaagcaaaatgaaactatatgaacaaaaatcagctctcatttcactgctagactttggtgttttctttaagaagtagccttgttaatgcttagttttgccttggggrccttaatgtgtcattaactgcctggaaatacctttcatttaaaaaagtatactttagtacctaatgttcaatttagtatcgatctggatattttagcaaattttgacttttcaaagacaaagtttctgtcttgtaatgtttcttgggccggctatactgcctttcatctaaaactcactacagttcactgggnccgtttggtaacagggtaacckgggcataattaggtgcttgattgacaagagagttaccagtaccagaagtcaggttctattttaaccccatcatttccaattgattgtttttctctccaccattattcactgtctctcaagtgttagcactctgagttgttgaacggaggtttgtatntgcgcagagccctgtcgcaatgccccagcaagcttcttgttggcatgtggccactctaaattgtgctccaggatctgctatgggtccatgcttgcaggagaaacagctgtgtagaatttcctattgcatttcatttgtgggtttagaactcggttgcttatttcatattgtctcccttttcagtccttcaaggtacatttttccaacttctctaatgaattattacatttctgagtagctgatatgtttttatcttatctaagcagtatatttataattccttctttgcattggctaatctgattagtagttcagaacccaattttcagattgtctatagcaaactgtgaagaactgtgctgtcaagtagaaatagaatataagccacatatgtaatttaaacttttctaataccacattaaaaactataaaaggggaggaaatggaaaattagtaaaaaaaaaaaaaaaaaaaaactcgag

SEQ ID NO: 2085 - DNA, 575 bp, Homo sapiens
ggcacgagctcgtgccgctcgtgccgtgatattacattcacctttgattgttttttaaaagtttatttttacagaatatatttagtacctttcttaaggagtaactgaattgaatcaaccagtttgcatttaaataaaagaacaggctcagtggtcttcctgtagaatggtttacatgcctgcatgtgcagtagttgtgtctggaatcctagaattggcactttctgcctccttgctctaaatgtcacaaaaaattatacttccttaaagtaaatgtaatgatttcttcttttcctattgaccagtacagatagatatgttgtgtttgcttcatttttaatgatgacttcaagattgatgatgtgatccaataactgtggaggtagctttaacttggttctgtgtaaatagtatgtattttattataatatttctcattttaagatgcttggtttacattaaattatggtatttaactatttttatgtttatactaggtagggtctttcttatgtttctgtgtttttggtatgctaaataaagctatttttaaacccaaaaaaaaaaaaaaaaaa

SEQ ID NO: 2086 - DNA, 519 bp, Homo sapiens
ggcacgagggaacaattgcatcaccccagaaaattccctttacagacagatctgtccctccaaacttagcctctggcatcctctgatctggttcctgtgactctaggcttttctgatgtttgtttgttggccttttctagggtttcctgtaaatggaatctcatgtcttctgcgtctgggtactttgacttagcatagtacttttgaaattcctccatgtattgcctgtgtcccttcttattgccgagcagtaatccactgtattcctactgtggattatgttccaccgttgtttatccgtccaccagatgatgaccgttgggttgtttccagtttttggctgccatgagtcaagttgctataaacgtgagagtgcaagtctgtgtgtgaatacacattttcatttctcttgggtgcatgtaacagtggggttgttaggtccaatggtaactgtatgcttaataagaaactacctgattcgctgagagagagctttaaaggaaaaaaaaaaaaaaaaaa

SEQ ID NO: 2087 - DNA, 1104 bp, Homo sapiens
ggcacgagatttccttatatatgctagatagaggtgtcatcagatacatgatttgtaaaaattttcccttgttctatgaattctatgaattatcttttcattttcttggtgtctttggaagcataaaagtttccaattttgattttgtccagtttttctatttttcttttgttgctcttgcttttagtgtcatatctaagaaaccaatgcctaatccaaggtcataaagactatgtctatgttttcttctaagagtttggtaatttagttcttacattgagatctttgatccatttcaagttaattctgtgtatgatgtgaggtaggagtcccttagcttctgcatatgcacttttcccagcaccatttattgaaaatactcttctttccccatttaattaccttagcacccttatcaaaaatcggttagctatagatatatggtcatatttctggactcacaattttagtccattgatatatatgtctatccctatgcctatactacattgttttgttatggtagctttagagtaagtataactgctttatgttaaaatattaacctatataatcttctgccagtggtaggttttcccttattttctcatttttgagactaattttccaacttaatttggcttatagaaacctacaaaaagtattgttaaatatttttcattttcttaatactgcaaatcaaactcaaaggaaagttgggagggggtgtgctgtttaactcaggcaactagtgttctcagaatatacctgggctccaaatatgaatcagtaagggagatctatgcttggcgcggtggctcgcgcctgtaatcccggcactttgggaggctgaggcgggtggatctcgaggtcaggagatcgagaccatcatggccgacatggtgaaaccccgtctctactaaaaatacaaaaattagctgggcatggaggcgcgtgcctctggtcccagctattcgggaggctgaggcaggagaatcgctttttcccgggaggcggagattgcagtgagccgagatcgcaccgctgcacttcagcctggtggcagagcgagaccccgtctcaaagaaaaaaaaaaaaaaaaaa

SEQ ID NO: 2088 - DNA, 865 bp, Homo sapiens
ggcacgaggaaaggctggggaaactcaccatccattaagcagaatgttttttggtccccctgtttttagcatggtccttcatctccacctccagctgtgtctggtgtccgtctgcaagtccaaatccttggttcaaccattccaggcaacctggccaaaactaaccaaacacccatgatctcccgagaggagaaaaggcagctgcctggccacaggctggggaagggaatcaggtcatcctgctcctttgccagacttttgatcgctccacctggatttagccctgtggcacagttgtgccttcgaagatgtgtagtgccttcatgtgctgagcttttctggggggcctgtagctttattctgttttcttcttcttagcttctcattctgtacacatttagatctcatttttctcttgtctgctttatatcttctttaattttgctgatgtctgtcagctgcatcatttcttctcccaatctctttgtgtttataggtttacacctttcattatttcttgcctgttattttagtatgtttcaagagtgaacagagggctaggcatggtggctcacgcctgtaatcccagcactttgggaagacgatgtggatggatcatttgaggtcaggagtttgagaccagcctggccaacatggtgacaccccacctctactaaaaatgcaaaaattagcgaggcatggtgatgcgcacctgtagtccccagctactcaggaagctgaggcaggagaatcgcttgaacccgagaggtggaggttgcagtgagccgagattgcgccactgcactctaggctgggcgacacaacaagactctgcctcaaaaaaaacaaaaaaaaaaaaaaaaaa

SEQ ID NO: 2089 - DNA, 3244 bp, Homo sapiens
  SITE (343): n equals a,t,g, or c
ggcacgagcaaagggggaaaaaatggccattatgttgcaagcctgagtacatcttacctggatgccatgcccttcgtagcctggttttgtttttgtgtctttagcaccattcactttagtattttggcctcccggaaagaaaaccagccttctagacttgccagattgaaatgacacagtgatctgcccatcaactttttatcatttcccttcactttaattgggtcacaacacaaatgacttagaaaatgtgagcgcactagattataagaagccttagcagacagtgtctgaggattaaagttgcttttctgctawgtttcaggtggttaatggaatgaangggttgcctgtcctgtagctatatcgagaagtttactgactttcttcggctctttgtgagtgttcacctaagaagaatcgagtcttactcccagttccctgtggtggagtttttgacacttttgttcaagtacacatttcatcagcctactcatgaaggttacttctcttgtttggatatctggacgctgtttttggactatctgacaagtaaaattaaaagtcgtcttggagacaaggaagcagttctcaacaggtacgaagatgccctggtgctcctgctcacagaggtgttgaatcgaatccagttcagatacaaccaagcccagctggaggagttggatgatgagactctggatgacgatcagcagacggagtggcagcggtacttacggcagagcttggaggtggtggccaaagtgatggagctcctgcccacgcacgccttctccacactgttccctgttcttcaggacaatttagaagtttatttgggattacaacagtttatagtcacttcagggtcaggacacaggttgaacatcacggcggagaacgactgccggcggctgcactgctccctgagagacttgagctccctgctgcaggccgtgggccgcctggccgagtactttatcggggatgtgtttgctgcacggttcaatgatgccctcacagtcgtggaaaggttggtcaaagtcactctgtacggatctcagataaaattgtacaacattgaaactgctgtgccatcagtattgaaacctgacctcattgatgtgcatgctcagtccctggctgcgctgcaggcttactctcactggttagcacagtattgcagtgaagttcaccggcagaacacgcagcagttcgtgacactcatctctactaccatggatgcaatcacacctctaatcagcaccaaggtccaagacaagctgctgctatctgcgtgccacttactggtctcactggccaccaccgtgcggcccgtctttctgatcagcatccctgcagtgcagaaagtattcaacagaatcactgatgcctctgccctgcgacttgtcgataaggcccaggtgttggtgtgccgagccctctctaacatcttgctgcttccgtggccaaaccttccagagaatgagcagcagtggcccgtgcgctccatcaaccaygccagcctcatctctgcactctcccgggactatcgcaacctgaagcccagtgctgttgccccacagagaaagatgccactggatgacaccaaactgattatccaccagacactcagcgtcttagaagatattgtggagaatatctcgggggagtccaccaagtctcgacagatttgctaccagtcgctgcaggaatctgttcaggtctccctggccctctttccagcttttatccatcagtcagatgtgactgatgagatgctgagcttcttcctcactctgtttcgaggccttagagtacagatgggtgtgcctttcactgagcaaatcatacagactttcctcaacatgtttaccagagagcagttagccgagagcatcctccacgagggcagcacaggctgccgggtggtggagaagtttctgaagatcctgcaggtggtggtccaggagccaggccaggtgttcaagcccttcctccccagcatcatcgccctgtgcatggagcaagtgtatcccatcattgccgagcgtccctcccctgatgtgaaggccgagctgtttgagctccttttccggacgctccatcacaactggaggtacttcttcaagtccaccgtgctggccagtgtccagagggggatcgctgaggagcagatggagaatgagccccagttcagtgccatcatgcaggctttcggacagtcctttctccagcccgacatccacctttttaaacaaaatctcttctacttggagactctcaacaccaagcagaagctgtaccacaagaagatcttccggactgccatgctgttccagtttgtgaacgtgctgctccaggtcctggtccacaagtcccatgatcttctgcaggaggagattggcatcgccatctacaacatggcctcagtcgactttgatggcttctttgccgccttcctcccagagttcctgaccagctgtgatggtgtggatgccaaccagaaaagtgtgctggggcggaatttcaagatggatcgggacctgccctcattcacccagaatgtgcacaggctggtcaacgacctgcgctactacagactctgcaacgacagcctgccccctggcactgtgaagctctaggcctgctactgcctggggacacggacttctgctgctgccacctgcgccagccctaccttccaccacagatgtctcccagatgggccttggtcacactccttggcttctcccaccgcaagcaacgctgcctgcctctgccgctcctccacatcttgccgctgcccagcagagctggcttctgggtccacctgagcactggacggtgctcccagggcgttggagcaggcggaggggtgtgtggccaggtactaggaggcaccaggaaatcccgcggggtggcccatgcagaccaggcgcacgtggctcatggggcagaattgccaaggacagctcacgacagtgccaccttctcaccattccagccaaggagagatgtgacgttggaactgctctggcacttctgtcaagcctcccccgccccaattgccttgagatctctgctctttgtcagagatttgcaaagactcacgtttttgttgttttctcatcattccattgtgatactaagaaactaagaagcttaatgaaaagaaataaaatgcctatgttgttgttctagaaaaaaaaaaaaagtcgagcggccaagaatttagtagtagtag

SEQ ID NO: 2090 - DNA, 3229 bp, Homo sapiens
ggcacgagcaaagggggaaaaaatggccattatgttgcaagcctgagtacatcttacctggatgccatgcccttcgtagcctggttttgtttttgtgtctttagcaccatwcactttagtattttggcctcccggaaagaaaaccagccttctagacttgccagattgaaatgacacagtgatctgcccatcaactttttatcatttcccttcactttaattgggtcacaacacaaatgacttagaaaatgtgagcgcactagattataagaagccttagcagacagtgtctgaggattaaagttgcttttctgctatgtttcaggtggttaatggaatgaagggttgcctgtcctgtagctatatcgagaagtttactgactttcttcggctctttgtgagtgttcacctaagaagaatcgagtcttactcccagttccctgtggtggagtttttgacamttttgttcaagtacacatttcatcagcctactcatgaaggttacttcyctkgtttggawatctggacgctgtttttggactatctgacaagtaaaattaaaagtcgtcttggagacaaggaagcagttctcaacaggtacgaagatgccctggtgctcctgctcacagaggtgttgaatcgaatccagttcagatacaaccaagcccagctggaggagttggatgatgagactctggatgacgatcagcagacggagtggcagcggtacttacggcagagcttggaggtggtggccaaagtgatggagctcctgcccacgcacgccttctccacactgttccctgttcttcaggacaatttagaagtttatttgggattacaacagtttatagtcacttcagggtcaggacacaggttgaacatcacggcggagaacgactgccggcggctgcactgctccctgagagacttgagctccctgctgcaggccgtgggccgcctggccgagtactttatcggggatgtgtttgctgcacggttcaatgatgccctcacagtcgtggaaaggttggtcaaagtcactctgtacggatctcagataaaattgtacaacattgaaactgctgtgccatcagtattgaaacctgacctcattgatgtgcatgctcagtccctggctgcgctgcaggcttactctcactggttagcacagtattgcagtgaagttcaccggcagaacacgcagcagttcgtgacactcatctctactaccatggatgcaatcacacctctaatcagcaccaaggtccaagacaagctgctgctatctgcgtgccacttactggtctcactggccaccaccgtgcggcccgtctttctgatcagcatccctgcagtgcagaaagtattcaacagaatcactgatgcctctgccctgcgacttgtcgataaggcccaggtgttggtgtgccgagccctctctaacatcttgctgcttccgtggccaaaccttccagagaatgagcagcagtggcccgtgcgctccatcaaccacgccagcctcatctctgcactctcccgggactatcgcaacctgaagcccagtgctgttgccccacagagaaagatgccactggatgacaccaaactgattatccaccagacactcagcgtcttagaagatattgtggagaatatctcgggggagtccaccaagtctcgacagatttgctaccagtcgctgcaggaatctgttcaggtctccctggccctctttccagcttttatccatcagtcagatgtgactgatgagatgctgagcttcttcctcactctgtttcgaggccttagagtacagatgggtgtgcctttcactgagcaaatcatacagactttcctcaacatgtttaccagagagcagttagccgagagcatcctccacgagggcagcacaggctgccgggtggtggagaagtttctgaagatcctgcaggtggtggtccaggagccaggccaggtgttcaagcccttcctccccagcatcatcgccctgtgcatggagcaagtgtatcccatcattgccgagcgtccctcccctgatgtgaaggccgagctgtttgagctccttttccggacgctccatcacaactggaggtacttcttcaagtccaccgtgctggccagtgtccagagggggatcgctgaggagcagatggagaatgagccccagttcagtgccatcatgcaggctttcggacagtcctttctccagcccgacatccacctttttaaacaaaatctcttctacttggagactctcaacaccaagcagaagctgtaccacaagaagatcttccggactgccatgctgttccagtttgtgaacgtgctgctccaggtcctggtccacaagtcccatgatcttctgcaggaggagattggcatcgccatctacaacatggcctcagtcgactttgatggcttctttgccgccttcctcccagagttcctgaccagctgtgatggtgtggatgccaaccagaaaagtgtgctggggcggaatttcaagatggatcgggacctgccctcattcacccagaatgtgcacaggctggtcaacgacctgcgctactacagactctgcaacgacagcctgccccctggcactgtgaagctctaggcctgctactgcctggggacacggacttctgctgctgccacctgcgccagcctaccttccaccacagatgtctcccagatgggccttggtcacactccttggcttctcccaccgcaagcaacgctgcctgcctctgccgctcctccacatcttgccgctgcccagcagagctggcttctgggtccacctgagcactggacggtgctcccagggcgttggagcaggcggaggggtgtgtggccaggtactaggaggcaccaggaaatcccgcggggtggcccatgcagaccaggcgcacgtggctcatggggcagaattgccaaggacagctcacgacagtgccaccttctcaccattccagccaaggagagatgtgacgttggaactgctctggcacttctgtcaagcctcccccgccccaattgccttgagatctctgctctttgtcagagatttgcaaagactcacgtttttgttgttttctcatcattccattgtgatactaagaaactaagaagcttaatgaaaagaaataaaatgcctatgttgttgttctagaaaaaaaaaaaaaaaaaaaaaaaactcgag

SEQ ID NO: 2091 - DNA, 1545 bp, Homo sapiens
  SITE (835): n equals a,t,g, or c
ctactactactaaattcttggccgctcgactttttttttttttctagaacaacaacataggcattttatttcttttcattaagcttcttagtttcttagtatcacaatggaatgatgagaaaacaacaaaaacgtgagtctttgcaaatctctgacaaagagcagagatctcaaggcaattggggcgggggaggcttgacagaagtgccagagcagttccaacgtcacatctctccttggctggaatggtgagaaggtggcactgtcgtgagctgtccttggcaattctgccccatgagccacgtgcgcctggtctgcatgggccaccccgcgggatttcctggtgcctcctagtacctggccacacacccctccgcctgctccaacgccctgggagcaccgtccagtgctcaggtggacccagaagccagctctgctgggcagcggcaagatgtggaggagcggcagaggcaggcagcgttgcttgcggtgggagaagccaaggagtgtgaccaaggcccatctgggagacatctgtggtggaaggtagggctggcgcaggtggcagcagcagaagtccgtgtccccaggcagtagcaggcctagagcttcacagtgccagggggcaggctgtcgttgcagagtctgtagtagcgcaggtcgttgaccagcctgtgcacattctgggtgaatgagggcaggtcccgatccatcttgaaattccgccccagcacacttttctggttggcatccacaccatcacagctggtcaggaactctgggaggaaggcggcaaagaagccatcaaagtcgactgaggccatgttgtagatgncgatgccaatctcctcctgcagaagatcatgggacttgtggaccaggacctggagcagcacgttcacaaactggaacagcatggcagtccggaagatcttcttgtggtacagcttctgcttggtgttgagagtctccaagtagaagagattttgtttaaaaaggtggatgtcgggctggagaaaggactgtccgaaagcctgcatgatggcactgaactggggctcattctccatctgctcctcagcgatccccctctggacactggccagcacggtggacttgaagaagtacctccagttgtgatggagcgtccggaaaaggagctcaaacagctcggccttcacatcaggggagggacgctcggcaatgatgggatacacttgctccatgcacagggcgatgatgctggggaggaagggcttgaacacctggcctggctcctggaccaccacctgcaggatcttcagaaacttctccaccacccggcagcctgtgctgccctcgtggaggatgctctcggctaactgctctctggtaaacatgttgaggaaagtctgtatgatttgctcagtgaaaggcacacccatctgtactctaaggcctcgaaacagagtgaggaagaagctcagcatctcatcagtcacatctgactgatggataaaagctggaaagagggccagggagacctgaacagattcctgcagcgac

SEQ ID NO: 2092 - DNA, 3304 bp, Homo sapiens
ggagctccaccgcggtggcggccgctctagaactagtggatcccccgggctgcaggaattcggcacgagcaaagggggaaaaaatggccattatgttgcaagcctgagtacatcttacctggatgccatgcccttcgtagcctggttttgtttttgtgtctttagcaccattcactttagtattttggcctcccggaaagaaaaccagccttctagacttgccagattgaaatgacacagtgatctgcccatcaactttttatcatttcccttcactttaattgggtcacaacacaaatgacttagaaaatgtgagcgcactagattataagaagccttagcagacagtgtctgaggattaaagttgcttttctgctawgtttcaggtggttaatggaatgaagggttgcctgtcctgtagctatatcgagaagtttactgactttcttcggctctttgtgagtgttcacctaagaagaatcgagtcttactcccagttccctgtggtggagtttttgacacttttgttcaagtacacatttcatcagcctactcatgaaggttacttctcttgtttggatatctggacgctgtttttggactatctgacaagtaaaattaaaagtcgtcttggagacaaggaagcagttctcaacaggtacgaagatgccctggtgctcctgctcacagaggtgttgaatcgaatccagttcagatacaaccaagcccagctggaggagttggatgatgagactctggatgacgatcagcagacggagtggcagcggtacttacggcagagcttggaggtggtggccaaagtgatggagctcctgcccacgcacgccttctccacactgttccctgttcttcaggacaatttagaagtttatttgggattacaacagtttatagtcacttcagggtcaggacacaggttgaacatcacggcggagaacgactgccggcggctgcactgctccctgagagacttgagctccctgctgcaggccgtgggccgcctggccgagtactttatcggggatgtgtttgctgcacggttcaatgatgccctcacagtcgtggaaaggttggtcaaagtcactctgtacggatctcagataaaattgtacaacattgaaactgctgtgccatcagtattgaaacctgacctcattgatgtgcatgctcagtccctggctgcgctgcaggcttactctcactggttagcacagtattgcagtgaagttcaccggcagaacacgcagcagttcgtgacactcatctctactaccatggatgcaatcacacctctaatcagcaccaaggtccaagacaagctgctgctatctgcgtgccacttactggtctcactggccaccaccgtgcggcccgtctttctgatcagcatccctgcagtgcagaaagtattcaacagaatcactgatgcctctgccctgcgacttgtcgataaggcccaggtgttggtgtgccgagccctctctaacatcttgctgcttccgtggccaaaccttccagagaatgagcagcagtggcccgtgcgctccatcaaccacgccagcctcatctctgcactctcccgggactatcgcaacctgaagcccagtgctgttgccccacagagaaagatgccactggatgacaccaaactgattatccaccagacactcagcgtcttagaagatattgtggagaatatctcgggggagtccaccaagtctcgacagatttgctaccagtcgctgcaggaatctgttcaggtctccctggccctctttccagcttttatccatcagtcagatgtgactgatgagatgctgagcttcttcctcactctgtttcgaggccttagagtacagatgggtgtgcctttcactgagcaaatcatacagactttcctcaacatgtttaccagagagcagttagccgagagcatcctccacgagggcagcacaggctgccgggtggtggagaagtttctgaagatcctgcaggtggtggtccaggagccaggccaggtgttcaagcccttcctccccagcatcatcgccctgtgcatggagcaagtgtatcccatcattgccgagcgtccctcccctgatgtgaaggccgagctgtttgagctccttttccggacgctccatcacaactggaggtacttcttcaagtccaccgtgctggccagtgtccagagggggatcgctgaggagcagatggagaatgagccccagttcagtgccatcatgcaggctttcggacagtcctttctccagcccgacatccacctttttaaacaaaatctcttctacttggagactctcaacaccaagcagaagctgtaccacaagaagatcttccggactgccatgctgttccagtttgtgaacgtgctgctccaggtcctggtccacaagtcccatgatcttctgcaggaggagattggcatcgccatctacaacatggcctcagtcgactttgatggcttctttgccgccttcctcccagagttcctgaccagctgtgatggtgtggatgccaaccagaaaagtgtgctggggcggaatttcaagatggatcgggacctgccctcattcacccagaatgtgcacaggctggtcaacgacctgcgctactacagactctgcaacgacagcctgccccctggcactgtgaagctctaggcctgctactgcctggggacacggacttctgctgctgccacctgcgccagccctaccttccaccacagatgtctcccagatgggccttggtcacactccttggcttctcccaccgcaagcaacgctgcctgcctctgccgctcctccacatcttgccgctgcccagcagagctggcttctgggtccacctgagcactggacggtgctcccagggcgttggagcaggcggaggggtgtgtggccaggtactaggaggcaccaggaaatcccgcggggtggcccatgcagaccaggcgcacgtggctcatggggcagaattgccaaggacagctcacgacagtgccaccttctcaccattccagccaaggagagatgtgacgttggaactgctctggcacttctgtcaagcctcccccgccccaattgccttgagatctctgctctttgtcagagatttgcaaagactcacgtttttgttgttttctcatcattccattgtgatactaagaaactaagaagcttaatgaaaagaaataaaatgcctatgttgttgttctagaaaaaaaaaaaaagtcgagcggccaagaatttagtagtagtag

SEQ ID NO: 2093 - DNA, 3303 bp, Homo sapiens
ggagctccaccgcggtggcggccgctctagaactagtggatcccccgggctgcaggaattcggcacgagcaaagggggaaaaaatggccattatgttgcaagcctgagtacatcttacctggatgccatgcccttcgtagcctggttttgtttttgtgtctttagcaccattcactttagtattttggcctcccggaaagaaaaccagccttctagacttgccagattgaaatgacacagtgatctgcccatcaactttttatcatttcccttcactttaattgggtcacaacacaaatgacttagaaaatgtgagcgcactagattataagaagccttagcagacagtgtctgaggattaaagttgcttttctgctawgtttcaggtggttaatggaatgaagggttgcctgtcctgtagctatatcgagaagtttactgactttcttcggctctttgtgagtgttcacctaagaagaatcgagtcttactcccagttccctgtggtggagtttttgacacttttgttcaagtacacatttcatcagcctactcatgaaggttacttctcttgtttggatatctggacgctgtttttggactatctgacaagtaaaattaaaagtcgtcttggagacaaggaagcagttctcaacaggtacgaagatgccctggtgctcctgctcacagaggtgttgaatcgaatccagttcagatacaaccaagcccagctggaggagttggatgatgagactctggatgacgatcagcagacggagtggcagcggtacttacggcagagcttggaggtggtggccaaagtgatggagctcctgcccacgcacgccttctccacactgttccctgttcttcaggacaatttagaagtttatttgggattacaacagtttatagtcacttcagggtcaggacacaggttgaacatcacggcggagaacgactgccggcggctgcactgctccctgagagacttgagctccctgctgcaggccgtgggccgcctggccgagtactttatcggggatgtgtttgctgcacggttcaatgatgccctcacagtcgtggaaaggttggtcaaagtcactctgtacggatctcagataaaattgtacaacattgaaactgctgtgccatcagtattgaaacctgacctcattgatgtgcatgctcagtccctggctgcgctgcaggcttactctcactggttagcacagtattgcagtgaagttcaccggcagaacacgcagcagttcgtgacactcatctctactaccatggatgcaatcacacctctaatcagcaccaaggtccaagacaagctgctgctatctgcgtgccacttactggtctcactggccaccaccgtgcggcccgtctttctgatcagcatccctgcagtgcagaaagtattcaacagaatcactgatgcctctgccctgcgacttgtcgataaggcccaggtgttggtgtgccgagccctctctaacatcttgctgcttccgtggccaaaccttccagagaatgagcagcagtggcccgtgcgctccatcaaccaygccagcctcatctctgcactctcccgggactatcgcaacctgaagcccagtgctgttgccccacagagaaagatgccactggatgacaccaaactgattatccaccagacactcagcgtcttagaagatattgtggagaatatctcgggggagtccaccaagtctcgacagatttgctaccagtcgctgcaggaatctgttcaggtctccctggccctctttccagcttttatccatcagtcagatgtgactgatgagatgctgagcttcttcctcactctgtttcgaggccttagagtacagatgggtgtgcctttcactgagcaaatcatacagactttcctcaacatgtttaccagagagcagttagccgagagcatcctccacgagggcagcacaggctgccgggtggtggagaagtttctgaagatcctgcaggtggtggtccaggagccaggccaggtgttcaagcccttcctccccagcatcatcgccctgtgcatggagcaagtgtatcccatcattgccgagcgtccctcccctgatgtgaaggccgagctgtttgagctccttttccggacgctccatcacaactggaggtacttcttcaagtccaccgtgctggccagtgtccagagggggatcgctgaggagcagatggagaatgagccccagttcagtgccatcatgcaggctttcggacagtcctttctccagcccgacatccacctttttaaacaaaatctcttctacttggagactctcaacaccaagcagaagctgtaccacaagaagatcttccggactgccatgctgttccagtttgtgaacgtgctgctccaggtcctggtccacaagtcccatgatcttctgcaggaggagattggcatcgccatctacaacatggcctcagtcgactttgatggcttctttgccgccttcctcccagagttcctgaccagctgtgatggtgtggatgccaaccagaaaagtgtgctggggcggaatttcaagatggatcgggacctgccctcattcacccagaatgtgcacaggctggtcaacgacctgcgctactacagactctgcaacgacagcctgccccctggcactgtgaagctctaggcctgctactgcctggggacacggacttctgctgctgccacctgcgccagcctaccttccaccacagatgtctcccagatgggccttggtcacactccttggcttctcccaccgcaagcaacgctgcctgcctctgccgctcctccacatcttgccgctgcccagcagagctggcttctgggtccacctgagcactggacggtgctcccagggcgttggagcaggcggaggggtgtgtggccaggtactaggaggcaccaggaaatcccgcggggtggcccatgcagaccaggcgcacgtggctcatggggcagaattgccaaggacagctcacgacagtgccaccttctcaccattccagccaaggagagatgtgacgttggaactgctctggcacttctgtcaagcctcccccgccccaattgccttgagatctctgctctttgtcagagatttgcaaagactcacgtttttgttgttttctcatcattccattgtgatactaagaaactaagaagcttaatgaaaagaaataaaatgcctatgttgttgttctagaaaaaaaaaaaaagtcgagcggccaagaatttagtagtagtag

SEQ ID NO: 2094 - DNA, 3304 bp, Homo sapiens
ggagctccaccgcggtggcggccgctctagaactagtggatcccccgggctgcaggaattcggcacgagcaaagggggaaaaaatggccattatgttgcaagcctgagtacatcttacctggatgccatgcccttcgtagcctggttttgtttttgtgtctttagcaccattcactttagtattttggcctcccggaaagaaaaccagccttctagacttgccagattgaaatgacacagtgatctgcccatcaactttttatcatttcccttcactttaattgggtcacaacacaaatgacttagaaaatgtgagcgcactagattataagaagccttagcagacagtgtctgaggattaaagttgcttttctgctawgtttcaggtggttaatggaatgaagggttgcctgtcctgtagctatatcgagaagtttactgactttcttcggctctttgtgagtgttcacctaagaagaatcgagtcttactcccagttccctgtggtggagtttttgacacttttgttcaagtacacatttcatcagcctactcatgaaggttacttctcttgtttggatatctggacgctgtttttggactatctgacaagtaaaattaaaagtcgtcttggagacaaggaagcagttctcaacaggtacgaagatgccctggtgctcctgctcacagaggtgttgaatcgaatccagttcagatacaaccaagcccagctggaggagttggatgatgagactctggatgacgatcagcagacggagtggcagcggtacttacggcagagcttggaggtggtggccaaagtgatggagctcctgcccacgcacgccttctccacactgttccctgttcttcaggacaatttagaagtttatttgggattacaacagtttatagtcacttcagggtcaggacacaggttgaacatcacggcggagaacgactgccggcggctgcactgctccctgagagacttgagctccctgctgcaggccgtgggccgcctggccgagtactttatcggggatgtgtttgctgcacggttcaatgatgccctcacagtcgtggaaaggttggtcaaagtcactctgtacggatctcagataaaattgtacaacattgaaactgctgtgccatcagtattgaaacctgacctcattgatgtgcatgctcagtccctggctgcgctgcaggcttactctcactggttagcacagtattgcagtgaagttcaccggcagaacacgcagcagttcgtgacactcatctctactaccatggatgcaatcacacctctaatcagcaccaaggtccaagacaagctgctgctatctgcgtgccacttactggtctcactggccaccaccgtgcggcccgtctttctgatcagcatccctgcagtgcagaaagtattcaacagaatcactgatgcctctgccctgcgacttgtcgataaggcccaggtgttggtgtgccgagccctctctaacatcttgctgcttccgtggccaaaccttccagagaatgagcagcagtggcccgtgcgctccatcaaccaygccagcctcatctctgcactctcccgggactatcgcaacctgaagcccagtgctgttgccccacagagaaagatgccactggatgacaccaaactgattatccaccagacactcagcgtcttagaagatattgtggagaatatctcgggggagtccaccaagtctcgacagatttgctaccagtcgctgcaggaatctgttcaggtctccctggccctctttccagcttttatccatcagtcagatgtgactgatgagatgctgagcttcttcctcactctgtttcgaggccttagagtacagatgggtgtgcctttcactgagcaaatcatacagactttcctcaacatgtttaccagagagcagttagccgagagcatcctccacgagggcagcacaggctgccgggtggtggagaagtttctgaagatcctgcaggtggtggtccaggagccaggccaggtgttcaagcccttcctccccagcatcatcgccctgtgcatggagcaagtgtatcccatcattgccgagcgtccctcccctgatgtgaaggccgagctgtttgagctccttttccggacgctccatcacaactggaggtacttcttcaagtccaccgtgctggccagtgtccagagggggatcgctgaggagcagatggagaatgagccccagttcagtgccatcatgcaggctttcggacagtcctttctccagcccgacatccacctttttaaacaaaatctcttctacttggagactctcaacaccaagcagaagctgtaccacaagaagatcttccggactgccatgctgttccagtttgtgaacgtgctgctccaggtcctggtccacaagtcccatgatcttctgcaggaggagattggcatcgccatctacaacatggcctcagtcgactttgatggcttctttgccgccttcctcccagagttcctgaccagctgtgatggtgtggatgccaaccagaaaagtgtgctggggcggaatttcaagatggatcgggacctgccctcattcacccagaatgtgcacaggctggtcaacgacctgcgctactacagactctgcaacgacagcctgccccctggcactgtgaagctctaggcctgctactgcctggggacacggacttctgctgctgccacctgcgccagccctaccttccaccacagatgtctcccagatgggccttggtcacactccttggcttctcccaccgcaagcaacgctgcctgcctctgccgctcctccacatcttgccgctgcccagcagagctggcttctgggtccacctgagcactggacggtgctcccagggcgttggagcaggcggaggggtgtgtggccaggtactaggaggcaccaggaaatcccgcggggtggcccatgcagaccaggcgcacgtggctcatggggcagaattgccaaggacagctcacgacagtgccaccttctcaccattccagccaaggagagatgtgacgttggaactgctctggcacttctgtcaagcctcccccgccccaattgccttgagatctctgctctttgtcagagatttgcaaagactcacgtttttgttgttttctcatcattccattgtgatactaagaaactaagaagcttaatgaaaagaaataaaatgcctatgttgttgttctagaaaaaaaaaaaaagtcgagcggccaagaatttagtagtagtag

SEQ ID NO: 2095 - DNA, 815 bp, Homo sapiens
ggcacgagaacagccctctggggcaagagcatacctgtgatcataacaggaaggaaaaagctgggaagaaaagaaagaaggcagccaatgaagagatattcagaatgattgttgtcctcgccactccatggaaattgctcttttcaaagcatcagtgacttctgtcttgccaaatccaaatgtcgtatcttttacgacttttagcaacattcaaaccaggtgattactatgcctttattgcaactttttttattctattatttccttccttcctaccttccttcccttcctcctgagacacacaccttcctgttttttcccctaaccataccaggcattttttccagaaccactttcctggaggttcttctgctcctgattctaaaatttgcagtgccttggctcttctccttctaaacacactctttagcaggtcctgtctatttgtttccaaggctgtaaattcctcctgtccattcatgacttccaagtttataaccccagccctgacttctctgtgctcaagcctatgcgtgcacacacgcgcacgcacgtgtgtgtgtgtgtgtgtgtgtgtatgttactgcatagttgagctttctagtgcaatgtcaaacaggcagctcaaactttatatgtgtaaactagaatcattgttttttgaatcaagactgcttcctctccaactgttcctaccccaaccatcattccccctaaataaaaaaaaaaaaaaaaaaaaaaaaaaaaaaaaaaaaaaaaaaaaaaaaaaaaaaaaaaaaaaaaaaaaaaaaaaaaaaaaaaaaaaaaaaaaaaaa

SEQ ID NO: 2096 - DNA, 1433 bp, Homo sapiens
ggcacgaggcaaaatcttacatgtttaacaacatataattttttgtatctgaatttagaataaatcattttaatgcatcttaaatcacgtcacctaatcataatagttgtggtaactaatcattagtgcagagcatgcagataaaaaatatttgaatttttttttcttggaagtacatgtagttatgagtaggttaagagaatatctaattttcctactctttttttcatctttagcatttaatgttgaaacaccattcacgtcacattaaggacccactgaaaatgtattgttttaatgcataattgacttacctaattaaacatacacacaaatttaattattttttttctcttaacctgatcacgacacagctcttaatcattgtcactttcagtatatcatagtagttagtagtagattgccttgatggcagtaattctgtagtaatttctattcaatcaaacctaagagagctttgatcttactgtaaaggtacaaacaaatctcttatataattcctagcttttttttttgtttatgattctgatcaactataagacacaatgtaaagaattgtggcttataatttatctgaaatttattagcttagtttagtttgggcaggagttacaaacttaataggaattgtcattttacttacagtttatttcctgattagttgttaatttttttcccctcagttatctttattcagtcttattggtcaaaacaaagaaacaaatagtccatcaactaaaataagctgtaatgaatttagaagatgaatgcatatattagatttccatttaaatcacttctgttataaatcatataaagaactttaaacttgttttatctaatactgagcactgtttttttgtcaagtattttttaagaccacataattctttttgtctgctcaaggaaaggatagataaataattggcacacatttgtttctcactgaattttacagtagtaaattaatgttataatgtaccacatggagatgagttggtaagaaatcatctagttctagagcccagagattataaacagtaggtgaaatagatttatgacttacgaaatatgttgtgacaatatatttaaatgcatttttatattacttgcatattctcacattgatttgtgcaatagttcagttttaaaaaaaatcttcctatgcatcatgtattttatttttatttattttcacaagtatttgacagtatggtagaataaaagatgattgtaagattaaaaatgtaaaaattgcttatgtattattctgaattgtgttaggttgaaaaagatgattgtggtgactattatttcttgtccactatttgttttttgttttttcaccaataatgtcttcatatttgaacctattcaataaagacatgaagcataaaaaaaaaaaaaaaaaa

SEQ ID NO: 2097 - DNA, 1862 bp, Homo sapiens
ggcacgagctcgtgccgcttgatgaaacctgatcccaatttgatatggattataattatgatggttctcacccagttgggtgcattttacatagtaaaagacttggactggaaatgggtcatatttggggcctatgcgtttggcagttgcattaaccactcaatgactctggctattcatgagattgcccacaatgctgcctttggcaactgcaaagcaatgtggaatcgctggtttggaatgtttgctaatcttcctattgggattccatattcaatttcctttaagaggtatcacatggatcatcatcggtaccttggagctgatggcgtcgatgtagatattcctaccgattttgagggctggttctctgtaccgctttcagaaagtttatatgggttattcttcagcctctcttttatgcctttcgacctctgttcatcaaccccaaaccaattacgtatctggaagttatcaataccgtggcacaggtcacttttgacattttaatttattactttttgggaattaaatccttagtctacatgttggcagcatctttacttggcctgggtttgcacccaatttctggacattttatagctgagcattacatgttcttaaagggtcatgaaacttactcatattatgggcctctgaatttacttaccttcaatgtgggttatcataatgaacatcatgatttccccaacattcctggaaaaagtcttccactggtgaggaaaatagcagctgaatactatgacaacctccctcactacaattcctggataaaagtactgtatgattttgtgatggatgatacaataagtccctactcaagaatgaagaggcaccaaaaaggagagatggtgctggagtaaatatcattagtgccaaagggattcttctccaaaactttagatgataaaatggaatttttgcattattaaacttgagaccagtgatgctcagaagctcccctggcacaatttcagagtaagagctcggtgataccaagaagtgaatctggcttttaaacagtcagcctgactctgtactgctcagtttcactcacaggaaacttgtgacttgtgtattatcgtcattgaggatgtttcactcatgtctgtcattttataagcatatcatttaaaaagcttctaaaaagctatttcgccaggcacggtggctcatgcctataatcccagcactttgggaggccaaggtgggtggatcacctgaggtcaggagttcgagaccagcctggccaacacggtgaaaccccatctctactaaaaatgcaaaaattagccgggcgtggcggcacatgcctgtaatcccagctacatgggaggctgaggtgggagaattgcttgaacccaggaggcggaggcagaggctgcagtgacccaagattgtgccactgcactccaccctgggcaacagagcaagaccccatctcaaaaataaataaatatatataaaaaataaaaagctatttctagtttatttcactataaagttttgctttattaaaaagctaataaacagctattaatcacagtgtattagtatttgttacatttttgtatttcactatctttatactatataatatggttacttgggtaccgggggaactttaaaatttcatctcaaaaataatttttaaaaagcctgaggtatgatatagcataaaagattgagatgaaaatatatttccctgtaagctgaattactcatttaaaaattttaacttctatatgggacccgaattagacactgctgaatcctgtacagccttactcataaataaagtacttactgaatttccaccattcaaaaaaaaaaaaaaaaaa

SEQ ID NO: 2098 - DNA, 1201 bp, Homo sapiens
ggcacgaggttttgccatgctgcccaggctggtctcaactcctcagctcaagcaatctgcctgcgtgagcctcccaaagtggtggaattacaggcgtgggccactgcgcctggcccagacagacattttctgaaacacaactggcaatgagctgtttttacattttgaaagtgattcttcacttcctagttcttaattatagtatacctattaagatctgtaagatcctgaagacataagatcatgaagccatataagaatgaggattgaaagttgagcaaaattttcgggattttgggaaacattcttagctgtgctatctgcctaaaattattccttattacttctctcctttgacagacttcaagttttcttcatagccctttcaaagttttttgagccatccagagtaaaatcatttctaaatgatagttctgtatatctccaactcgtcttaagtgtatttgcctgtgtgcaacgtattgctagactatgaactcctcagcatggctgctggataacttaattgtcctgagttaatagccttcaaaggacaaatcggtttctttgcagatagcttcgtaaaacttcacatggagtttattttatcatatttcccttttttatttctgctcctcctttaattgcccatcttgcttcagagactgacatttcagggtggatattaattaaagcattaattttgttttttggtatatttctatccctagtatttctatcttactgctaaaatacaggaaaagtgccgtatttttaatgcatttagtggttttctttggtgttatctgttccatttttctttttcatacattgaagtgtgtctccttttcaaccaaaataatgaaatagtggagaccatgaaattgttgtgcctggctaattggcaaattaatttaccaatataataagtgtagcgccttgtttgaataccctttttgagaaggtatgatgagaatgggcaagggtgtcagcatctcttcttcttaataattaattgttttcagttttggttcacgaagaatgcttagttaatctgtaatgttgcctagagctgtatttatctgtttttatttatactagtgtagtaaagctgcatatcattacagtaaaaacgactactgtgatgagttaatcagaaaatctattaaaatctatatgacaaaaaaaaaaaaaaaaaaaa

SEQ ID NO: 2099 - DNA, 1969 bp, Homo sapiens
gtaattaacatgttctgaaggttacaattgatatttgaaattgactgtagagcatttagttgaagagttaagcattcagttccattaggttttcacatgtgttaatctcatttacagcattgaattgcggcagtaacattttcctttctgtgaagttctaaatttagttatgacctatttagcaatgcctttgaaaagggatattgtatccatggtaaattaattgtatacctaaacagagatagctcatctttgcctatcaggcttgtaattgacatctagtagacttctgcacatgtaaaattgaattcaaataaaatcatacacactttctagttcttaatatttgtctttctgaataatagtttaaagcaatatttgttaaagttttcttgcactatcacaattgctttttagttatttctcaagaagcatgttcggcacgaggagacaaaatctgtgtaacaggagggagaatagcgccaagtctctgggctattttttatttttgcaaatgtgctttctaatagccattgccttccatgttgtttacctaatcagcatatttttgtctgaatacttgaacattttaacagtaacgcaggtgtagaatcagaaaggaaacttatgcagagtaatattttggttcagttttaacatcgtgacaatgagggctttttctagcaatgatttttaaattgtgtaagtttgacagtattttattgttgggtttttatttgattttagttgtgtgcttttcatttgcagaagttagtaactgcagctcacctactgcaccaaagttctcgattttaggagcccagctttagtcatttgaacatgcttctaaataaaataaaacaaaaccaaaactatacttttgatctataataagagctcaataactttgtcaaggaaagctctaatatatgcagtgatggtttatgaaagggtgtggcaattttaaatttatattgtgtgtgatgttcaaataaagtggtatctacattcatgtgatttatgggtcagcatgaccattaattactgagtagaaattgactaaactttgatttcctttttttaaatcgtgttgcatttgattcctgagcaaattccctcaaagtgaactcttgttcttaaattttgaattttatggtgagattgtaaagatagaggcaattgaaacattgttccttatttatgaactgcttgaagtgaatacttaatttaagtttgcactttaataccaaacttaaaaccaaacactcatttaaaagtaggttaagtgatcatggatcattgttattagctttgtggctttgtgaaattctaaaggaatcaaataattcatcatgatttaaattttctagagattttgatttttttataatgtttctttcctgtagattgtgttcttgtttctctctctctctctctctctctctctctctctctctctctctctcaaaattacagtgttcattgtcattgacctcagcagcaaatttgacttgaattcacttaggatcgcaggaatcaggggaaagtgattttaaaggtggtttctccagcacattttaagaaaagggaccaaaagttattttagcttcctcaatagattgcatgttgcttattaggataataaattaatattaaatgcaatatatgtcttgtctttattatggcatctatttaggagttgttcaaatcactgcagtagggctctgcaaataaaataatgtaacctattatcatggatctaatgtactgtaactttatcagtgaaaggtaaaatctcaaataacaagtacaaacattgaacaattacctataaagatttgtaaaagtaaaatttttccaatagatttcattcttgtcattttgtaagacgaccctgcagtccacctgtttgtaacttttttaataaaatagacatctgtattactgaaaaaaaaaaaaaaaaaaaaaa

SEQ ID NO: 2100 - DNA, 1166 bp, Homo sapiens
ggttttcaactcaatgtctccgagataagagcaggacccggacagtaggaatccacaggctgtgtccctaccatgtaaccagcgaccctgtctccacaagtctgccttttactatgccttgtatgcactgcctcctctctagttgcattctctctgcctgcttcagcccttgcatatctattccctgggctcctccagtggttcctgtgtagtctgtgcctccaacccagtggtttctaaccagagaactattttgctccccaggggaaattcagcagtatctggagacatttttggttgtcaagaccagtggggtccttctggcatctactggatagaagccatggaagctactaaacatcctacaatgcacaggaatcccacaaaaagaactgtctagctcaagaggtcggtggctctgaggttgaaaaactstgctccagccatatctgcctctaatccattctctacacatcaccagagtgatacaaaatacaactcccatgccattgatatcatttcccatacctgaaatccctcaatgcctcctagctgctctcaggttaaagtctaaattctcctgcaaatcacacgaggcccataatctggccctctcctacctttctacctcaccttcaccatcccccagaaccctcttccctgaaaccacactcacacctcatgcaggtgaaacagaccactccgttaccaactcttcctgtccatctctcccatttattccttagcccactgattttatgtcagacactccaatgggactaaaaaggaacaaatgccctcaaggcagctcaaggcactgatatccagtagggcacacagaaaagtgggcacacaattcaatcagcagaggcagaactttgtcatcgcctctgtgatcccactgccatctccccagtggactgtgatcctccagaagagagagcatcttcatgtcttcatctttatagtccacaggaacttggacatggtaagtgtggtctacagggtgtacaacttgtatttgtcacaattgttgcattaaggaatgaatgaattcccagcctctttaagtttggctctagcacagaaataaaaagaaatgaaacattaaaatatagagatgaaacaaaattcttcatagtgcatgcactcaaaagcccagaaac

SEQ ID NO: 2101 - DNA, 1144 bp, Homo sapiens
ggcacgaggttacctgcagcagttggagagtgaaatagatgaactttacatccaatatatcaagcacaatgatagcaaaaatatcttccatgcagctcgtaccccagccacactgtttgtagtcatctttatcacatatgtgattgctggtgtgactggattcattggtttggacatcatagctagcctatgcaatatgataatgggactgacccttatcaccctgtgcacttgggcatatatccggtactctggagaataccgagagctgggagctgtaatagaccaggtggctgcagctctgtgggaccaggctttgtacaagctttacagtgcagcagcaacccacagacatctgtatcatcaagctttccctacaccaaagtcggaatctactgaacaatcagaaaagaaaaaaatgtaatgcaaattttaagaaatacaggtgcatgaccaattgtcaattaaatattcagttttatgtctccatgcaaacattcaaagtgcttccatcagaacggataaaatactaaacacctctgaagactgcaaactggattagttcttttacttcagtgtttaataagcagatgtatgtatgcatggttatactattttgttaacatgtacaatttcctgatttttcttcaaaaatgctgttataaagtatttgtctatttatgataacagtacacgtgttctgcttgaatttactaaattctactactgggttataattaaatcatgtgatattccacgtttggatatgctcatttaatttctacagaaaaaattttaaattatttcacattagccatttgttaaaacacagcatcataactcagcaggctggatttaatctgtatcatcttatatatatcacaatcttatttttaagcacattttagagttccttagttgctttatcaaaaaccagatattgcttttacatggtttaatagaatataaacctcttgataaaaaatgcacaaaaaatcactttgtatatgtgagtttcactgcattgtatattttttcatttggtacacaaagaatgtattcttcataggtttattcttttaatatgtgaactattattaaagtttactctggttcctaagattaaaaaaaaaaaaaaaaaaaa

SEQ ID NO: 2102 - DNA, 1930 bp, Homo sapiens
  SITE (9): n equals a,t,g, or c
  SITE (1922): n equals a,t,g, or c
aattgagtntgtggcatttgctgtgtttttcagcaaaacttcatcccaaatcagacatcttaaggcaccaataatttgcaaagttaaacctcctccacaaatttcacccagcaaatcgatgggcggagaattttgtgtggctgctatcttcggaacatccaggtcatggtttgcaaataatgcaggtctgaaaagagaaaaagatcagtccaaacaagttgtagttgagtccctgtacattatcagttgctatggcaccttagtggaacacatgatggagccgcgacccctcagcactgcacccaagattagtgacgacacaccactggaaatgatgacatcgcctcgagccagctggactctggttagaacccctcaatggaatgaattgcagccaccgtttaatgcaaaccaccctctgctcctcgctgcagatgcagtacagtattatcagttcctgcttgctggcctggttccccctggaagtcctgggcccattactcgacatgggtcttacgacagtttagcttctgaccatagtggacaggaagatgaagaatggctttcccaggttgaaattgtaacacacactggaccccatagacgtctgtggatgggtccacagttccagttcaaaaccatccatccctcaggccaaaccacagttatctcatccagttcatctgtgttgcagtctcatggtccgagtgacacgccacagcctcttttggattttgatacagatgatcttgatctcaacagtctcaggatccagccagtccgctctgaccccgtcagcatgccagggtcatcccgtccagtctctgatcgaaggggagtttccacagtgattgatgctgcctcaggtacctttgacaggagcgtgaccctgctggaggtgtgcgggagctggcctgagggcttcgggctgcggcacatgtcctccatggagcacacggaggagggcctccgggagcgacttgccgacgccatggccgagtcacctagccgggacgtcgtgggatccggaacagaacttcagcgagagggaagcatcgagactctgagtaacagctcaggctccaccagcggcagcataccaagaaactttgatggctaccgatctccgctgcccaccaatgagagccagcccctcagcctcttcccgactggcttcccgtaggtaccagcaacctgcttctgactggccagccccctcccctgctggaggaggggagaagccccgctctggtcctacccttcagtctctgctcttccttcatcaaccaccttccccaagcttagtgacagcagccgcccatcctacctggatggagaagagacccttctccaagcacctcagcgcacttgccctctgccacacctgtcggtggaggctgtggccaggagagactgtagaagctcggtccctgtgtatgtttgcatatgacatcctgcattggatccgcttttgtattttttaaccatacccacggtggggcgggtggggggagcctggaacagtgaccagatctgggggcctgagtggggacagagttgatcgtccacctggccattttgaccctgagtggacagtcacagcctcagctcatgtctggctgtgacacacactgcccccagcttcccttggtcagccccactccagcacggggtgaacggaggcccagagtactagggaaggaggaagggaggacatgcctcttcttcctcctttctttccccatctgttcctgggaagagtttgtctttcttatctttaagcccctttaccctggtcctgtactgatcagtgaaggaaaccgtggttactgaggccctgttgaaaagtgcacgtcttgtccaataaatcacgctgcagttggtgtccaaaaaaaaaaaaaaaaaaaaaaaaaaaaaacccngggggggg

SEQ ID NO: 2103 - DNA, 1753 bp, Homo sapiens
  SITE (909): n equals a,t,g, or c
  SITE (1063): n equals a,t,g, or c
  SITE (1151): n equals a,t,g, or c
ggcacgagtttttattcataggagaaatatatgtgtgcacatctacccacacagatactgttttagtttcactgggacatttgcccaaaggcagaagacagattgctgttgcagagttgtagattattattatatttagcaagatagccagctaaatcctaacttactccactgggtgactccctgggatgttattttctctatctctgaagttatttgagcaaggaaagcatttcttttatgctgtctatattctgttttatttggttcatatatttccttggattctttatgcatattttatggcactgactttcaagaataaagatgtagttgagaggcatgtcagagtcgatggtttgttgttaattgatagtttgattgattaatatagtaggatttttctgcttgatcctgacctaacccattggctttctttagtggacagttttacaaggacagtggcaggtgcagggaattgcccacttcagcagggctctgacatacttgatctgtttctccttccctcaggaaaagctttgccagcagaagtataatgtctcctgcataatgatcatgccccagcaccaaaggcaaggatttggacggtttctcattgatttcagtaagtgaagtactttatttactttcatgatccaggaagctgatggccgttacaggaaacagtaaaatataaaactttatttaacctgcattgttgtttttatcaatagataatgggctttctatttatatttacataggttagaacatcttcctcaagtgaaaaatgtactgctgctcagtgattgtactctaggaaattgagactagatctctcggcagcaggcctcatgcacaaagctattaccctgaatgaaccgacagaattacattccattttggggngctcatgctcattagcaccaaaagaggcaattatttgtgattaaagctaaaggaagtattatttgaaaggattttcagctctctgaaattttgcctataatcttgtacagtacaaagcagaaaaggtatatttccatttagaaaaataattttntaggcagcttatcctgggccttgctagtagaaataactcttaccttattttgttaatttcccttttctattatggaaattaatacagngtttgtatctagaggtttcccaagaaatatttatcttatatgcactcatatcttctgaaccttctcagttaaaaccggcataatatataaaagtatgcacatggataatgtttttaaaaatggtagttttttttttcctccttgtttatattatactggatgtgtaaatgttgtgttaggggtacatttggagaatcaattcaaaatatctagataacatgatgaccagataacccatgataatagtcatttctcgtcatgtaaaaatctgtcactggccgggcgtggtggcttatgcctgtaatcccagcactttgggaggccaaggcaggtgggtcacaagatcaagagatcgagaccatcctggccaacatggtgaaccccatctctactaaaaaatacaaaaattagctggatgtggtggcacacacctgtactcccagctactagggaggctgaggcaggagaatcacttgaacccgggaggtggaggttgcagtgagccgagatggtgccactgcactccagcctgggtgacagagtgagagactctgtctcaaaaaaaaaaaaaaaaaaaaaaaaaaaaaaaaaaaaaaaaaaaa

SEQ ID NO: 2104 - DNA, 1501 bp, Homo sapiens
ggcacgagcttccagcttagaccaagccaacatcttctctcatctggaccactgcattagctttccagctgatctcacagctttcagtcttgccccacccgccaacactacagccaaagcagtccttcaaaaatgtaaatcagagtatgtctgaagcttgcttgaaaactttccagtggcttctcatcacactgaggaaaaagtccaaactcctttccctggccaggaaggtcctccatggccctacatttcagcctctgatccccagcctgataactcacatgccagagttattcttgttggtccctcttcctggcacgctcctccttagcctttcacatggctggcctctctcacatagtccctcttcatattctgagaccactttctgaagttacctcatttctcacttcacttgtatttccatgaccttgttttatttttcattatagtactatggctattgaaattatatacctgtctgttcttgcctactagaatagcataaggcttcatgagaacaaggactgtgtctgtcttggttcccactatagcccagagacatactacattggacgtatatattaagtactaaataaatgttcacagaaagcatgaatttaaaaattaaggatagattatgagaaaagaaaaaagttctggagccaagacattgctttttttttttttttttttgggacagagtattatctctctgttgcccgggctggagtacagtgatgcagtcgccactcactgcacgcagcctccgcctcctgggttcaggtgattcttatgcctagaccacccgagtagctgggattatagacccacgctgccacgcccagctaatttttgtgtttttggtggtgatggggtttcgccatgttggctaggctgacggtctcaaagtcctgaccccaattgacctgcctgcctcggcctcccaaagtgctgggattatgggcctgagccaccacacccggccagcactgctttctaatagaaaaagaaacaacttggaagaaattagaagaaatgcagtatgttgaaccaaaacatagcaaaggattattagaagggcagctgatgctggataaaggaaaagatattatgcatcaaccacctcatagtgctggagcagtagtttgagggttgaaggaacagtgaggatttaactagaaatataatcttagtactcaagacctagaaaaaagagaatgatagtctgccaccagattggtttcccttaactctttaatttgtatcttcaaattctctctcacctagcctggccaacatgatgaaaccccatctctgctaaaaatacaaaaattagccgggcatggtggcgcatgcctgtaatcccagctacgtgggaggctgaggtaggagaatcgcttgaacctgggaggaggtggttgtagtgagccaagatcacaccactgcactccagcctgggtgacagagcgagactccgtctaaaaaaaaaaaaaaaaaa

SEQ ID NO: 2105 - DNA, 1450 bp, Homo sapiens
gctcaaactatgcattaattttgcgtgcatagttctaataattttaattgtctcatccagtcgaggggttgacagactagaacagaccaggctcagttcacatgctgcctatttttgtaacacttttttttgtttgttttgttttgttttgtttattttgccctacaaaaactgatttgagtagttgtgacacaactatgtgagactgtattgagactacatggcctgccaagcctaaaaaatatttacacctgaccctttacctgaaatgtttgctgacctctgaatccgagagttgaagggaatctataaaagtggctcatattaccaaactcgtagagcttgtgaagaataatgcaaatctattcatttatatattcttttccagtgtttttagaaggctcactgagcacagtacctcatattccagatccaaggattcctgaggaatccaaattagtatccmsaaggttcattggtagtcatggttataaaccagagcaaaagttaatgggaagaaatggtaaagagtyactkyattgcagctgacacctgggattttaaaatctttttttcgtttttgagatggagtcttgctctgtcgcttaggctggagttcagtggcgcgatcttggctcactgcaacctctgcctcccaggtgcaagtgtttctcctgcctcagccttccgagtatctgggattacaggcacgcgccaccacgattggctaattttttatttttatttttatttttatttttgagacggagtcttgctgtctcgccaggctggagtgcagtgacatgatttcggcccactccaacccccgcctcccaggttcaagtgattctcctgcctcagcctcccaaatagctgggactacagcgtgcgccaccacgcctgggtaatttttgtatttttagtagagatgtggtttcaccatgttggccaggatggtctcgatctcttgacctcaggtgatccgcccgctcggcctyccaaagtggtgggattacatgtatgagccaccacgcccggcccacgctcggcaaagtttttgtatttttggtagagatggggtttcaccatgttggtcaggctggtctcgaactcctgacctcgtgacccgcccaccttggcttcccagagtgttgggattacaggtgtgagccaccgtacccggccaaaatccctttagttctagtcagtagaggaataaagcactgttctttcaaatgtgaacccctcttgatcagtattgtccaatctggcctgttctttaaccagtcagcctcttttcctgcctcttgcatgggctttttgttgttgtttctttgtttgttcatctatcatctcttgctttaatcataacctaactttccctgatgtggcacgtgtaaaactgaaaaacagaaactctatctggtaaaaaaaaaaaaaaaaactcgag

SEQ ID NO: 2106 - DNA, 2329 bp, Homo sapiens
ccgggcctgcaacctgccggggcggctccgctacgcgcaccgcctcagtggcttcctccacagccacctccggaggatctggctgaggaggaagtggaggtgtcactggccccggcctttgccccaatcttgtgtgggcactgaagggggactacaggttcgagatacttcctcgcgtattgctaaaggaggagttgaccacaccaaaatgagtctacatggtgctagtgggggacatgagagatcaagagatagacgaaggtcaagtgacagatcacgagattcatctcatgaaagaacrgagtctcagctcactccttgtattagaaatgtgacttctccaacacgacagcaccatgttgaacgagaaaaagatcacagttcctctcgtccaagcagtccgcgtcctcaaaaagcatccccaaatggttccattagcagtgctgggaacagcagcagaaacagtagtcagtcaagttcagatggtagctgtaagacagctggggagatggtgtttgtatatgaaaatgcaaaagaaggagctcggaatataagaacgtcagaacgagtgacactaatagtggataacactagatttgttgtagacccatccatttttactgcacagccaaatacaatgttgggcaggatgtttggatctggccgagaacataactttacacgacccaatgagaaaggagagtatgaggtggcagagggaattggttccactgtgtttcgagcgattctggattactataaaacaggaataatccgttgtcctgatggcatatctattcctgaactgagagaagcatgtgactatctttgtatctcttttgaatatagcactattaaatgtagagatctcagtgccctaatgcatgagttatcaaatgatggtgctcgtagacaatttgaattttatctggaagaaatgatcctccctctcatggtagctagtgcccagagtggggaacgggaatgtcatatagtggtgcttacagatgatgatgtggttgattgggatgaagaatatccaccacagatgggagaagaatattcacaaattatttatagcacaaaattatatagatttttcaagtatattgaaaacagagatgtggccaagtcagttttgaaggagaggggtcttaagaagattagattgggaatagaaggttatcctacctacaaagaaaaagtaaagaaaaggcctggaggccgcccagaagtgatctacaactatgtccaaagaccctttattcgaatgtcctgggagaaggaagaaggaaagagtcggcatgtagactttcagtgtgtaaagagtaaatctatcaccaatcttgcagcagctgcagcagacattccccaggaccagctggtagtcatgcatccaactccacaagtggatgagctggatattctccctatccatcccccttctggcaacagtgacctcgatcctgatgcacagaatccaatgctgtgatgctgatcttccttgaaaccatagcatgctactcttcacagtgacgttgtactctcctcattctgcactgcaaggccactcttcttcattgtgagatgcacataacaatgtttaggatattgcagtgtaggcttttttaaagaccaaaggtagctgaatggtttttttttaaatgagtacaactctagcattttgaagttccagttgtaaatgtatttgtttaccagtaggtttgtgaaattggttctttgtatgggggatggtcctttttcacacagctaggtcttttcagaagtggtggaaattggcagctggggtactttcagtttggactgatattcatcacacctcagataaaatgcagagtaatatatagttgcactttataaatggtggttaaatggaaatgttcaagccattttatagttgtgatgcacaatataatttaagtgcttctgtcaaagtattcctccagtacaatttgtatagtttgctgcccttgatgagcaaaaagtatttatcttgggcttatctgaatgatcaggatgagatttaatgcccatatcttaccagttcagttatctccagagccatttcaccctttagagtgagtcacatgcagggagtgtgaatgtcagaggtggtttattatccagtctgccttacccttaatctgttcacagatatttatttactaatgctttttttttcttaagagttatgggataggaaaatgaagtgtttgctcttcatttactaaatgattgtaaacttgagtttttcatcaaaataaaattccattgttttaaaaaaaaaaaaaaaaaaaaaaaaactcga

SEQ ID NO: 2107 - DNA, 1593 bp, Homo sapiens
  SITE (322): n equals a,t,g, or c
  SITE (1131): n equals a,t,g, or c
gaattcggcacgagaaaacattagcctgaggaacaagctgcgtgagctctgcgtcaagcttatgttcctgcacccagtggactatgggagaaaggctgaggagctgctgtggagaaaggtatactatgaagttatccagcttatcaagactaacaaaaagcacatccacagccggagcactttggaatgtgcctacaggacgcacctggttgctggtattggcttctaccagcatctccttctctatatccagtcccactaccagctggaactgcagtgctgcatcgactggacccatgtcactgaccccctcataggtcantggaacctgaaagtggacttgagcaggttctcatgcttctacctctggccttatccctcaggkttcatgtagcttgcgacccagccaggcagagagagttctagcagaactacatacaaatggtttatgaagtttggatttatccagacaatcatatgagttagggtaaagatcttaaggaaagagagaggcctgggattgtggactaaggcagaggagggacagaaagacctagagtaggtctggcactggaaggtggtattaatacatttcttttcttctcccagttgaatttggccagcactgtttcttttgactttagagattatttcccaatgtttgatgaaagttttgaaatctttagatatgttgggaaaattgtggacagtctttcaacatagtacaagttccttttccaccagctgaggtactggcagctataattttaattccttttctagttggtaagttttctcttcagttcagccatcctttagagctccttcacccagctctctctgctctctctgtccccttcatcaccaagacagacattctgggtcagagatggaggttgtgtccttgtcaccacatggaggaattctgtgatcagaagcagagcacctgtgttttatgcatttaaaaacatctagaccgggcacggtggctcatgcctgtaatcccagcactttgagaagccgaagcaggtggatcacctgargtcaggaatttgagaacagcctagccaacatggtgaaactccatctctattaaaawtataaaaattagctgggcatggtggcgtgcanctataatcccagctactcagraggctgaggcaagagaatcgcctgaacccggcaggtggaggttgcagtgagccaagatcacgccactgcactccagcctgggtaacagagtgagactctgtctcaaaaaaaaaaaaaaaaagccaaacctctagaccaggcgtggtggctcatgcctgtaatctcagcactttgggaggccaaggcgggaggattgcttaaggccaggaattcaggaccagcctgggcaacatagtgagatcctacatcatctctacaaaaaataatttaactgggcatggtggtgcgtgcatgttgycctagctacatggaaggctgaggcaggaggatcgctgaagcccaggagttcgaggctgcagtgagccatgatttcatcgctggaactccagccggggcaatacagcaagaccttctctccaaaaaaaaaaaaaaaaaactcga

SEQ ID NO: 2108 - DNA, 1583 bp, Homo sapiens
ggcacgagccttaacaggagtatttgagaattaccttataaatgcagagaatgaacatgaaaagcatcagactttatctagacttaagatattattagaaaattcactgaacactagataaagttaagtcctaaattgtttcttaatttattcatgaattctttgagtttctgagatagaaatttggagatcttggtaatgggcagtggtatactttgggaagtaggaaggccagttgatttgtgctttgatggttgttggaggtcattccatgattggaatgtgttgattttcttgatttatttgttattacaacaaagcagttattcttggacagttgacatttcagaactaaacaatccttaaatatacttggaattacagaaatggaattacttggcacgtttgtttaataatcaacagggcagtcctgtttaattattttcacacatttgggtcacctgtaatctcccccctaatctcttctatgatcttaaatttgcatcatgcttgacatcatgaggaacattgttgctcagaaacatatcctttgtcctttaataggcagtgctagctaatcagtctggttgctgaatgaatgatccatcttctgtagggccatgttttaagcctgtgttagtcagctcaagatgccgtaacaaaatgtagactgggtggtttgaacaacagaaatctatttcctcacagtccttgaggcagaaagcccaagatggatgtcagcacagttgggttctggtgaggccctcttcttggcttccagacagccaccttctcaatgtgtgctcacatggccttttgttagcatctatgttagcagagagaccaagagcaagctctctggtgtcttttactataagggtactaatgtcatcagactaagctctgcccttatcacctaatctcctcccaaacaccccctctccaaatatcattacactggggggttaggccttcagcatatgaatttgagtgggaacacattcagtccataacaaagcctaaacagtactgagcctttaataatcagatatgatctctcttaagtttcatactagttaatgaattccagttagactaacttttgttccattagtagtagtgctttaaacctctatgtgaagtaactcattaaccaattccaagtcctaaatttcccatacccattatgaatgcgctataagttataaacattctccaggttaccagttttaaatagcaattgtgaaagactaatgcaagtataaaaacactttgtgaggctgggtgtggtggctcatgcctgtaatcccggcactttgggagaccaaggcaggcagatcacgaagtcaggagatcgagaccatcctggccaacacggtgaaaccccgtctctactaaaaaaatacaaaaattagctaggcatggtggtgcgcgcctgtggtcccagctgctcgggaggctgaggcaggagaatcgcttgaacccgggaggtggaggttgcagtgagccgagattgtgccactggactctagcctggtgacagagcgagattccatctcaaaaaaaaaaaaaaaaaaaaaaaa

SEQ ID NO: 2109 - DNA, 1434 bp, Homo sapiens
gctttgtcacacaatgtaatcttgtaatcctctgtccatctgtggccggcctgcttctctaaacgggaagactactgcttcatgctgctctattgcttgttgcctaccatctctgcctcatggtctgtcagtcattattgctcctagaccagctaagttgccccagtgtctcatttctgggtcttctgtgtgggctgttggtctgtaagcatctgtcagtatctaagcctgctgtgaggtcatccctcacaattacagaatacacttggtatacaaaaacacatgtagaggaaaagaaaattactgaagttccaaaaaacacctacaattggaccaagaattggcttatttttttttttaaagaaagagcagcttctgtatattatttacaaaggtcatcatttcattgattgcactggacagactaataattttttacccataaaattgtttagggttagtaccctgttaggacctttttgaacgtaaagaaggttttactttccatttaagacaccaggtttgaggtcaaaagataaacataagcccagagaagcaagcaattctatttcttctcatccctgttgctgagattgctgtaggtgaaatattaagtatccctggacagggcagaagtatgtaggataggaggcttgtgtgtagtgaggcttttatgaataaatcagtgaaatctgacacagaagccagggctcttcccctgatcaaatcaacaagatggccttaagtgctccgtcaactgtggacactgtggggagaggctgatcagttggatttggagccagagataagagtcaggagggccttgktcctctttacaaaggaattgacatgactaaattgaggaagtctcaccctaaggtgagatgccaaggaagatggcttgctgkcttactgtgkacccacatycaccatttcttataacttcaacccactatctagcatttgactggtctctcaaaggaactgaggcttttttawttctattataattgatagkcctattttacctagtcataaaataagtcctcaaaatatactggtwtgaawtagkaaacaaaataaaagttgtgttgacattttagatcctatttccaaaaaaagtaccattttattgkagwatgkggktatttaaaaccttaatttattgtcatttttagccaatacactattttatcaaaaagaggcagattgcagtagaagaatgaggaaaatgaaataccattcaggatttaggctgtgtcctatgctgcttctcctacacctctggacctctggtacacacacacactctctctctctctctgctataaaatgaggctcgcttttcaaaatgattatactgaaatttcagatgtcaatgaaatataattatgagtgtttgtgtatacttatgtatgtgtgtttccagagtag

SEQ ID NO: 2110 - DNA, 1710 bp, Homo sapiens
  SITE (1705): n equals a,t,g, or c
gatttatgcatatggtttattatgcacacagtctagatttatggttgacttcaattatttttctattagaggagatctgagtagcataatattttggagaaaatatgaaatgaaattttttcttgtgaaagatatagtgtatattagctttatttctgactaacctatggataactataatcaaacatgtatcaagtagtaccactgaagaagtgtttgagcttactgggaacacttatgactcagcctattaccctggcataattattaataaagagctttttgtccttcttagaagtgagccatttggggtaacaccttacactgtcatactatgtttaggtaattaatttgttcttctgaataaactctcaactcctttcttacacccaattttacacaaatttagttttaattactgctttaagagctctctgaaaccaggaattcatttctgaggcatagtaaatcctgagaccaccatgctcacacagtgctatcatgtactgtatgaactttgtaaaatagagcttaatcttattttataatttaagatgattcagtgattaccttggtccatgtcattcacctggtaagtggtgtctgcattatttaactattttaamcattcattcatttgtgaaatgttgggtaccaatgatactcatgtactgcagttgcagagatgaatamcatgtaatctaggaactcaaaaagtttagcatcattgtgtgggtgacatatgatttgaattaaagcttctgtttctttatctagcattcttaccaccatacacatcgcttctttaacttatttcaaattamcmcamcaaatactaagaattttattagctgtggtgtacatcctaggtttatgaagtaaaatatactgtttcttttctcccacggtgtattattttttatatcagaatgcatgaccctgtagtatttttgtagcacatttactagaactataaggtattatatttaatgtatatgtttttaccatatttataagctatctctttctacacaattttaacatgtgctctcacacacgtacacatctgcattttatcttccataagagaagtactgattatatatgaataataatatacaaaagtaatcataattaccacataaatgagcagtattagatttagtaataaaacattttgaattttttgttcgtaaataggtatggtactgatagtcacacatgtgtattattatctttaaacaaaaacctcttagaattcatgagatataatattttcaaattttatgttttcaagagagatatttgcctccaaaattcactcttatattgttgcgtttttaattttatcaagataaccagttgaatttaatgcatatatggtgccatttctttcagataaaattgttracatcgctttaaaaagattagaaatttgaggccaggcatggtggctcacacctgtaatcccagcactttgggaggccaaggtgggcagatcacttgaggttaggagttcgagagcagcctggccaacatggtaaaacctcgtctttactaaaaatacaaaaattaaccaagtgtgatggcacacgcttgtaatctcagctacttggaatgctgaggcagcacaatctcttgagcccaggaagtgaaggttgcagtgagccaagctccagtttgggtaacagagcaagacttcatntcgag

SEQ ID NO: 2111 - DNA, 2279 bp, Homo sapiens
  SITE (194): n equals a,t,g, or c
  SITE (409): n equals a,t,g, or c
  SITE (413): n equals a,t,g, or c
  SITE (2263): n equals a,t,g, or c
acacgcagctgtacccagcctcggggcgcctttgctgatggccacgtgctagagctgctcgtrgggtaccgctttgtcactgccatcttcgtgctgccccacgagaagttccacttcctgcgcgtctacaaccagctgcgggcctcgctgcaggacctgaagactgtggtcatcgccaagacccccgggacggnaggcagcccccagggctcctttgcggatggccagcctgccgagcgcagggccagcaatgaccagcgtccccaggaggtcccagcagaggctctggccccggccccagyggaagtcccagctccagcccctgcagcagcctcagcctcaggcccagcgaagactccggccccagcagaggcctcaacttcagctttggtcccagaggagacgccantggnaagctccagccccacccccagccgaggcccctgcccagtacccgagtgagcacctcatccaggccacctcggaggagaatcagatcccctcgcacttgcctgcctgcccgtcgctccggcacgtcgccagcctgcggggcagcgccatcatcgagctcttccacagcagcattgctgaggttgaaaacgaggagctgaggcacctcatgtggtcctcggtggtgttctaccagaccccagggctggaggtgactgcctgcgtgctgctctccaccaaggctgtgtactttgtgctccacgacggcctccgccgctacttctcagagccactgcaggatttctggcatcagaaaaacaccgactacaacaacagccctttccacatctcccagtgcttcgtgctaaagcttagtgacctgcagtcagtcaatgtggggcttttcgaccagcatttccggctgacgggttccaccccgatgcaggtggtcacgtgcttgacgcgggacagctacctgacgcactgcttcctccagcacctcatggtcgtgctgtcctctctggaacgcacgccctcgccggagcctgttgacaaggacttctactccgagtttgggaacaagaccacagggaagatggagaactacgagctgatccactctagtcgcgtcaagtttacctaccccagtgaggaggagattggggacctgacgttcactgtggcccaaaagatggctgagccagagaaggccccagccctcagcatcctgctgtacgtgcaggccttccaggtgggcatgccaccccctgggtgctgcaggggccccctgcgccccaagacactcctgctcaccagctccgagatcttcctcctggatgaggactgtgtccactacccactgcccgagtttgccaaagagccgccgcagagagacaggtaccggctggacgatggccgccgcgtccgggacctggaccgagtgctcatgggctaccagacctacccgcaggccctcaccctcgtcttcgatgacgtgcaaggtcatgacctcatgggcagtgtcaccctggaccactttggggaggtgccaggtggcccggctagagccagccagggccgtgaagtccagtggcaggtgtttgtccccagtgctgagagcagagagaagctcatctcgctgttggctcgccagtgggaggccctgtgtggccgtgagctgcctgtcgagctcaccggctagcccaggccacagccagcctgtcgtgtccagcctgacgcctactggggcagggcagcaggcttttgtgttctctaaaaatgttttatcctccctttggtaccttaatttgactgtcctcgcagagaatgtgaacatgtgtgtgtgttgtgttaattctttctcatgttgggagtgagaatgccgggcccctcagggctgtcggtgtgctgtcagcctcccacaggtggtacagccgtgcacaccagtgtcgtgtctgctgttgtgggaccgttgttaacacgtgacactgtgggtctgactttctcttctacacgtcctttcctgaagtgtcgagtccagtcctttgttgctgttgctgttgctgttgctgttgctgttggcatcttgctgctaatcctgaggctggtagcagaatgcacattggaagctcccaccccatattgttcttcaaagtggaggtctcccctgatccagacaagtgggagagcccgtgggggcaggggacctggagctgccagcaccaagcgtgattcctgctgcctgtattctctattccaataaagcagagtttgacaccgtcaaaaaaaaaaaaaaaaaaaaaaaaaaaaattnctgcggccgtcaaggg

SEQ ID NO: 2112 - DNA, 708 bp, Homo sapiens
gaattcggcacgagccctgcgggtggtcccgggcctggccagggctcagtgctcctcttccccctcctccctgttcccacccctcatgaagcacactgcgtgtccatcccatgtacccgtgggtcgacgcacgctcttgccacgccctgagcgtgtacacatgatgtgttctatgcattcaccctgccccccagcccgccctgcagaggacaagatgggtggccccggctccctttcccctaaccgcccctgcccgctgtgcagccgtgtgcgttggcgtgtgtttctgtgtcactggcgtgtcacgtgatgtagccgtgtttgctgacatgagcccctgcccccttctctgtttctccgttggtttctagagctctctccctccccttctcagaggggactggactcctggggcctggctggggcccagagccaggccgccctctcctgttagccctcagagtcccatttctgttagccctcagagtcccatttctattggtgaccaacttgcaaatggataaaacacaggaaaatcctgccccccccttcctccctgcatgtcctgtccccagagccccccaccccaccctgggccaggtcaggccctgtgggacgggagaaatagcaaccaatccaacagcgggaaaaaaaaaaaaaaaaaaaaaaaaaaaaaaaaaaaaaaaaaaaaaaaaaaaaaaaaaaaaa

SEQ ID NO: 2113 - DNA, 1297 bp, Homo sapiens
acgcgtccgttttttcaaaatccaaaaagaaatgatgttggagaagggaagttgaacgagcatagtccaaaaagctcctggggcgtccaggccgcgccctttccccgacgcccacccaaccccaagccagcccggccgctccaccagcatcacctgcctgttaggagaagctgcatccagaggcaaacggaggcaaagctggctcaccttccgcacgcggattaatttgcatctgaaataggaaacaagtgaaagcatatgggttagatgttgccatgtgttttagatggtttcttgcaagcatgcttgtgaaaatgtgttctcggagtgtgtatgccaagagtgcacccatggtaccaatcatgaatctttgttcaggttcagtattatgtagttgttcgttggttatacaagttcttggtccctccagaaccaccccggccccctgcccgttcttgaaatgtaggcatcatgcatgtcaaacatgagatgtgtggactgtggcacttgcctgggtcacacacggaggcatcctacccttttctggggaaagacactgcctgggctgaccccggtggcggccccagcacctcagcctgcacagtgtcccccaggttccgaagaagatgctccagcaacacagcctgggccccagctcgcgggacccgaccccccgtgggctcccgtgttttgtaggagacttgccagagccgggcacattgagctgtgcaacgccgtgggctgcgtcctttggtcctgtccccgcagccctggcagggggcatgcggtcgggcaggggctggagggaggcgggggctgcccttgggccacccctcctagtttgggaggagcagatttttgcaataccaagtatagcctatggcagaaaaaatgtctgtaaatatgtttttaaaggtggattttgtttaaaaaatcttaatgaatgagtctgttgtgtgtcatgccagtgagggtcgtcagacttggctcagctcggggagccttagccgcccatgcactggggacgctccgctgccgtgccgcctgcactcctcagggcagcctcccccggctctacgggggccgcgtggtgccatccccagggggcatgaccagatgcgtcccaagatgttgatttttactgtgttttataaaatagagtgtagtttacagaaaaagactttaaaagtgatctacatgaggaactgtagatgatgtatttttttcatctttttttgttaactgatttgcaataaaaatgatactgatggtgaaaaaaaaaaaaaaaaaaaaaaaa

SEQ ID NO: 2114 - DNA, 1434 bp, Homo sapiens
gaattcggcacgagggggcgggggggacgagagtagtatctttggttctttggccctgacgctgtgttcctcttctcccagggcatcagcagcctgttcagctctctaaaagttgtccggctgctccgtcttgggcgagtggcccgtaagctggaccactacattgaatatggagctgctgtgctggtcctgctggtgtgtgtgtttgggctggctgcacactggatggcctgcatctggtacagcattggggactatgagatctttgacgaggacaccaagacaatccgcaacaacagctggctgtaccaactagcgatggacattggcaccccttaccaktttaatgggtctggctcagggaagtgggaargtggtcccagcaagaattctgtctacatctcctcgttgtatttcacaatgaccagcctcaccagtgtgggctttgggaacatcgccccatccacagacattgagaagatctttgcagtggccatcatgatgattggctgtaagtatgacagtgctggggtggggttggccatctcttctgttagctggaaacagggaaatggctacagtgccagcaggatcaggagaataataacttaaaacaaggaagagtttttttaagactaggcttacagttaccctgataattaaagcagtatatgcttactgcaaaaaaatttagaaaatacaaaagagtgcaaagtagaaagtaaagactatccataattctgcttttcagagataactactaatactgttggtgtcttctcttacagactattttctttgcatatctgaatacatatagatttttataaacttaaaatgagatcttgctgcatacgcactttagtaaactactcatagaacagtgaattatggaagtcttttcatgtcaatttttttctttttaataaaaattgtatatatttaaagtatgaaatgagattttgatatagtgaaatgattatgacagcaaagcaaattaacatatccattcctttacatcattaccttttttttggtgaaagcacttgaaatctgctctctcagcaaatttcctgtaggcattacagtattattaactatagccgtcatgctacatgtcctacatgtcaatttgaacatagctgtagcttggcatatagtctaatgtagtatgagaaaaagaatgtatgaaaaatgaatgcaaaacatctcattaattgtattttatattgattatatattgaaatggtaatatttctgatgtatcggttaagtaaaatattctcttagaattaatttaatctgtttcattttccttttaaaagtagctcctaggaaaaatttaaatttaatcatttggacggtgctggtctagataaacatttttgatgtcttgctwgatgggaaattttccaactcaaaaaaaaaactcga

SEQ ID NO: 2115 - DNA, 1501 bp, Homo sapiens
  SITE (795): n equals a,t,g, or c
  SITE (796): n equals a,t,g, or c
  SITE (823): n equals a,t,g, or c
gactaacagggactataatcttgcagcaccatgccgagctaattttattttttgtagagatgagctctcactatgtcacccaggttcgtctcaaactcctgaaccctagtaattctcctatctcagcctcccaaagtgctagggttacagacatgagccactgtgcctgtctagacttgtactttcaactgtccatttctccctgtctgtcccatgggcactcatgaaaaaacagaatgctcccaactttattcatcttccaagcctgtagctcttggtatactcactgttgcaagtcagaagcttgatttcatcattgatgtttttctcacgtttcacatctcactcatcaccaagtcatgttggtgttaatttctgattaacccttgaatttaccgtcttctcatcctctgtacaaaagcctcaagtgagggtcaaattcaacattatcctgatctagacagcccccattctcaatccacccttttccaagttgattgcccaaggacttctaacaataaactctcttttgcaccacagacttctttgaaaatatacatgctgttgaccctctctgtagaaaaccgcacacataaaacttaccaacagatttcattggttcttgggttctcccgaagcctatccatggtttatagattaagaattgatgaggtagctgggcacagtggctcacacctacgatcacagcacttcgggaggctgaagcaagcagatcacttgaggtcaggagtttgagaccagcctggccaacatggtgaaaccctgtctctactnnaaatacaaaaagtagccagccgtgatnacaggcacctgtaatcccagctactcgggaggctgaggcatgagaattgcttgagcccgggaggcggaggttgcggtgagcctggatcatgccactgcactccaacctgggcagcagagcaagactctgtctcaaaaggggaaaaaaaaaattgctgatgtgacccatgaagggaactcattttcctcgtaattttggactgccacacattggtacctttagttctctgaaggcccacgtttttatcattaagacctatttgttagctagtagagctttatgttcgctgtccatgaaaccttctgtaaccacagtgactacaagtagttctttctctattgaattattaggtccagaatagaagatgtcattgtacactttatttccctcacactgtgttatgctctgatgtgctatgcttagctatctgtcagagattagtaaattataaaactcatgtgtactacttaagtttatatcttatgctagtttataagaacaattaaaaggacttagaagattaactttggtttcatggtctctgaagtcactgactgctatttcagcttgtttacccttacctagcattaagactccatctacttctgtacagtatatgaaaatttttaaactttcatttagactggtgggatagggctgaccattacaaattgtcgt

SEQ ID NO: 2116 - DNA, 4416 bp, Homo sapiens
gaattcggcacgagggagccggcgcccggaggagcaagaggaggaggaggaggagaggtcggagccgtctccaggagcccttagagaccgagtcccggcggcgacggcggggcagcgcaccggcaggcggattcattccacttaaaacctgaaaacattggaccacacaaagtcttactgatttcaggtaaaaacaataattgaagatgtccagcaaaacagcaagcaccaacaatatagcccaggcaaggagaactgtgcagcagttaagattagaagcctccattgaaagaataaaggtttcgaaggcatcagcggacctcatgtcctactgtgaggaacatgccaggagtgaccctttgctgataggaataccaacttcagaaaaccctttcaaggataaaaaaacttgcatcatcttatagtggaatagagaaacagctcctcgcctcttcccaacaacgcaaattatgagcagctccttgaagagatttaccttcagcttatttggtaaccactgctaataactaaaatgttctcagcttggaataatggactctgaagtctctattttccaagttgtcctttctcttaaaataccctttactgatttaatacagaataacaatcttattttccacttggtaactatggctttatgttgggttactgtttaaggaaagttgatctgggcctttttaaaaacataattatatactttagaaatacaaggsattccgatatgtcaggacctaaatggcctaagcacctgtcaaattaaaattccaaaattcattgaaatcctaaagccttgatattatattctttataaggcgtgtgccagcctgtatagtatataagagagaggggtgtttgtgtgtatatatatatgcctttgtgtatacacttatcaaagctattttcttatgaaaacgtccctctctccataccatcagtttctcagttccagaagttatacctttattttgagctgtgtataggtagaataaaaaattcctttcatatcgttattgtacaaaaagtaaagagtatcctaaagattgtattcattgtaatcaagtaatgcaatcatctctcctctcttgaaatcttgctggacctcttaggctacaataaactgtaccaaactaaactgacagtccttcgataatatgaaacattaatttacaaggacccgttagggcttcaatgatgctgagtctggaaaaggggaggagacccttgggaggactccaggcagctgtgctcccagggctcatgttctctactggattagggatagtcacctctgaaatctccaccctgatgattggaatgaaacggagtgaacatgagcccagctgagagaggagcaggaatgtgtgaaaaacagctgctctccttgtcccagctttgtgattgagccctctgtcttgctctctctgccttccctgtgtctttcttctcttaccagagcatctgtttgcagaggtaacattaccttccccagccacaggtatgtggaatacggtgaggaaaaaaaaaattaaaaaaaaaatgcaagctgtcaggatgcttaagctcttttcagacatctgcagtttcatccctaccttgttcacataccatccaagaggcacataggctacccaagagagccttggattcagtggtacactccttgggcccaagggctttagcagctggatatggggttccttgattttcctctgggcccaaatatagccctcacactcttggaatttccaggtatgggggtagccccaaaaggaggaatctcctatggccaataaggtatcttgactttatcaaagtagaagagagggtcacttcggagtcaaatcatacactaggcctttgatgctttaattcttcttcagttcattaaaagtaactactaaggaaaggttaaaaacttcccctcaaaaaggaatcaaccccaggaagtaattatttacaacgattttcccaaattttgtacaatctgtcctggaaagcaaaccccttttaaaatctaatgtctgggctttgagtattagctcatttagggtggacaaatgcattactgttttcaaactgctcacatttattcagtatttctccaagttgctatctactcagccttatgaatgcccctcgcttttctaaggccatgtgaaaatcacggcactgcccttagccttgtgtcatctgctttttcgttctgcgatatgcccagttcccaaatcaattataggtacctgtttaggagagaggaagattttacctctcaaagggtgagatttgaaatttacactaaaaagacaactttacatttaatgcttcacttaatgagacattcttttttttataagtctatttttctactcagtttcagaacactaatctgattttcactctgatttttaacgtttctttaaatatttataatgtagcttctttcaaaatattttcatgaaaaattacttttattataccattatgtgcatgttattggtagcaggcatagtttattatttagtactgaaacatgctcttttacctaacagtaaacaagtatgttttgatatatatctgttaatatgcttatagtggtaagaaatggacttgaggtcccaggagatttcattttattcaccctggtcagatacaataaaggctatgagtataaatacataacttcctaaccaggtgtagggcatgttcatgaatatcaaatcttttgatgctggacccaagagaggaaaagttgtagctaaatgttgatttacttataactagacgtctatgtgagaaaatatatgtatacatatatatgatatgcagaagtcactttttttatcaggctttattctccttacaaagccacagtttaactgtctgcaacagttggtttatgttaatgatagacaaatacccagtgtttgttactttttccaactaccactgtaatgataatctttctcacgtatatacatgcaacttcttggcttcatttccatgaagctgtttcaatatattcagtatactttgtccttaatgctgcttctgttaacagtgatctctttctttttttcattcttatatcttcattagttcatcataaatctgtccagttgaggcctcaggaccacggcatgatttcatgactccgaagtattttacagaaacattttttaaataagggaaatattttatataccagatggttcacaagtgatggctcatagctagtttttttttttcttctaaaaaatgtcaggtttttaaaatcatttaccttattaaaatgaaaagtgccatacttaacttttaaaggaaagacctgacttgctttttctctatttagactgtttttgtactttactaatctttaaactatcaggaaaaaaaccaaaactttataccaatgatttagtaattttgaggcatagggtagcttacgtagtggaggatgtgccaaatattctcttcaaatgccaccttctcaatttataactaaaatagtgttatctgactaattcctctgaattttgatgtaagatctatataggcccccaaaatgatcgtagtacatgccagtcatttctcagtgaaataaatacaataccagagtacattatgggttttattgctttcttttatggtagacctgttaatggggaaaaaatacatcaaatcaaatagaatcttatatctgtatgttaaaatagagcacttacctgaagtcagtggcctggatcatagccctggatcatttcccagtctgtcctgtgctgtgtgaccttggacaaggcgcttcatctctctgggcctctatttctccatttgtaaaacaagtggctgcagtagatgatggctgagagcccttcctgttcccagatgccttggtccaaagaccccacccctctgctggtcctgccaacgtgttggtgctataagctgcttcagatataaaattggtttatctataatgtttgttcatttaatagcttctaaaaggcctttttgttatacagtgctttttttctagttttatggacttgrttactgtaataatgtcttgtttttagccatgtaactacaaacagatattctcttgatgtcttagtaaatttgcatttgatatatcattgatgagattttgttgttatgtaatattctttgstacgcatctgtccagcatcttattaaccataatactgtgatcattatttggaaatatgtcctatggaaagaataaaagcatgtacttcacagctagcatgttcacagatttgaaagaagtttcattaaaagcaccattgctttctgtactgcgtcagtgcctcattgtatcatcctacttgtgttttgctcaataaatgaataaaagaccaaaaaaaaaaaaaaaaa

SEQ ID NO: 2117 - DNA, 1287 bp, Homo sapiens
  SITE (1287): n equals a,t,g, or c
ggcacgaggcamgatggccaccaccaagcgcgtcttgtacgtgggtggactggcagaggaagtggacgacaaagttcttcatgctgcgttcattccttttggagacatcacagatattcagattcctctggattatgaaacagaaaagcaccgaggatttgcttttgttgaatttgagttggcagaggatgctgcagcagctatcgacaacatgaatgaatctgagctttttggacgtacaattcgtgtcaatttggccaaaccaatgagaattaaggaaggctcttccaggccagtttggtcagatgatgactggttgaagaagttttctgggaagacgcttgaagagaataaagaggaagaagggtcagagcctcccaaagcagagacccaggagggagagcccattgctaaaaaggcccgctcaaatcctcaggtgtacatggacatcaagattgggaacaagccggctggccgcatccagatgctcctgcgttctgatgtcgtgcccatgacagcagagaatttccgctgcctgtgcactcatgaaaagggctttggctttaagggaagcagcttccaccgcatcatcccccagttcatgtgccagggcggtgatttcacaaaccacaatggcactgggggcaagtccatctatgggaagaagttcgatgatgaaaactttatcctcaagcatacgggaccaggtctactatccatggccaactctggcccaaacaccaatggctctcagttcttcctgacatgtgacaagacagactggctggatggcaagcatgtggtgtttggagaggtcaccgaaggcctagatgtcttgcggcaaattgaggcccagggcagcaaggacgggaagccaaagcagaaggtgatcatcgccgactgtggggagtacgtgtgaggcggcactctctctgcttccccctccgctcttgaccctgcatatccaggaaggaactgccagcctcagaggaggcagcaccgagggtgcctgtttgaagcaagcagcatttgggatatgtgcccttcctcagggtctgcttggagcagctcctctgcaggcacagcctggactattcccaggcacagctgtgggcccaggagccagctcaggtgctcccctccaccatgggcaggctgtgcaaaaagcactggcttttctcagcatttgctgctgggcctctcctgggactaccagtgtggctcttacgtgttttctttgctaaaataaaccctagttcttawaaaaaaaaaaaaaaaaggcggccn

SEQ ID NO: 2118 - DNA, 1544 bp, Homo sapiens
  SITE (1534): n equals a,t,g, or c
ggcacgacggcccacctgctggcagccatcccacctccggagatcctcaaccccaccgcctcgctgccaatgctcatctgggactctgtcctggcgccccaagcccagccaattgcctgggcctcccttcggctccaggagagtcccagggtggcagagctgacctccctgtcagatgaggacagtgggaaaggctcccagccccccagcccaccctcaccggctccttcgtccttctcctctacttcagtctcttccttggaggccgaggcctatgctgccttcccaggcttgggccaagtgcccaagcagctggcccagctctctgaggccaaggatctccaggctcgaaaggccttcaactgcaaatactgcaacaaggaatacctcagcctgggtgccctcaagatgcacatccgaagccacacgctgccctgcgtctgcggaacctgcgggaagcttctctaggccctggctgctacaaggccatgtccggacccacactggcgagaacccttctcctgtccccactgcagccgtgccttcgctgaacgctccaacctgcgggccacctccagacccactcagatgtcaagaagtaccaatgccaggcgtgtgctcggaccttctcccgaatgtccctgctccacaagcaccaagagtccggctgctcaggatgtccccgctgaccctcgaggctccctcttcctctccatacctgcccctgcctgacagccttccccagctccagcaggaaggaccccacatccttctcactgccatggaattccctcctgagtgccccacttctggccacatcagccccacaggactttgatgaagaccattttctggttctgtgtcctctgcctgggctctggaagagccttcccgtggccatttctgtggagggagggcagctggcccccagccctgggggattcctgagctggcctgtctgcgtgggtttttgtatccagagctgtttggatacagctgctttgagctacaggacaaaggctgacagactcactgggaagctcccaccccactcaggggaaccccactccctcacaaaccccccccacaagaacctcaggccaccctccacgaggtgtgactaactatgcaataatccaccccccaggtgcagccccagggctgcggaggcggtggcagactagagtctgagatgccccgagcccaggcagctatttcagcctcctgtttggtggggtggcacctgtttcccgggcaatttaacaatgtctgaaaagggactgtgagtaatggctgtcacttgtcgggggcccaagtggggtgctctggtctgaccgatgtgtctcccagaactattctgggggcccgacaggtgggcctgggaggaagatgtttacatttttaaaggtacactggtatttatatttcaaacattttgtatcaaggaaacgttttgtatagttatatgtacagtttattgatattcaataaagcagttaatttatatattaaaaaaaaaaaaaaaaaaaaaaanaaaaaaaaaa

SEQ ID NO: 2119 - DNA, 1225 bp, Homo sapiens
ggcacgagcccgcggcccggctgacggggaagggctcagcaccccgggcacaaagctaggaagggtgggacacagtgaaggtgggaggaggagggggctgggggcaaccaggcgccgtggagctgccgctcgctgccccgggcaggggcacaggcttcatccagtgaatactagagggatcgaacagttgcaaccaaggcaatgtcttactacctcagctcagaaaaccacctggacccagggcccatctacatgcgagaaaatgggcagctgcacatggtcaatctggctctggatggtgtcaggagtagcctgcagaagccaaggcctttcagactgttccccaaaggcttttctgtggagctttgcatgaacagggaagacgacactgcacggaaagagaagactgatcatttcatcttcacatacacccgagaggggaatcttcggtactccgccaaatccctcttcagccttgtcctgggtttcatctccgacaatgtggatcacattgattcccttattggctttcctgagcagattgctgaaaagctgttctctgctgctgaagccagacagaaattcactgagccaggtgcagggctgagggctttacagaaattcactgaggcctatggaagtttggtgctttgctccctgtgtttgcgaaacaggtatctcgtgatttcagaaaagcttgaggagattaagtctttccgggagctgacctgcctggatctttcctgttgcaagcttggagatgagcatgaacttctagaacatctcaccaatgaagccctgtctagtgtaactcagctccacctgaaggataattgtttatctgatgctggggtgcggaagatgacagcaccagttcgagtgatgaaaagaggccttgagaatctaacattattagacttatcatgtaaccctgagatcacagatgcaggcattggatacctcttttcttttaggaaactaaactgcttagatatctctgggacagggctcaaggacatcaaaaccgtcaagcacaagctccagacccacataggccttgttcactccaaagtgcctttgaaggaatttgatcatagtaactgcaagacagagggctgggctgaccagatcgttctgcagtgggagcgtgtgactgcggaagctgtgaagccacgggagacctcggagcctagagcagcagctcagcgcttctatgggaagcggt

SEQ ID NO: 2120 - DNA, 1913 bp, Homo sapiens
ggcacgagcttgtggcagctacactctgtgggaggaagatttgaaatgtatcaaacagcttggattgactcattaccgcttctctctttcctggtcacgtctgttacctgatgggacgacaggtttcatcaaccagaaaggaattgattattacaacaagatcatcgatgatttgttaaaaaatggggttactcccattgtgaccctctaccactttgatttgcctcagactttagaagaccaaggaggttggttgtcagaggcaatcattgaatcctttgacaaatatgctcagttttgcttcagtacctttggggatcgtgtcaagcagtggatcaccataaatgaagctaatgttctttctgtgatgtcatatgacttaggtatgtttcctccgggtatccctcactttgggactggaggttatcaggcagctcataatttgattaaggctcatgccagatcctggcacagctatgattccttatttcgaaaaaagcagaaaggtatggtgtctctatcactttttgcggtctggttggaaccagcagatcccaactcagtgtctgaccaggaagctgctaaaagagccatcactttccatctggatttatttgctaaacccatattcatcgatggtgattatcctgaagttgtcaagtctcagattgcctccatgagtcaaaagcaaggctatccatcatcgaggcttccagaattcactgaagaagagaagaaaatgatcaaaggcactgctgatttttttgctgtgcaatattatacaactcgcttaatcaagtaccaggagaacaagaaaggagaactaggtattctccaggatgcggaaattgaattttttccagatccatcttggaaaaatgtggattggatctacgtggtaccatggggagtatgtaaactactgaaatatattaaggatacatataataaccctgtaatttacatcactgagaatgggtttccccagagtgacccagcgcctcttgatgacactcaacgctgggagtatttcagacaaacatttcaggaactgttcaaagctatccaacttgataaagtcaatcttcaagtatattgtgcatggtctcttctggataactttgagtggaaccagggatacagcagccggtttggtctcttccacgttgattttgaagacccagctagaccccgagtcccttacacatcggccaaggaataagccaagatcatccgaaacaatggccttgaagcacatctgtaggcaagatggctgagaaatacaggagaggcgtctgcttttggaaaggaaatctgctttggtgatgatctttcaggcaatctcaacttacttctttaatcaacatttaatatcaatggatctgtgattaaatgtctgaatatgtaatgcctcgtgaagtatttaataatggcctttatttgtatttggatcaatgaggtttttaaaaaaaatggaagagaaaaccactaaccttgatttttgtattgcaaaatcagatagacctggaaacataaatttaaatccttagacatttttctagaaaaaaatgcaaagtttataaagatgatacaaccatgatttgcaactgtaacaggagaccatttattataagcgtacctgtttgtgaacttaattattctgattccataagctgtttttgcttaggtgatccactgccatgtgatccataatttttctacataaaaaatcaaagttaaaagtcacattatacagttatgcattcatttcaacaaaatagtgaattgataatctacttgttaatatattcggcccatattttgtgtgtttggacaagtacatctcccttttgcctaatgaacttttgaaaaataataaaataatagaataaattaaaaaaaaaaaaaaaaaa

SEQ ID NO: 2121 - DNA, 2192 bp, Homo sapiens
ggcacgaggcaatttgaaggaatttcttttttcataaatttatttactaagaaataacactgaaatttcttctatgggcctggttagcaattttgtaatatttcttgtgtttgtgagtgactttctctttaaaaacaaagtcttatctgagtgttttgatttcccagtaactacaaagtttttgtaagacagttttgagttattttccctcaaatgcaatattgtgttgcatatattttaacaagtataaagatgtggataaaattgataccttttagaaaataaaggaaaacattgtcttttctttgtgattctgtttaacttctcagcattaagtgaaagataaaaatttgagtgatccttttcaatattttccacagggaagagacttccaccttaggatagtgttgcctgaagatttacaactgaagaatgcaaggtgatatggtgtttagttataaacgtgcatttttgcattttggtgggacaggcagtacatttggtataaattgattctagtgactagagttttgcctaaaatgcttattagtcatttgccccaaaagaaacatttctgatttttccaaaccaatgcagcatttgtaaatatttacctgttactaaagtgcttttaaacattagttctctcatttttaaaaaaatatttaaagcagtaaacagccattgtgtacacttcactaacaaatactgaacaggtatataaagggagaacaaaaggattagaaaactttttttccaacttttgactgatattattaatgtgtatattcattatatgagaagagtcacatcagttcagtcctggcttaaattaggtaccaacattgagtgctggtagatacaactagtcaggatatgagactgaaaatttaggtaccaccccaaatctcaattctgcctctaaatatttctggagaagaatggaggaaaaggaatccagagatatttatgagtagaattgagaggattttgtgaccaacagaagtgtagttaagagggaaaaaggaatagaggatgcttttcaaattcccggctcagatctctaagctagagaagaggtcacagatggaaaagtagaagagagattgttttaaggcatatttggtgtgaaataccaagaggagctatttagtaggtagtaatgtagtggtgtggaaatagagtgtgagacctggagtgcagatgtgtgtggaagttacaacagatgaaggatttgagaccttgattatgaatagactttttggtgctgtgtctagcggggtagaagagaaagccagtgacaagaccttggggcgtaccaacatttaaaggactggtcactaaagaggaacttacaaggagactaaggattgaccagagaagaggaaaacttgggcagcagagtctttcaagccaaataaagagaggcttaagcaaggcatggttagcaatgctgaggattacaaagagataggttagatgcaagtaagttttgtgtggtggcagaagccatttgtgttggatgagtgggaggaaagtataaagtattttgaagaaaaagaggtggttagagaatggtatgcattcaagaaggagttatgatgttctttaaagatatatatttgagcaagttaattcattaaggagaaaaaaactagcagaacataaattaaggataccacaataaagggataattaattgaagtcaccaagttggtagcaggggagagaaagcacattttgagcaggggttaccaatggacatttgaatgaactactctgccactaagagaggagatagggatggttatggggatttgaagaccaagaatggagagagttgtgacagtttgaaaaggccatgttggggaaaactcagagaggcttcctacttgtaggtaactaaaagtaattccttagaagagttacttaatagtatcgggagcacaacagaggtcagccagtaagtggatgaacattaacttatcacttcttatacaattaattagaagtatgtatctttctagccaggcttggtggtgggtgtctgtagtcccagctacttgagaggctgaggcgggagggtttcttgagcctaggagttcaggttgcagtcagctattctactgcactccagccagcctgagtgacagagcgagatcctgtctctaaaaaaaaaaaaaaaaaaaaaa

SEQ ID NO: 2122 - DNA, 1385 bp, Homo sapiens
  SITE (1347): n equals a,t,g, or c
  SITE (1353): n equals a,t,g, or c
acaaaagctggagctccaccgcggtggcggccgctctagaactagtggatcccccgggctgcaggaattcggcacgagtgtggctgagaatggctcacagcacggccaggtggctgtggtggttgcctcggatgtggacaccagtgcccagctggagatacagcttgtgaacattctctgcaccaaggccggggtcgatgtgggcagcctatgctggggctggttctcagtggcggccaacggctctgtgtacatcaaccagagcaaagccatcgactacgaggcctgtgacctggtcacgctggttgtgcgggcctgtgacctagccacggaccccggcttccaggcctacagcaacaatggaagcctcctcattaccattgaggacgtgaatgacaatgcaccctattttctgcctgagaataagacttttgtgatcatccctgaactcgtgctgcccaaccgggaggtggcttctgtccgggccagagacgatgattcagggaacaatggcgtcatcctgttctccatcctccgagtagacttcatctctaaggacggggccaccatccctttccagggtgtcttctcgatcttcaccgtggaccagagttaccgctcgcggctgcagttctccacaccgaargaggaggtgggcgccaacaggcaggcgcaagtggacagctggaggggccatcctacaccaacgctggcctggacaccacggacctgtgacaggggcccccactcttctggaccccttgaagaggccctaccacaccctaactgcacctgtctccctggagatgaaaatatatgacgctgccctgcctcctgcttttggccaatcacggcagacaggggttggggaaatattttattaccaatgtatactgtgacagtttgtagccaaaaactgcggctggaggggtggggacgggacactgagtggtcacaagggacttgggctcacagcacaggggggacaaggggctggagagggtggcctttaaaagacaactgtggttatagaatgagctctctgtcctgtccccaatacccaagaacaccggtcacccaggatgccagggcccaagagcttctgtgagcccagctgtgacctccagaccttcctgagaccctctggcctttctgtgactctctctcagctgagcccccagggtacttcctgtagctgtctttggcctctctgggaatctcaaacctgtgactcagtgggagaggggatggggctggaaccaggcgggtgggagataggaactggggaaggaccaccaacagcatgcaagagacgccccgkccacggggccaagcctgcgtggagangcttanactcgttctacctcacgtgctgcccgagacct

SEQ ID NO: 2123 - DNA, 556 bp, Homo sapiens
cagccaccatgcctgcctgaaaccttttttaggtaaagttgaattccatccttaaaagtttctgttatatcctatttagccattttctattgtctcccaaagaattcacatcaaaaaaacagctttgaactcccccttcaaaggaaacagtcgactttcataattagcatctaccattatccccaaatcttattttattcattgacttgaaattttttccaattgctttttttttttttttttaaggttaagagcagaggtttactaggccaaagaaagagaatagctctctgttgcagagaggggtcctggagaaatgggttaccccagttgtcttatttaaatggttacccatcagattttaattttatcttctctttgagagcttggtaataagaagcacttaaatcactccaaagaagactttaaaaagggagcagtgaaaaggtcttaataatttattgattgaattaagaaatactagctaattaagaatctgagtctaaacagcacagattttttctttctgcttttaaattgtggttttaaaaaaaag

SEQ ID NO: 2124 - DNA, 789 bp, Homo sapiens
ggcacgagaggacatgtcgctttgcaggaaacaatctggttaagccagaggacccggccatttattggtgggttctggcgctttcaagaatgtgaagaatgagtggccaaagttaacaaaggagcatgcacagggatgggggtcacacccactttgtagagtttaagaatagtaagggacctacgggaacttctcaaggtaataggtggcatgtcttctttccttggcatgacacagaatgtaaagataatgggaggatgaacctccaagcctggaactttgggagaagcttctcctcttggaagtgccagtagcagaaaagttcccaaatagaacagattccttcattccacctgaattcagagagagatccatgtggacacatgtgcctctccatcagagactgctatccagacattcatcttccacctaaaaatgcacttctgctgttgactgcaggccaatgttcccaggataaacagggtgacatccaactgttacttgcctcaacttgcctttggggatcaagaaggaagttcccccgggtgggtggtagaactggaagtagtgtcacaggccatgggctcttttgcatttctcttactgtctctcacttggcctgaatgatttatcacacgatcagttgcaactgccaaagtttgggagcactacattgatgtgaagttctggagacaaaaaggaacacaaacagataaaggtagagaagacaaaagggtgaaagagagggctaacgactgggagaaagagagcagaaaaaaaaaaaaaaaa

SEQ ID NO: 2125 - DNA, 1691 bp, Homo sapiens
ggcacgagcaggcctccaagaaccatgtccccttcagagaggattcctaagcttcctcctcttcctcctcttcttactgcaagggaaatacaagatcagtctggaatgggcttccagattcatacaacctcccccaggacacagattccgagagagagaagaggaaggcaggtttggagcctccaccaccaccagtttccctcacgccctcctctctcccttcccctctttctcaacttcctcctttccctctcttccttctatgatctgtccctgcccctctgtctcctcttcctttccttccttcctcccttttctcctcccttccttagcaggcagcaatgagcaggtggcactgaacttagattccaccatcacaggtgggtagatcttggctcacaagcctgtcattgactagctaagtagccctgattggaggagtcattttatttccctgagcctttgtttctcatctgcaacatggagattttactcaccaccgtggtgcagacaaagtaggacaaagtatcctttaacccagggcttgacacgtgacactcatcaaacattgctgagctctaatctgcatcaggatatggtaagtgtctactgggtgctgggacaaaaggtacagatgggagcaaggcagagatccctaaacagacctctgttggatctttgtgaatacatggtaattatttgtttccaaaaagaggtggaaggagacataaatagcttctaccgccaggcattcaggcaccagctgtgaagccttctgcacattgaaaaactcagagtagcctggtggctggaatgaaaagtcaacaccagttcccccagcaaaatatttctccattcagccttttcggctcattggtttgcctgaaatcagttgtttctccctggggaagcaatctttaaaatggtgaggagagtgtgcatctgatgtgcctgcacttgtgcctgtggaacagggtaggctcagagctccgtgcaggcccatgaagtcccctcagagacaccagtgttgggttgtcatagggtcccagaaaatgcctgtctgcttcgtgagatttaggctgggtgcacagaggtttcacttggtgtgcctgacttatttaggggctgcctgatgttaaagaatcaccacacaaatagacaaacagacattggagcagaagacagggaacagaaagacgctcatatgtatctggataacattgacaggaaaatcaaattgtaatgtcacatacaggagtcttcatgaaggtaagatgtttaaaaacatttttaaaagtataaaacattgtttagaaatatacgcctttgtagtaaatgtgtaaaaacacgcattagaatgatgaacaccaaattccagagaaagggaatggatccctgtggggcacagagtgtgcattaactatgtttatgtctttaaaggaagaaaatatttgaagcagatatggcaaacggagaagattcatgaaagctggatggccggcgcatgagcgtttgcggtgtcatactttgtttccttatgtttgaaatattagcatggctgggcatggtgctcacgcctgtgatcctagcattttgggaggctgaagctgggggaacacttgaggtcaggagttcaagactagcctgggcaacatagtgagacctcatctccaaaaaaaaaaaaaaaaaaa

SEQ ID NO: 2126 - DNA, 2148 bp, Homo sapiens
ggcacgagtcttaatactgttgaaaataatttaccataaatttaagggtttatttctggactctgatttctatttcattggtctgtgtctgtccctatgccattactacattatctttaaaacatttttttacccaatgtcttgattattgtttctttgtagtaagatacagtagggaagtatgagtcccccagcgttgtttttgtttatccacgttctttttctttatcaatattgttttggctatgtggagtcccttgcatttctatataaattttaggaattcagttttaggaatttaggattcagtttgtccatttctgcaaaaaaggcagttggaattttaataggggttgcattgagtctgttgatcagtttagggagtattgctctcttaataatattaagtcttccaagctgggattactggcatgagccactgcaccagcctcttaaagcgcctttaatcaataggttccctgcctcttttcttgtttatcccccctacctcttttttatttgtggaggagactagtcatttgttccccggagcttcccacatgctggattttgctgactgccttcctgtggcaatctgcgtcttcatccccagaatttccaggacacttgtagttaggtctagaagctggacttgattcaggcttaatattttttagtaagtatacttgatagcaggtggtgtacacatccatcaggaggcacacaatgttcagttgtctctcttttatgacacaaacagtcactgatgatcattaactggatctattctttcaataacggtttgtaaaatggtaaaattctatcattccctcttcatctataagctggtatattgattaccttttactctgacctctggctctgcctcccaggtatctccagtatacattcccctagtctaagggaaaggagtttcccaccaacccagccctcacaggaatttgtgcccccagcgacaccccctgccaggcaccagtgggtaccggatgagactgagagtatctgcatggtctgctgcagggagcacttcaccatggtaagcagcatcggtctccactgtcaccctcaggagaagtaaaggagaattctagttcatgagcctgagtttacagtcaccgcctgtccccaggagaatatcggtattttcagaactgccaaatctaagactttgggttcatttttgacctgaccagaatgtattttctggattcagacaggtagtagacaccctcaaacagccataaattctaaaatctttgccattgtcatgagataataaaaaagaggcaggaggagtcaccaggtgtcagtggatcttgtttctggctcccatgtctttgacagtaagactggtgacccagcagtggttatatgcactgactcaggagacagagggcctgggttctaatcctggctctgcctcttaatgacagtgtgactatacactattttggtctcatgtgcctacttgtaaactaaggatgatatattcttaggctcatggagctgttaggattaaatatgataatatgtgtcaccatacttaacgcagtacctgcccagtatgccacatcagctcaacgctgatgaaaacgatggtgatgtaattgctctgtgtctgtttcctcctcatctataaaagaggtgtaatatttctattagaatgaaatgaagcagtactttaaagtcactttgatgcccatccactgtagactggataaagaaaagtggtacctatacaccatggaataccatgcagccataaaaaagaacaagatcatatcttttgcaggaacatggatggaaccagaggtcattatccaaagcaaactaacacaggaatggaaaaccaaataccacatgttctcaattttaagtgagagctaaatactgagaacacatggacagaaaaaggggaacaacagacacggagtgtacttgagacagaggagggtggaaggagggagaagttcagggaagaaaaactgctaggtaccatgcttactacccaggtgacaaaataatctgtacactaaacccctgagtcacgagtttacctatgtaacaaacctgcacatgtgcccctgaacctaaaataaaagttgatttaaaaaaaaaaaaaaaaaa

SEQ ID NO: 2127 - DNA, 1111 bp, Homo sapiens
ggcacgagatcatgttttggttggagataagaaccagggatggcaagtaccagtgtgtacaaatgtatttcacggagtttgaaggaacgcataatcaagagggaaaacaatttgtccttcattggacgtattatttggatttgggtgagcaacaaaatggaatgtggtctgttaggagcattctgtttgttcttttgtccctgatgtgatgaatcattgccacatgctagatggactcttcatatccaggttttgtccctcagggctgagcactgtattaaagagtttttgttgagtcatttaaccttagtgtccacatccagatcagctgtaaaatggggaagacgtgtgctgatttggaatgaatgcaaaatatcactatcattttcctaattacagaggagcaaaggttatcttcagccctttcagttctatgctcacatattcaaatatcaaatgtaatttagctgaagttatttaataatcaagtctttcaatatctgttcaaagaaaaagaacacactttgaaaattctgcaaagctgtctcccagtctttaaaatgtctggaagcactctccttctttacaataccaacatcactggcccagaatcttccctgtgctaggttgtaaatataaataaattacttgttttgtaaacttttgtaaagaatattttggtagaaatacttcaaacatattctttgggttatatttatacatatgtgaaataaatatactatcaaaaggttatattttatacaaaaagtaaattgctaccttttgtatgctaatatgcaaagttttgtataatatgatggtttatttttagctctacacttaaaccataggtggttgagtgggaacttttgaaaactatcaagaggcttgttagacaaatttatattctgaaacctcaataagaaagcattccaggtttcaatccttgttttttgtcctgctcccaaattcttttttaaacccatagttcttgtgtcttatttgattcttctgctgtgcacattgtattggtccttgttgcatgtagtctactgtgtgttttccgattttataaggcagcatttctccatacaaaaaaaaaaaaaaaaaa

SEQ ID NO: 2128 - DNA, 2150 bp, Homo sapiens
gcggacgcgtgggtcgacccacgcgtccggtttgacccgtcggtcgtgcgtgagaggaaagggaaggaggaggtcccgaatagcggtcgccgaaatgttccggtgtggaggcctggcggcgggtgctttgaagcagaagctggtgcccttggtgcggaccgtgtgcgtccgaagcccgaggcagaggaaccggctcccaggcaacttgttccagcgatggcatgttcctctagaactccagatgacaagacaaatggctagctctggtgcatcagggggcaaaatcgataattctgtgttagtccttattgtgggcttatcaacagtaggagctggtgcctatgcctacaagactatgaaagaggatgaaaaaagatacaatgaaagaatttcagggttagggctgacaccagaacagaaacagaaaaaggccgcgttatctgcttcagaaggagaggaagttcctcaagacaaggcgccaagtcatgttcctttcctgctaattggtggaggcacagctgcttttgctgcagccagatccatccgggctcgggatcctggggccagggtactgattgtatctgaagatcctgagctgccgtacatgcgacctcctctttcaaaagaactgtggttttcagatgacccaaatgtcacaaagacactgcgattcaaacagtggaatggaaaagagagaagcatatatttccagccaccttctttctatgtctctgctcaggacctgcctcatattgagaatggtggtgtggctgtcctcactgggaagaaggtagtacagctggatgtgagagacaacatggtgaaacttaatgatggctctcaaataacctatgaaaagtgcttgattgcaacaggaggtactccaagaagtctgtctgccattgatagggctggagcagaggtgaagagtagaacaacgcttttcagaaagattggagactttagaagcttggagaagatttcacgggaagtcaaatcaattacgattatcggtgggggcttccttggtagcgaactggcctgtgctcttggcagaaaggctcgagccttgggcacagaagtgattcaactcttccccgagaaaggaaatatgggaaagatcctccccgaatacctcagcaactggaccatggaaaaagtcagacgagagggggttaaggtgatgcccaatgctattgtgcaatccgttggagtcagcagtggcaagttacttatcaagctgaaagacggcaggaaggtagaaactgaccacatagtggcagctgtgggcctggagcccaatgttgagttggccaagactggtggcctggaaatagactcagattttggtggcttccgggtaaatgcagagctacaagcacgctctaacatctgggtggcaggagatgctgcatgcttctacgatataaagttgggaaggaggcgggtagagcaccatgatcacgctgttgtgagtggaagattggctggagaaaatatgactggagctgctaagccgtactggcatcagtcaatgttctggagtgatttgggccccgatgttggctatgaagctattggtcttgtggacagtagtttgcccacagttggtgtttttgcaaaagcaactgcacaagacaaccccaaatctgccacagagcagtcaggaactggtatccgatcagagagtgagacagagtccgaggcctcagaaattactattcctcccagcaccccggcagttccacaggctcccgtccagggggaggactacggcaaaggtgtcatcttctacctcagggacaaagtggtcgtggggattgtgctatggaacatctttaaccgaatgccaatagcaaggaagatcattaaggacggtgagcagcatgaagatctcaatgaagtagccaaactattcaacattcatgaagactgaagccccacagtggaattggcaaacccactgcagcccctgagaggaggtcgaatgggtaaaggagcatttttttattcagcagactttctctgtgtatgagtgtgaatgatcaagtcctttgtgaatattttcaactatgtaggtaaattcttaatgttcacatagtgaaataaattctgattcttctaaaaaaaaaaaaaaaaaaaaaaaaaaa

SEQ ID NO: 2129 - DNA, 2238 bp, Homo sapiens
ggcacgagccggcwckagcaggccggcttctctgtccaatgcccacccggagctgggaggaggagtctgcgtaatgtgcgtgtgaagagactgggggagctggccggggctcacggtgtttgacccgtcggtcgtgcgtgagaggaaagggaaggaggaggtcccgaatagcggtcgccgaaatgttccggtgtggaggcctggcggcgggtgctttgaagcagaagctggtgcccttggtgcggaccgtgtgcgtccgaagcccgaggcagaggaaccggctcccaggcaacttgttccagcgatggcatgttcctctagaactccagatgacaagacaaatggctagctctggtgcatcagggggcaaaatcgataattctgtgttagtccttattgtgggcttatcaacagtaggagctggtgcctatgcctacaagactatgaaagaggatgaaaaaagatacaatgaaagaatttcagggttagggctgacaccagaacagaaacagaaaaaggccgcgttatctgcttcagaaggagaggaagttcctcaagacaaggcgccaagtcatgttcctttcctgctaattggtggaggcacagctgcttttgctgcagccagatccatccgggctcgggatcctggggccagggtactgattgtatctgaagatcctgagctgccgtacatgcgacctcctctttcaaaagaactgtggttttcagatgacccaaatgtcacaaagacactgcgattcaaacagtggaatggaaaagagagaagcatatatttccagccaccttctttctatgtctctgctcaggacctgcctcatattgagaatggtggtgtggctgtcctcactgggaagaaggtagtacagctggatgtgagagacaacatggtgaaacttaatgatggctctcaaataacctatgaaaagtgcttgattgcaacaggaggtactccaagaagtctgtctgccattgatagggctggagcagaggtgaagagtagaacaacgcttttcagaaagattggagactttagaagcttggagaagatttcacgggaagtcaaatcaattacgattatcggtgggggcttccttggtagcgaactggcctgtgctcttggcagaaaggctcgagccttgggcacagaagtgattcaactcttccccgagaaaggaaatatgggaaagatcctccccgaatacctcagcaactggaccatggaaaaagtcagacgagagggggttaaggtgatgcccaatgctattgtgcaatccgttggagtcagcagtggcaagttacttatcaagctgaaagacggcaggaaggtagaaactgaccacatagtggcagctgtgggcctggagcccaatgttgagttggccaagactggtggcctggaaatagactcagattttggtggcttccgggtaaatgcagagctacaagcacgctctaacatctgggtggcaggagatgctgcatgcttctacgatataaagttgggaaggaggcgggtagagcaccatgatcacgctgttgtgagtggaagattggctggagaaaatatgactggagctgctaagccgtactggcatcagtcaatgttctggagtgatttgggccccgatgttggctatgaagctattggtcttgtggacagtagtttgcccacagttggtgtttttgcaaaagcaactgcacaagacaaccccaaatctgccacagagcagtcaggaactggtatccgatcagagagtgagacagagtccgaggcctcagaaattactattcctcccagcaccccggcagttccacaggctcccgtccagggggaggactacggcaaaggtgtcatcttctacctcagggacaaagtggtcgtggggattgtgctatggaacatctttaaccgaatgccaatagcaaggaagatcattaaggacggtgagcagcatgaagatctcaatgaagtagccaaactattcaacattcatgaagactgaagccccacagtggaattggcaaacccactgcagcccctgagaggaggtcgaatgggtaaaggagcatttttttattcagcagactttctctgtgtatgagtgtgaatgatcaagtcctttgtgaatattttcaactatgtaggtaaattcttaatgttcacatagtgaaataaattctgattcttctaaaaaaaaaaaaaaaaaaaaaaaaaaa

SEQ ID NO: 2130 - DNA, 1750 bp, Homo sapiens
gcttagccctcacttctaagagtctgtaagatattcccacttgaggagcttgtcttcttcaatgctgtatctcagaaattaaactcctccttttctcacgccaaaccatctctcctcctggcttctctcctcttcatggggttgttcatctcccacacactcaggtcagaaaccttgctattgcctcccctctttccacgcccccacttttttctgctcatatcttgcccatcactcaatcctgcagattctttcttcatgcctttcattccttccttcccgtttctatggcccctactctgacccaaatcatattacctaatattgcttcatatttttacccaagagcttcgtcctatctctggttcccttggaagctccccaatgcctgcaggcaaatccagcccccttaaatttaccattcagtgcctcccataatccaacttgatctgctcttctaactaaactttccccatacccaaatgaagccccagccagcctggtgtgctccccagtctctggcaagcctctgctcaagtcctgtgttctgtttggaatgccagccccatgcacttcaccagtcctacttactcctttaaggctcagtcggtgacccacccttttggaggacatctgagctccccatggcagcttctgggcttctttgcatcctgggatctcccagaatctatttttcaacctgatgctacattcctccacagcagggagatgccttttattttgttcttcttccttataccgtcaaattccaaggatagaaaattgcatttccctgggcctgtgaaaagggatccctccctccctgcacactcatgcctggctcacacggagtgaaccagacagcgcttcctcattccccgcagtgggtgtcgcaacagccagttgcaactagaataggggccacatcccgagtctcttgaattcttgccctgtggttaggatgcccttcttgcctgtcctgaaggtggagatttcctacagccgagagagagggagtcagcagtctagggcaggaactccatcatttctttattaaaccactcctaactctctctaatctctgtgagtcttgcctttcccttttctctcctcctcctactgttgagtacaactaggccaggctgaatgagaggagaaagatggggaggaggaaagaagttaggcagccttggcagagggtgcaatgctccgggaaaatgggagagatttacaaggcagagattgacagtttttagtaacttgactttgacctccagtgtacacagacatagccttggctgctggactctgagctttctggccctgggaagctcgagatttgcaaacacttgttcgacaatcacctcgtttatctgcattgtcaccagtgcagcctctgagccctctccctgtctttacttgaccctgtatagaaaaatgctttcagggccaattgcagtgactcatgcctgtaatcccagcactctgggaggccaaggcgggcagatcacctgaagttgggagtttgagaccagcctgaccaacatggagaaaccccatctgtactaaaaataaaaaattagccggatattgtggcgcaggcctgtaatcccagctaccagggaagctgaggcaggagaatggcttgaacccagtaggcggaggttgcagtgagccaagatcatgccattacactccagcctagctgggcaaaagagcaaaacactgtctcaaaaaaaaaaaaaaaaaa

SEQ ID NO: 2131 - DNA, 979 bp, Homo sapiens
ggcacgagctcccgtggagcactcaggaaacgctccttcacccctcaattctgctctcacacaccccgtcacacatagactcacatacaccaagcagagaggagcaaagagaaggaccatgtaagacaatcacggacatggcgttagaaggaaactgagaaacgctctacaagagttcgatgtattacattatttttaatttagatgaaattcacataacacaaaatttaccattttaaagtgtacgtacacttcagtggcttttcatatattcacagtgttgtgcaaccactacccctatctagttcaaaaatattttcagttctcccctcctccagcatctgggaagcatccattcaccttccagctctgtggctttgcaggttctagacatttcatgtaaatgcagtcatataatatgtggctttttgtgtctggcttttttcatttagcataatgttttcaaggtttatccatgttgtaacatgtattcttttaaaaaaaattttaatgtgtaaaatatacatatcataacatttaccttttaatcattcataagtacacaaatcagtggcatgaggtggtcccttcccaatgttgtgctgtcatcaccactgtctgttttcagaactttgtcatcatcatccccaacagaaaccctgtacccattaaacagtaactcccggccagacgcggtgctcacgcctgtaatcccagtaattccagcactttgggaggccgaggtgggcggatcacaaggtcaggagatcgagcccatcctggccaacacggtgaaaccccgtctctactaaaaatacaaaaaattagccgggcatggtggcgcacgcctgtagtcccagctactcgggaggctgaggcaggagaattgcttgaacccaagaagtggagattgcagtgagccaagatcacgccactgcactccaacctgggtgacagagtaagactgtccaaaaaaaaa

SEQ ID NO: 2132 - DNA, 2367 bp, Homo sapiens
gtcgctgtcaggatcatgccctgtggcacagcacaggtggtgggaggtggttttctgactgagatgttgcctgatggatggaaagaartgtatttttaagttcaaaaagcattatcctgtggcattgcctggacatccactccctgacagcccagagcagcactgtctggcttcccttcatgcttgtggctttgttgtgtttgatcagaattttgggggaaatggaaagttttcctcaaggagcagctgggggcagaataggtagtatttaagcaaatacttaagtccaagcaaatcatccccattaaaaagcttttcctgtaggctagtaggatttctaaatagatgaattcaacagacttggtccccatagtccaagagtatgtatgtgaagaaagtgagcatgattcaacagtttcactctcagggattttaggatggcaaaatacttcacagaaactcaatgattaagttcccttccacacttccagagcttgaatgaacacaggtagccacctaaattgagcagtattgcaactcagagagaaaatcatctgaatagtaggacaagctcagaaggtacattgtgactgagggcttaaaaggagaccaaaacatggccccatcagggaagcttcttaatgcttggggggccagctaggtagggttgcttccaaaagctggagcccacccctgcctaggggttgtcagagagccacacctgcaggggaacaggtacctccgagggtgagagtcgtggtctctgggagttgttttctcacctctggcttagaagggtcaggcagaaaccacaggatgtggggtcacactcactgtcccaagtttgggaacctgaaaaagtctccattcagaacatggttgttctccctgtcccatgctatcttatcttcctaaatgactaatgaggaagcgggtgttctttttctgcactttgattcgccatctgggttctgtagggtgctctgaaggtgtgatctgccttctggctgatgtggaggaagagcaagcgccttcccaggccacagctgctcacctctcggcagatattttaggcaagcatccgtgtgtcttcccatcttcaggagaaaggtaaatgcaccctaagtgttcacttctggacctttttcaagttcacttgggactgtgtgacagaagggagttggagggaggatgggaatatttttaacactttgttttcctgtgcagaaacataataccagttttcgcagaaatgtgtctcaatctgtgactaccaaagccctcctcagtccttccctcagagggacacatttgctgtttctcccgcaagcagatgttgtggatgaggcgatagactccttggcaagaacgaaaggtgtgatgaaacctccctgctcggaagggtctccgtggaggtgtcctcatttcacatgctgggttttgcaagcgaggaagccaggcagtggaggaactagagagaggcaggcgtgtgtgtggacaagcgctggagccgcagccctcagactggcacgggaacgccagcgttgggtgttcagattccacgcgtatgtctgggctcactcacagcatggccgagtgtctgcagtgctggtcctgacccttccagagcagcagtggacagatgagataagactgtttcagaaacaaagatggccacagccttcctaacaagcaggtcatctggccatgtctgtattgtaactggtaaaaggcttcaagtcagattgatgatcaagaaaagtcaaaaccccagcccaagattgggaaagcaggtggtggttccaagcttttaaaaaattattgaagctctccatcctgttctgtgagtgtgtcttctctttctccttcacgtcatagccgtgacccaccgttcatctctgctcttgcgtaaagatgaccgatggagtccaaagccaagtggcttcaccagctgacaagccaccctcctgcagcctgagtttcacagtccactgggttcgttgtcatgcggtgtttgaatggttaagcccttgcagtatttcagatcgggcaaaaaatatcggatgcacatagcagaaccattggtggtatttatagctttgctttgtactcctcactgtttctgcctacgcaaaatatccatgtttcctctgagaaatctgttgtggactgaaagcgctgctggctgtgaaatttaataaagtgtgtatgctttgctagaaaattatttcttggacaataggaacagtcattgatctgtaaatcctggctcttaacagtgagtggccaaggacttgatcagcccatttcttggtccctcagtgctttaaaatttaagtagcactgcattttgtaatgttgaatatg

SEQ ID NO: 2133 - DNA, 1092 bp, Homo sapiens
aaatttagccctggagctaatgggtaactctacattgaaattccactccatttcaagttcaggaaagtaaattgagtaatgsagagcaaatacaccgtccagagaggtgccgccaacccggagtgccagacagagagggtttcaggttacatttgctcaggacagagatggcacgtggccctttacatgaacaatcgttgttatattttattttgtgctgtttttaggccttttgaaaacatggagcctggtgtctgtttacagcagcctcatgtcagtggagtcaaagctcaatggccagctctgtgaaatttcaccaggrttttaattattttggstaactaccttgaaacttccaagcccttttatgacaattgacttaatttacatgaccactggcctggttgggaggcagtgttaagtgaaagacttcaacggtgcttctgtaaaatatattttccatcattcaaaaatgataaatggtaatttcagaacataagrtwagcaagrggwgcaaaaaaaagggggtatcaytaacaatatcttctgtggaaataacgtaaaacttaaattttgattyctgkttkgkattttcatatattttatagagagatatgkatatatattcttttagcctgtcacccaggctggagtgcactggwgtgatcatagctcactgcagactcctgagctcaagcgattctctctgcctcagcctcgcgaatagctgggactaccggcacccaccacacctggctaatttttttaaaaaaatttggcctggcacggtggctaaagcctgtaatcccagcactttgggaggccgaggcaggcggatcacgaggtcaggagttcgagaccagcctggccggcatggtgaaaccctgtctctactaaaaatacaaaaattggctgggcgtggtggtacgtgcctgtggtcccagctactggggaggctgaggcgggagggcaggagaatggcttgaacccaggaggcggaggttgcagtgagccgagatcgtgccactgcactccagcctgggtgacagagcaggacaccatctcaaaaaaaaaaaaaaaaaaaaactcgag

SEQ ID NO: 2134 - DNA, 954 bp, Homo sapiens
ggcacgagggaatattctctatcttcttcaccaacgagtaagacgttttggaataatgggactctacaaaggccttgaagccaaactgctgcagacagtcctcactgctgctctcatgttccttgtttatgagaaactgacagctgccaccttcacagttatggggctgaagcgtgcacaccaacactgagacgccttcccatgaaaaattccgaagatgctcaagagggaggtttcctcctgagtgaagagaagtgattctcccttgactctggctcctgccaccacaaatgttaccctcattggcttgaaaagcatccaagggtgcacagggagtatggccaactggacctgttgtcaccttaattgtcatgctggctggttggattttggggtggcagttggactaatgtgaaaaaaacattgctgaaaacctaaaaatgaaagtttgtgagtgtttattggttttcttaagagaaatggactattttgctctcatgtgtaatgttttctatttaaatctttcttaaatataccagctgttctctttccctgaactctcccccaggttctaggacaaatttaataacatgtaattctcctcaaatacttttgtatgtctcagtgttggtgttttcctccctaaaactaacattagggctgtgccacgggcatgactttatttttgttgggctttttttccctgcttaaggagaggtgtcttttttggatatgagctatttattttgtgaaatgaaaattgttcacccaaatgattctcttataaactatttgtaaatgtcacttattcattagtgtttgacataatttttagaatatttattttgaatcaatcctttcattacgaaagacttgaagttttgtgtccatccttacaagccctggtcagtcaagtcccaataaatggtcagcacaaaaaaaaaaaaaaaaaaa

SEQ ID NO: 2135 - DNA, 541 bp, Homo sapiens
ggaattcggcacgagaaattcttgaagtctggtgatgctgccattgttgatatggttcctggcaagcccatgtgtgttgagagcttctcagactatccacctttgggtcgctttgctgttcgtgatatgagacagacagttgcggtgggtgtcatcaaagcagtggacaagaaggctgctggagctggcaaggtcaccaagtctgcccagaaagctcagaaggctaaatgaatattatccctaatacctgccaccccactcttaatcagtggtggaagaacggtctcagaactgtttgtttcaattggccatttaagtttagtagtaaaagactggttaatgataacaatgcatcgtaaaaccttcagaaggaaaggagaatgttttgtggaccactttggttttcttttttgcgtgtggcagttttaagttattagtttttaaaatcagtactttttaatggaaacaacttgaccaaaaatttgtcacagaattttgagacccattaaaaaagttaaatgagaaaaaaaaaaaaaaaaaa

SEQ ID NO: 2136 - DNA, 1142 bp, Homo sapiens
ggcacgagtcacaagctgccgctttagattctcccaaaaagtctccccgagggggctgaggagcccccgtagccctcggggcatctcagctggcagccccagcgtttccttccccatccctgtcctacagattcatgctggtcctggccagcaatctgcctgaacagttcgactgtgccatcaacagccgcattgacgtgatggtccacttcgacctgccgcagcaggaggagcgggagcgcctggtgagactgcattttgacaactgtgttcttaagccggccacagaaggaaaacggcgcctgaagctggcccagtttgactacgggaggaagtgctcggaggtcgctcggctgacggagggcatgtcgggccgggagatcgctcagctggccgtgtcctggcaggccacggcatatgcctccaaggacggggtcctcactgaggccatgatggacgcctgtgtgcaagatgctgtccagcagtaccgacagaaaatgcgctggctgaaagcggaggggcctgggcgcggggtcgacaccccctatccggagtccaaggcgagacctcacctcatggagcctggccacggacccctcctacccctgccttgccggcccctgcacatttaggatatgctcctggatggggactgggctgtgcccagggcctctgtcccccaggatgtcttgtggtggcggtcggcgttctgccccccagggcacccctgttgtaggcactggctagggaggggcaggcctccttcctgcccctcgagacactcttgggagatgcattttccgtctggctcacagggggagggtgaggctttgtaccccagcccctgcccaggccactgtgagggtgggtgctggctgagcccctggggcagaaggagtggggcaggcggggtctttgttctcggctcccacagcagagccaggtgagggggggcctgccaggactagacagaagtggggcggcctgaaccctgcttccagccatggccaggggccacggaacccggcaggggtgtctgaggccgccctgtcagctggccggtccaagcctgtggctggagctggtgtgtgtttatctaataaagtcccacaggtgcctcaaaaaaaaaaaaaaaaaaaaaa

SEQ ID NO: 2137 - DNA, 1452 bp, Homo sapiens
  SITE (1352): n equals a,t,g, or c
  SITE (1399): n equals a,t,g, or c
  SITE (1415): n equals a,t,g, or c
  SITE (1426): n equals a,t,g, or c
cattaagttttactgaccaaaaaggtggaaaaaagaacctaaattttcttccacaaagcagccgtttctattcaaatggaaattcagtaccagagaataaatgtctatgtagtcatactgaatttagatagataagggctacagcatactaaatcgacaaccaaatttgtcatgtgactaaaccgttacttcagatgaagcttacattactgttttctgcttgtgtattttctgtagagtacttttacacagattggtaaagttcaggtttcagagaactgcttttgtgcagaaaatttaggttcttttttccacctttttggtcagtaaaacttaatgaaaaaagcaaagaaaaaaatattctgaacaaagctatagggttttaagttcagcctcccaacttagtcatcctaacatgattattttgtgatttggggtgcttgccctggtgctgttccagtccatgtgcatcctgagctgtgtgatctgcctcgaggctatgatctgagcaagcaggagataacattttcttctgcatcaagtgaggaaaaatgtgcttttggccatgtctcaaagacaggaccaacttcagattcccaaagaagccagctacagagcctctggaacactatggtcttacaagcagtactaaaatcaaccctcagcctcttcaatgccaaaggtatccctattggttgagaaccacatggtaatttttaatgggacttttatcagcaaatggagttacaggaattctctgtaatgagtgattctgaagaggtactttcctggaataattgtctacctgaagaaaaaaaatttatatatacattgtgtgtgtgtgtaatacacacacacacaaccccctatacctggaagattgtcagcatgtaaatcaggaacaactttctccttattgacaatcccataataaaactcaggaaccaaggcaaaatgaattggcttctaggggtctgaaccttactgcccatacaagtgttgattcattttaatgctgtttatgatttctgcattggcagaaattttcatactttctatgtttttttaattactcagttttttattactaaaaatagcacatttgagtacatttgaaaagtagaaaaattagaaattattaactttattgaataagcaagaagtgcatcctaatcctttgattattaatgaggttgaatatttgtgtgctatcggtagctgtgtttctttgatcagatgttcctgtccttttgcccttctgttatctgttggagttgctttgtttttcgtatcaagttataggatctctttatataataaatgtaatttaacttgcatttgcttggcatttnatttcttccctcaatctgttgtaggtttacaaagggcaacgctgttncagttaattttgaggnccaaattgtcnttttttttttttgaggacggggtctt

SEQ ID NO: 2138 - DNA, 1452 bp, Homo sapiens; identical to SEQ ID NO: 2137
  SITE (1352): n equals a,t,g, or c
  SITE (1399): n equals a,t,g, or c
  SITE (1415): n equals a,t,g, or c
  SITE (1426): n equals a,t,g, or c

SEQ ID NO: 2139 - DNA, 1452 bp, Homo sapiens; identical to SEQ ID NO: 2137
  SITE (1352): n equals a,t,g, or c
  SITE (1399): n equals a,t,g, or c
  SITE (1415): n equals a,t,g, or c
  SITE (1426): n equals a,t,g, or c

SEQ ID NO: 2140 - DNA, 1452 bp, Homo sapiens; identical to SEQ ID NO: 2137
  SITE (1352): n equals a,t,g, or c
  SITE (1399): n equals a,t,g, or c
  SITE (1415): n equals a,t,g, or c
  SITE (1426): n equals a,t,g, or c

SEQ ID NO: 2141 - DNA, 1195 bp, Homo sapiens
ggcacgagcttacagtgtcagtgagttgtgttctctctgttcctctttagagataggctggaggcatgtatagcttggcttccataatgcagataaaaaaatatttttccctaagtgttttccttgccttagtgtcttcttgctgtttctgcctggacttggagagattacaactatcgaattgagaataccagaagcaacacaagttgtaacttagagacacagagcttacgtggctgcaaatactttgtagtgtaagcgctgacatacctcagttttggagccaaagagtcacttttggtcacttctagaggtgtgatcttaggcaatttgctcaacctctctatgcttcggtttcctcatctgaaagatgaagatcataaaagtaaccatcccacagggttatcatgagaatcaataaaagaatctatgtggagtgcattgcataggaccagctccacaatgctctatatttcattatgtcccctgcacttacaaaagatgacggactgttcggatggcacaaatacaaactatcacttccaggacttaggtccatggctctcaaccctaaagagcatttataaaactactaaggccttagccttacctcagaccagttaaattacaattactggagaacagggcctaggcctcaatatatttcttaagctccacaggtgattctcaagagcaaccaagattgagaactgctgatgcattggactctgttggttgtgtctttaggacctaatagcaatcatccagttgtgtgcttggtccgcaggggattctgctaagactgtcaggccatacagggtgtgggcctagttctgggagaatggttttcaatttgactcacacctggggctggtaaatcttcagtgggtgcatcacagagtagggcaacaaggctccctgagagttgagagaagggagtgggagcaaataggaggtaacccccctattccttaattttaaaaatgaaaaatcagagagctaagagtttggagttctaaggtaaagtccaaactggggcacatactcccacttgggtaaaaagaaggaaccaacctgcaaatcagaccaaaaccgcagatgcgcagctgggaaactagacacgaactcatcatatccaacactgaaagatagctcagatttctcttgcatggccttcaaagcaggagatggttct

SEQ ID NO: 2142 - DNA, 542 bp, Homo sapiens
gagattgcccaagccggtctcaaactcctgagctcaagtgatcctctgcctcagcctccagagtatctgggattacatatgtcggctaccgtgtctggccgttcacatctttggccactatttgcttgtgaaaaggtataatgaggtggtacttatcatttttactgtgtctcatgttttgtatatttttgtttcatcaactaagatgcactgtaacatctctgaaatctggatatattatcaatggtttatcatagttttgttagcaatacactgtcttttagtggtgcctaaaataatggtatagttgtgaggtgatcttagatttgatgaagcacagtatgcaggtaggcctaatgggggaagatggtaatataaaagcaagaagtattttttttttgtaatgactgaaagctgttctgtggatgacctaccctttcctttaaacacgattctctcacttccaactccaaacttgctcaactaatccttaaaaataaacttgagctggaatttgaaaaaaaaaaaaaaaaaaaaaaaaa

SEQ ID NO: 2143 - DNA, 549 bp, Homo sapiens
ggcacgagccaaagtctgcatctggatttgggggtgttttttggcatggcaccctcacctctctccctgcctgttttccccaaagtggaaaggaaggcctttcaaaccagagtgtctcactcccctctgacctccagaccagatggggcatgagccagccagctcagccaggctccctgtgtcctgggaggaagtgtccccatcccccatgccccttatggggagggagggcgtctgatgctctctctctgcctcccccccatcctgtcaggcacaggtgacgggggcagcccatgcgagcccttctcctgctgctctgggagggccagttccacattgagccagcctggtcccatggaaaatgatggcctgggctttctgaggccttatctgatgcctctgcagttcatgtcccccaccaggcctcgaggctcagggtgggagagggccccgggctgccctgtcactcctctaacacttccctcccctgtccccaacatgccctgtaataaaattagagaagactaaaaaaaaaaaaaaaaaaaaaaa

SEQ ID NO: 2144 - DNA, 1707 bp, Homo sapiens
ggcacgaggaccattctgtgaaagtagcagaatgtgaggagcacgcgtgagcttatgtaccgtgaagatgatcagaggatatcttattttaagagtaaaaacccacataattttatttctgcttgatagtcatggtagtctgtcatacccacctctgggactctgcgtggctgtttggctgtcacttgtagcaataacgacattagttctagtcagtgctgttttacatttttcttttgatgggtttagtcttgccctggagtgccgatgatgattctccctccagagccacgcttgggaacatgaagcaagtctggcgtgtgggctgcgtgccggccttagtgggacccgtggggttggagcatgcctttaggggcagtgtctgggccgaagcacgtcccaccacacagtgccagagccagagaaggggccccaccaccaaggccaagcttgaccaggtcagcattgccatggcccagtgtgccccgtggcctctgaagatccctctgtgcagggtctgcagggatctggattgcaagggcccaagtctgcaggtctggaagcatcttcctataagagcactttcgccttctgggtcaggactccaaggtgcagcgggcttcacagccctacaattgggttctcagctaagccccagagttctggtagaaccatcccggggcgggtggagggtgggatttaagggagacgggaacacatggggcaggtcctggaacttggtggcctgaggactgaggccattgccctggtggaaaggcctggcctggttcctgtggcttgggacctgaataggcaggtgctgctggctccgtagaaacccttttcccatcttttgctctttgccaaacctaccttgctttgggagctgcctgcaccaccccagagaaggccccaccttcttcatccctcagacccgaggaggcctcccagtaaggagtttcccaagaggggactcacaggaaacaagtcttagtgcttgggagggaggccccgctgcgtgctcagactcacagccaacctggaaggtagacgagatagcgccacccacgcccctccacaccccagactccgagtaaagcgggcggtagggccggagtcacctcccctatggcagtggccgccgctgtactccatcctcccgtcaggaagatcagctgtaaataaacgctgggctccccagagcacctgtccgcccactgcccttgctgttctgggatcttcgctgcagttcacgggaaacaagcctgagtccgctcgcacccgcggctgctctcccggctcggcccggccgcctctgtctccggccaccgggtggcgctgccgagccagagccgccgcgtcccggcgctttccaggagccccaggcccggaggaggcgaagcccgcagagcaaaggtggaaacacgtgcctacgctgtaaagaaatcctgttccagagcatacctgttgtacaaacagacactgttcctaacgagaggagtgacgtattttcatcaccgtttttaatttgttttcttacgggtttacgattttgaatttttcttatttggttgaaagaattttgattctatcagcctgagtgagttcagcctgtaaaaaggatgttaagctgtgggtaaaatatgcaaacgaaaagaaatatattgtacaaattctatataataaggtaaaaaaaaaaaaaaaaaa

SEQ ID NO: 2145 - DNA, 1159 bp, Homo sapiens
gtgctatcctactatgctgttctttggtaatggaataaattgacccaaggaccgaatttcatttggatttcaaattgtccagagtggaaaagccttcaagatgacatgatgaattactcagttcatctgatttctggtccctcctttctcgacaactataatactaacccttttctcaggataactgtctacacctggcagttttctctgacgtgctgttcactcacatccctaccttgcatggtaatataaaggactaggaagcagtcatacttccaggaaatgcttggattcatgtggacattcaggaagcttattctcatataatactaatctaaacagtactagaaattacagtgccaagagccaccaggaggcccagccaataagcatagatactatatggtatcatgggacccatctattttttaccagtggactacaggattacttgagagttatcagggctgcctaacagaccaggagatctgggggttgcaccagggaatcgccatatttgaccagcatgttttaaaagctcttggtaggattagttggttctaaggatccctctagggacctcattatttcaagaggaacccaaagtccagcctcctacatagatgctgccccacgaaggacccacaaaactaacctagttcagggttctcaggcaggcagttctgcttcagcttagagcagaacccataaaatactcaagtactgggataggcaagcatgtgtgtttactgtggattggtccctgaaggctcctttgggtgagaacatgtgaaccaggcaccctggtttgtttggagcattgctgcccagaagcttctatgggataggtggtgcttgggattgatgtgttgtggccatgcagccctccctgaggattgacttctgcactaatccagtgaaggaggctgtgtcaaaagaagggctcagaagccctcttttcagaggcaatgattcctgtcagtatgaggtcccttagttactaaaaagggacatgatttaactccagtttgatgaacctcctccgagtttactttattgtcttcaaatcttttgttttcttcctttttgtgagatttgtgggttttgtgccttataaatggaaatgtatgaacacaaaaaaaaaaaaaaaaaactcgag

SEQ ID NO: 2146 - DNA, 960 bp, Homo sapiens
ggttttccaaagacttccaactgttccagtcctctttttgatttttttctataatgtaaacaactaattcagagtctgtgaaaatttgccttgaaacccattaaaatgaatttattgtttccaaaaatattaattagacaagctctgaatatgaacaataccattgaatagcttctaaaagaatgagtattttcagatgttttaaattaccttttgtctttgaagctttccttattttccttgcgatatcctattttctcttttgtgacaaaaaaattagacaaacatgttgaaaattggttataattcctaccatcacatgctatttcagatagtgactaataaacacattacatcactgtaatgtctttcccatgtagtcctgactgttcttgatagaacagattcaccatccagatcttatctatgcattgatccctcaataaaggaataacccaagatgaagttggcagtgggtatacacacagctatgtcacaccaaacttgaaatactttttagaagttttaaatgctgataaacaaactcttaggacaaatcacwaatgagcatggaattcccatcttcttcagatttattcatcataaatggttttcacagattttatcataaaaacataatcttctctttcattcatagtttataattcacatgatttattcacattaaccagctgtgattggagaatcaggarrarctttgagtcccatattttataaatgcttctgagaagtaccatagttaatgcccctttcaaataaataattttggatggttgtggtggctcatacttgtaatcccagcactttgagaggccaaggcaggaggatcccatgggcccaggagggcaaggctgcagtgagccatgatcagagcactgcattccagcctgggcgacagagcaagagcctgtctcaaaaaaaaaaaaaaaaaaactcgag

SEQ ID NO: 2147 - DNA, 1065 bp, Homo sapiens
gcccacgcgtccgcccacgcgtccgcccacgcgtccgctttttaaaaaatatctgaaaaaagcttcatatctttacaaactcataaaatagctgattgggccatggaggagatgaggctgtttagaactggttttgtttcaagtttgtcaattttccctgtatgagaacttgggtaaagcacaaagaaacatacagtgctagtaacaggtctcctgcgccctggaactaagtgtttggaggaaggactaaaccccgggggaggtgagtataaaataattccactaagatcacctcctcagtccccagaaggctgatggtggatcctctggccatctcctgtggggtcttactgctcctctgccatttctctatgcctgaagacacgaagatgatatcaaggcagagctaccatatcgcagccagtctctaggctactgctgtgcagtggctcccactttctaatgcttttttgtttttgctttttctaacaaaacaatcttttttcaaaatgaattccaacccctgctagcttccttccccgcctccatactgttttaggcagcaccgtttatgtgatagagtccgtgtttctcaaatgcatggtgttcctcaggtggagagtgggcagaagtttttgcaacactttttttttaagttattgggtgcaaaatcccaaaccaggatatgtgtatgtctgtgtgtttatgttttttatttgaccctcccctctttcaacctacccccttttatatctaatgtagaaaaagcgaaattgaatctggaaagcaaactgttgtatatagttgcggtaacaatcatgaagagagagccgggctgtcccctcagtaattcattttaaataacaaattatttaaaaataaaattcatgccagagccagctgaagaggccttccttcatcaccactgaggccacccccaatctgggccctctgtccatctggcatgtctcctcccagcaagattcatctgttcaatgccatttgcgtttcaataaagttatctcctgtactgtcaaaaaaaaaaaaaaaaaaaaaaaaaaaaaa

SEQ ID NO: 2148 - DNA, 2631 bp, Homo sapiens
  SITE (2619): n equals a,t,g, or c
ggcagagccacagtgatagaatacgtgaagccctcagacctcaaaaaggacatgaacgagaccttcagggagaagttcccccatgtcaaactgacgctgagcaaaatcaggagcttaaagcgkgagatgcggagcctgtcggaggagtgcagcctggagcccgtgacggtggccatggcctacgtgtactttgagaagctggtcctgcagggcaagctcagcaaacagaaccgcaagctgtgcgctggcgcctgcgtgctgctggctgccaagatcagcagtgacctgcgcaagagcggcgtgaagcagctcatcgataagttagaagaaaggtttcgattcaacaggcgcgacctgatagggtttgagttcacagtkctcgtggccttggagctggccctgtatcttcccgagaaccaagtgttacctcattacaggcgcctcacccagcagttctagcagaggccccacagaaggctcagggcaccgaggtgcacttgccggcctgggaggtgtcccactgaagccccgcgcctcctcctgccagcacccccagcacctgctagcaggaggcacctggcctycgctggtgcagctttcctttttgcctctttgccatttccttggaaagagacgtcgctttcatccccaagtgcaccgtccctccgaggggatttctgagaattctcctgcatttttacataaactaaatgkgaggtttgttactggtatttttttcacgtgcctgagaccagcctggtaccaggaccttttgttcacagcgtgcagcagcgagccggctgcagtgygtctcccctggcctcgccttctgcaaaccaccgcagccaccacagcgtcagggtggagatctgggtttctagacctcactgaacacactgaaatggctgagtttaacttatttaggcattcatcttggagatgtggtttttcgggttccccagcagcatctcccgacaccaactgtgccgctggctccctgccacctgaagccgagctcctccagagctttctccgcccacctcactgcatcccaagtggagcttttggtgtccagttaggccagcgggagcagtctcctgatttattttgatctcattcttggactcttggacctctctgttcttcaagcatcgtgtcactgtgaaatcctaacgcccctgtgtcctacagaccgacggcacaacagacagctgcccatcccatgccatgctctaccctctgcctctcaccaggagacactctgggcctccaggacaattgctgcttgccggctcttatttttctaagcaatattgtgatggagaaaaataacatatttattgggatttggttttttgggtcttttttttttaagggaacaaaaaatggttaaatgaggtctgctgaagttgacttgaaaacacactkgaccctcaggcaggagggcactgaccacaccccacacaacctcaaagggtcagtgcgtcagtgccttttcttctgaggcaggaaacaggtgccatcttggccacctcggccagggcagcccaccatgctaaaaggaccccaaatggtggtcgttgtcccttctgtgcaggccagcagggccccatctctagtttttccacgtctgtctgaagttcttgcaacaaattctgcatggtccagcgctccagctagctgcctcatcaaaaacactgaataaccaaggactgctgagtttttcttcatggggggtcagctggtctcaaaactggccactgcctcagccaccaagctttttcctaccactaccttataaacctgcctggccctggaggggytctgggacgactttgtctctagcccattaatacaatacatcctatgctttctgtgcagactggtgcttccgcagaaaggagatgccaattctgctatcacagaactccaccagcaactccacccgaccccagcagtggtgcaggacagctgccagcacccacctggccctcctccttttccacagccactcactggggccaccaaaacccagagatggcaggtgtgtgggacagactggaggatgaggacaaaccaaagcctttgttctttcttattgtggagcgtccccttccatcaagcagcctgccctcaagccaaggatcatcccctggaacccagtatgcacccagaggggactcarcttcaaagctgctccaccatgctgggtcccaggcagctttcctctgaaaagcaacctctcctgccacccagatcccatctcaagagctcgcccatgttacgagcatgtaaaggactgacttcctagtaactgttgcagtttacaacctgccctccagggacacgtctccatggttttttctacacatgaatgcgagaaatggctgataagcacagtaatttaagattgcgtattcatgtagtgagatttagtcattaaccaacccggtctttgtgatgtgtgaagccttcccttcagttatgtcccatttttatgatgccaaaagctgccactgtgtggtattcgaggattattgcaacaaagccagtagttaaaccaaaaaaaaaaaaaaaaaactcgagggggggcccggtacccaattcgccagagagtgncaatggcatcaa

SEQ ID NO: 2149 - DNA, 1879 bp, Homo sapiens
ggcacgaggtgggttttgccctagatcttccccctcgtaggcgagatgaagacatgttatatagtcctgaacttgcccagcgaggtcatgatgatgatgtttctagcaccagtgaagatgatggctatcctgaggacatggatcaagataagcatgatgacagtactgatgacagtgacaccgacaaatcagatggagaaagtgacggggatgaatttgtgcaccgtgataatggtgagagagacaacaatgaagaaaagaagtcaggtctgagtgtacggtttgcagatatgcctggaaaatcaaggaagaaaaagaagaacatgaaggaactgactcctcttcaagccatgatgcttcgtatggcaggtcaagaaatccctgaggagggacgggaagtagaggaattttcagaggacgatgatgaagatgattctgatgactctgaagcagaaaagcaatcacaaaagcagcataaagaggaatcccattctgatggcacatccactgcttcttcacagcagcaggctccgcgcagtctgttcctccttctcagatacaagcacctcccatgccaggaccaccacctcttggaccaccacctgctccaccattacggcctcctgggccacctacaggccttcctcctggtccacctccaggagctcctccattcctgagaccacctggaatgccaggactccgagggcccttaccccgacttttacctccaggaccaccaccaggccgaccccctggccctcccccaggtccacctccaggtctgcctcctggtccccctcctcgtggacccccaccaaggctacctccccctgcacctccaggtattcctccacctcgtcctggcatgatgcgcccacctttggtgcctccccttggacctgccccccctgggctgttcccaccagctcccttgccaaaccctggggttttaagtgccccacccaacttgattcagcgacccaaggcggatgatacaagtgcagccaccattgagaagaaagccacagcaaccatcagtgccaagccacagatcactaatcccaaggcagagattactcgatttgtgcccactgcactgagagtacgtcgggagaataaaggggctactgctgctccccaaagaaagtcagaggatgattctgctgtgcctcttgccaaagcagcacccaaatctggtccttctgttcctgtctcagtacaaactaaggatgatgtctatgaggctttcatgaaagagatggaagggctactgtgacagcttttgatgccagaaaaggcttctgttcacaacagtggcccatggagaaagaggctcttattaaacttagatgaaagagctgcttccattgtcagggtattttctaatttcagttcaaggaatatcctaaaatttagccttgttcagaatttactgcacataaaaaagggtatttcatccagaatagatcagttattgaagcagtgctgctaacatccattccctttcataccaccattttcaccctgtttcttcccctcctccagttctttggaaatttgtgatcgggggatcttagttgcttatttgttttgactcttgtgtgctgtgggcactggagtagagatttctggagaaaaaaaaacagtttatttcatcttgccttttgtgtttgagttatttttaatattttcctgtaaatattttgtaatattttacttgtaatgaaatggatcacaatgtcatttcctaatacaaggcaggatatgtgggaagaatatgtacaattatttgattaaaattatttcccactgacctaaactttcagtgatttgtgggaaaaataaataaatgttctacaccaagaaaaaaaaaaaa

SEQ ID NO: 2150 - DNA, 1631 bp, Homo sapiens
ggtttgcatctgtctttctgtggaaggtctgttgcatattcatctaggaacttggtaaatgtctgatgataagcatttgattttttcctagttgattcctcaaataataataatgattaccctttaatctgaatgctcacaggtgtacttctatctcatattctatgcgcagtcatctgttaagctaatggctaattgtaccagagggtctcaactttgtttctttgatctgcattggtttatggtggtaccttgcccattcttggcacagcaggtggataaaaacaatgagtaacattgagaaaggctaatgtgtcttattgacagtagtggtataatgtttccaaacccaattgaattattttggtttcttaaaatcttttcccgatagcccatttattttaatgttctgaatttccaagatctgtgtataggttcaatgattagtttttactgaagacttatctatggactgagtgtgtattataaaactagtgacataagtttaaaacttattcctttttcattttccaagtaaacttttttagtaatgtgtttttctttgtaaagacaggcagtatatgatttaggtctggatctggtttccagtcttggctccatcatgtattggttatttggccttgaacacaaatgacttgccttgaacacaaatgacttatatctgtgagattcaatagcttcatcagtaaaatggggatagtagtagtactgaattttcatgattataatgaaaattaattgagagactgatctggagaggtgccatactacaaagaggattaagtggaggtgtccctattaaatggcgagatacccagaaacattaccctgttgactccagtatgctggcaacgaggctttatagtctttgggaaggagactggaagattcttctctgggaaaaatgtacacatactgacctttgaaggacccccagtaatcagccaggtcttacctgatcatcctatagtgaagccccccgacacagtatttccattcatagtttagctcttaaatgtgaattagctatccagcaatcaccagacacttgaggaaagcctccagaaaacaaattggaaaaaggggcaagtcataggaaacagacaaaacaaggaacagaagaaaacatcatttttgcaatctataatattcacaagtttgttttttgagacagagtctcatttgtcacccaggcaggagtgcagtggtgccatctcggctcactccagcctcaaactccttggctcagcgatctgctcacctcaggctcccaggtacctgggacgacaggcatttgccaccacacccggctaattttggtatttttgttgagatgaggtttcgccatgttacctagacaagtctcaaactcctgggctcaagtgatctgtccatctcagcctcccaaagtgctgggattacaggtgtgagccaccggcctcagagatctaaaacaagatattgtattttaattgcacaggatgcaattaaaaaagaaaacattcagaaaacaagaagagctcttagaactgaaaaataagttagtgtaaaggttggaagataaaattgatactaacctgaaaagtattagaaaaaaaaaaaaaaaaaaa

SEQ ID NO: 2151 - DNA, 3382 bp, Homo sapiens
  SITE (18): n equals a,t,g, or c
  SITE (2320): n equals a,t,g, or c
ggacaaaatgaagagttnccttgtacatgcccactatgtacctcagacagagggagctgtgttagtacaactgaagggatccaacttgcaaaagaactaggagcaacctatcttgaactccacagccttgatgacttctacataggaaagtattttggaggagtgttggagtattttatgattcaagccttaaatcagaagacaagtgaaaaaatgaagaaaagaaaaatgagcaactcctttcatggaattagaccacctcaacttgaacaaccagaaaaaatgcctgtcttaaaggctgaagcgtcacattataactctgacttaaataacttgctgttctgctgccagtgtgtggacgtggtattttacaaccccratttaaagaaagttgtagaggcccacaagatcgttctctgcgctgtaagccatgttttcatgctgcttttcaatgtgaagagtcccactgacattcaggattccagtatcatccgaactacccaggatctttttgctataaacagagatactgcatttccaggtgctagccatgaatcttcaggcaacccaccattacgagtcattgttaaagacgccctcttctgttcttgtttatcagacatccttcgcttcatttattcaggtgcttttcagtgggaagaattggaagaagatatcaggaagaagttgaaagattctggggatgtttcaaatgtaatcgagaaagttaaatgcattttaaaaacaccaggaaagattaattgcctaaggaattgcaaaacctatcaagccagaaaacctttgtggttttataacacttccctcaagtttttccttaataagccgatgcttgccgatgttgtcttcgaaattcaaggtacgacagtgccagcccacagggcmwtcctggtggccgttgtgaagtgatggcagccatgtttaatggtaattacatggaagcaaagagtgtcctgattcccgtttatggtgtttccaaagagactttcttgtcatttttagaatacctgtacacagactcctgctgcccagctggcatattccaggccatgtgtctcctgatctgtgccgagatgtaccaagtgtccagactgcagcacatctgtgagctgttcatcattacccagctgcagagcatgccaagcagggaactggcatccatgaaccttgatatagttgacctgcttaaaaaggccaagtttcaccactctgattgcctttcaacctggctacttcatttcattgctactaactacctcatcttcagtcaaaagcctgaatttcaggatctttcagtggaagaacgcagttttgttgaaaagcacagatggccgtcgaatatgtacttgaagcagcttgcggaatacaggaagtatattcactcccggaaatgtcgttgcttagtaatgtaacctggagcttttatacactacatttcttttttattattatgaagaatgggatacctccaggttccagtaaaattcttctgaccgaaaccaatgtgggtgttagaaaaattaccatatagcttaatatgtttattagttctctttggaaaaaaactaccactgtggtcttaaaagggarcaaaatataccataggctaaaactaaggctttcactctagaatgcaaagctgttttgcagctgttttcccttaaagatgtcctgttgctttagtgatatttagacccctctcagttaagaaatgcttagattaaaaaaaaaaaattacgtaggattaatacagaaatttaatcatgtctgattaattgctctattaaaataaggggcatttaaagacccagcataaccatttgtataatgagaaatctaggggaaaaccaatcagtccaacatgagattttaggaatagaaatttgccggccatttggaaagtgaaatgccacttagttctcaattgatgacagtgtttgaatcatcataaaaaaaatacctgcttttcatctggacaacccaattgagccactttatctccttttggcaatctgagtaggcggggaacctaggcagggctggctttcttagcgtgtaacttgtgtagcagcacagggcccacacttagaaggaccccacacttggttcaaggctctgctatagcggaaattcttaataatgtttgaagaagggccccatgatttcattttgtgctgagccctcaaaattatgtctgtttcgtggtgggaaatatcctatgttttcttgctcaaacacctttctctctgaaagcagaaaaaggcactgatataaagggaagagaaggaggctcaccggaggnaagagaacatagtgaagattcccgcctttggggaggtctggaccacccagggcctccactgccaccttggctggcaagggagaaatgtgttgtgttgtcttagctttaaaacagtgcacagttcttgctctatcatagatgaacaaatactttcttgatcattctgtaagaccaggaggttggtaagagtgactaaccagcctaactttaatacacatgtataaagatgttcacagagaaagatgctctgtagagaatttgctaccgaagttggctcaagaatttgtttttagtgttatttaccaagattaggacgtcagtggcttaaattctttgaattcttttcaaggactgcaagattatttgataaagagtagcatgaatcttgtgctctaatattacacagtaagttcaaagaaaggatgtaagtcaaagacttgttacatagagggaaaatggactgggatagaggacagactgatagtttctttctttcatatcacatgtatagagaaataattatatcagaaactcacaaacctagacatggaaaaacagattactgtctattgtcagcatcattttcatctgtaagtcactactggaatatatttttcttttaatttccagtgactttagaatacacacagtttttccgacttttcaaaaatttgattaaatggttttatagtataatattgggaccccataccgttagcccttgtatgtataccaacactgccaaagtaaaacattaggtcaggcatggtggctcaggcctgtaatcccagcattttgggaggctgaggcaagtggataacttgaggtcatgagttcgaaaccagcctggccaaaacagtgaaaccccgtctctactaaaaatacaaaattagccagatgtggtggcgcacacctgtaatcccagctactcaggaagctgaggcaggaaaatcgcttgaacctgggaggtggaagttgcagtgagccgagatcgcaccactgcactccagcctgggtgacaagagcgaaactccatctcaaaaaaaaaaaaaaaaactcgta

SEQ ID NO: 2152 - DNA, 1408 bp, Homo sapiens
ggcacgagccctcgagtccactgttatttccttcactttcaataggctgtcattaaattctccttccccattatcagtgccactgcttcttctcttccatgttcacagtcttacttttagagctgtttagtcatcctacctatgctggtttctccatagcctttgaattctgtgtttgatacttttgaacagaacatctaaaagctccctttctgtattccaacactcatagggtgattctcattaagaaaacaaaaccaaaaattgagctcagactaaaggaattcttttttgactaaatagtgattaagttatgatattcctgttggcctaagaacaatgcctatgatttagttgtgttatgtatatttgtacttataaccaaacaatcgattgggtacaagtagccttagggcaatacttccttaaaaacatgtttctgataaactaaagctttagcattaaccagaagtcataatttaatagtattgtaaaaatacctcatttattttaaatcctgtgttgggtagaggattacagttgtcatttcaaatacatgaatctcttgtcaaaagagtactttgacagtttcatggtaagaccccttcatatactacctcaaggagtgagatttttattgtgcatgttgtttggatgtatggggttggagaggtaggttgagcctaaaatttcctaattactttactcttttacgtgtttcttattgcaaaggcaagaaattgttttcaagtttgtcattactaataacaaagagatctttttgttttttggcagtggtgaggatgagattgatggagttgctgctttagcttattggaggtgtggatcattttattttttgtgtttgaccggtcaagtgacttagtgagaagggggaagtagtagaacaaggagttccatctgtaactgtgaacagtcaattgtgataactcactacctttagaccagtcaataattattttaaagcctgggattatacaatatttgttaactatggtatcaatttgtaacttaaattcatctcaattctttgtcctaagcagctctcagtttcattttttttgtttgctgtagaagaaaatattaagccaggctgggcacggtgctcacgcctgtaatcccagcactttgggaggccgaggcaggcggatcacgaggtcaagagattgagaccatcctggccaacatggtgaaaaccggtctctactaaaatacaaaaattagttgggtgtggtggcgcacgcctgtagtcccagctactcgggaggctgaggcaggagagtggcgtgaacctgggaggcggaggttgcagtgagccgagatggcgccactgcactccagcctggcgacagagtgagactctgtctaaaaaaaaaaaaaaaaaaaa

SEQ ID NO: 2153 - DNA, 583 bp, Homo sapiens
cacgagcaggaactcaaatgcttccacatctccctctctctggttctcttttatgcctctcatgttccgtccgttcattctcttgctctacagattggcttcctccatctgatagtggaacatggttgtcaaaactcacaaatttcacatcttgcaacattcaccatcagtgaggtgtttacttactttgagtttgaaaaattgagggaaaggctctgagtggccttgcatgggttagatgcccatctctggaccaatcagctatggccaggggtacaatctttaagaatataggctgggcacggtggctcatgcctacaatcccaacactttgggaggctgaggtgggaggatcgcttgagttcaggagttcgagaccagcctggccaacataggaaaaccccgactctactaaaaacacacacacaaatgagctgggcatggtggtgcatgcctgtaggaggctgaggcaggagagtcacttgaacctgggaggcagaagttgtattgagctgagattgcaccactgtactccagcctggataacagagtgaaactccatctcaaaaaaaaaaaaaaaaaa

SEQ ID NO: 2154 - DNA, 570 bp, Homo sapiens
ggcacgagctgcacatctcggcagagcgggcgctgaccctaccggccatgatggggctggcggcggggggtgggctcctgctgctggccatcacagccgtgctggtggcctacaagcgcaagactcaggacgcggaccgtaccctcaagcgtctgcagctgcagatggacaacctggagtcccgtgtggccctggagtgcaaggaagcttttgcagagctgcagacggacatcaatgagctgactaaccacatggacgaggtgcagatccccttcctggactaccggacttacgccgtgcgcgtgctcttcccgggcatcgaggcccacccggtgctcaaggagctggatacgccacccaacgtggagaaggccctgcgcctcttcgggcagctgctgcacagccgcgcgttcgtgcttaccttcatccacacgctggaggcccagaagcagcttctccatgcgcgaccgcggcaccgtggcctcgctcaccatggtggccctgcagagccggctcgactatgccacggggctgctcaagcaactgctggccgacctcatcgagaagaac

SEQ ID NO: 2155 - DNA, 2369 bp, Homo sapiens
ggcacgagcttggaatagggcatggcacatggtgacctcccagggccttaagcagtgacagtggggagtgatatactcctatcctttctcgcccttctcaatgaagccagtttctctgattagcttgtcaatattgagcctttggggtatcttggttgcatttttagttacagagtgcgcttgcagaaccctctcttctccttggccgctggcagctgttctctgctctccctgcctctgtcgtgcttggcctcctcagcaagcctgttggctgtgggcgtccccagtactccgtctgcatgcacactccttggggagtctcagccacctgggttctggccccacctccaagctggtgaacctgggtctccacccagtggccaggtgccttctgccggacgcctttgcctgcctgtcccacactggctcctcctccaaggctccttgactgttggtggcagcaccatctgacctagagctggagtctttttccttggggagggggcgtcccttgcccttagtgatgttgatttctgccagtgggctgctgccgtcattcctgtcaccacaggttctgcatgggctttggctgacatcctcccctccagcctggccaatttcaccaggcccctccatgcttcttggaaattctcctttgctgcttgttttagctttaaggaaagccccgatgtctcaacctgaccatcagggttcctggtgactgtggtctctccttgtccacccacttccaatcataaaactggcttccccagctctggtgcaggcccttcaaattcatgggcagaggttgtaggcagacatgcattgcctttccctgcagtaagattttgaaccccatctgctttgaggctttggggttactgggcaaatatacccatccctgcctgtcagactgtacctaggaattttggagagcaaagaaaatccttgtttctttatggaaaaaggaattgatgtgagctgtgcttgggttgaagctgcttttatgtggagaatgcaggcttccgcaacacccaacatagcccaccctgcatcctgtttcccctcagcagccctcccttcagctccaggctacatggagccctctgcttgtttttaatttacaaacttacgtgatattcaccaggtaccaccttacacgttagctcacttgattctcatgaccaccctgtgaggtgggtactcttatccccattttacggatgaagaaactgaggcacaaggtggttaatatttggagttgccctctggctccagcatctgttctggcaccatgtgctttcctcttggccatgtccctcctgtgccttcttgaactggcccttaactctcatgtccacatgctcagccccagggctggggctctaagggagaggcccctggcagctgttcttctcttccaggattgtggctgcacggctcaacggttcccttgatttcttctccttggagacccacactgccctcagccccctgcagtttagagggaccccagggcggggcagttcccctgcctctccagtgtacagcagcagcgacacagtggcctgtcacctgacccacacagtgccctgtgcacaccaaaaacccatcacagccctgaaagccgctgctgggcgcttggtgactgggagccaagaccacacactgagagtgttccgtctggaggactcgtgctgcctcttcacccttcagggccactcaggggccatcacgaccgtgtacattgaccagaccatggtgctggccagtggaggacaagatggggccatctgcctgtgggatgtactgactggcagccgggtcagccatgtgtttgctcaccgtggggatgtcacctcccttacctgtaccacctcctgtgtcatcagcagtggcctggatgacctcatcagcatctgggaccgcagcacaggcatcaagttctactccattcagcaggacctgggctgtggtgcaagcttgggtgtcatctcagacaacctgctggtgactggcggccagggctgtgtctccttttgggacctaaactacggggacctgttacagacagtctacctggggaagaacagtgaggcccagcctgcccgccagatcctggtgctggacaacgctgccattgtctgcaactttggcagtgagctcagcctggtgtatgtgccctctgtgctggagaagctggactgagcgcagggcctccttgcccaggcaggaggctggggtgctgtgtgggggccaatgcactgaacctggacttgggggaaagagccgagtatcttccagccgctgcctcctgactgtaataatattaaacttttttaaaaaaccataaaaaaaaaaaaaaaaaa

SEQ ID NO: 2156 - DNA, 1936 bp, Homo sapiens
aacagaggaggcatacaatgacttcaggcaaagcagaaccttttgactcacacaacattatattattttgtcagctttatattttatgaaacatttttactatgagtgaggcaagagaaagaaaaaggaagagacagcatttggttatattacatcatttctaaaatctaatttcctggagtgagaatgacactaagggtacctacgagaacattccttcccatgtwaactaatagtgtaataaatactcatatagttactagttttagttgccaaacctagtttgtaaatggtaaatttgagaccagaactatattcttatgactatcagaccactgatagtttcactaagtcaactcccttcactaacaatttgattctacacacacacacacacacacacacacaccagtttcaacaattttctcataagctttaaatcaaattgatgagagaactttccctgtttttctgtcataaactacattatctgataaagttcatactatttttacatacatagattatttaacatactttgcctctcttgctgcagagaactttgcttaagatatacagctgatctattctaatttcatgattatctatttatatttatttgttgttattgttgcttgaacactagttttcgagcagttttagagatgataccacttttacactgtttttctctctaattttagttccttatggttcctggtataaacatgtaaaatcttggtgggaaaagggaaagagtccacgtgtactatttcttttctacgaagacctgaaagaggatatcagaaaagaggtgataaaattgatacatttcctggaaaggaagccatcagaggagcttgtggacaggattatacatcatacttcgttccaagagatgaagaacaatccatccacaaattacacaacactgccagacgaaattatgaaccagaaattgtcgcccttcatgagaaagggaattacaggagactggaaaaatcactttacagtagccctgaatgaaaaatttgataaacattatgagcagcaaatgaaggaatctacactgaagtttcgaactgagatctaagaaggtctttctttacttaacatatctgatattaaagatttcttttcattattctccactttttcttattttagattgctagaaaagacataatcatggattatgttgacattttctttttaaatttttgtttaacttttttttttttttttttgagacagagtctcactctgttgcctaggctggaggacagtggcacaatcatggctgattgcagccttgacctccttgactcaattgatcctcccatctcagcctcccaagtagctaggactacagacatgtgcaaccatgtttggctaatttttttaatgkttttttgtagagatgaggtcttattatattgkccaggctggtcttgaattcctgggctcaagcttcccaagtagctgcaacaacaggcacacaccaccatgctcaactaattttatttctattttttgtatagacaggggcttgctatagtgtccaggctggtctgaaacccttgagctcaagtgatcttcccacaccagcctcccaaaatactgggattacaggcttgagcctccatgcctggcccaggtaacatgtttattgagctgtacatgcatatgagaaataagaaacttttttttcctactatcatctcttaaattttgttttctttttcttttgcttcctcttcttcttttctattttttataaatatcatgcacaactataacctatgggaatgatgtagtaacacagattattcatcttgttagagttgtattaaaaataaacaagcatttcaaattaaaaaaaaaaaaaaaaaaaaaaaaaaaaaaaaaaaaaaactcgaagagaactagtctcgag

SEQ ID NO: 2157 - DNA, 1879 bp, Homo sapiens
ggcacgagcagtatggctgctgcatttcggccctcgaatcgagttctcctgcaggcgctgcagattttggtgtatcctggggtgggaggctccggctctgtcagctgccgctgccctctcggagctaaaagatacctacttacagataatgtggtgaaattaaaagaatttcaacaaaagaaagtggctgttgcatgtaatctttctggcactaaagaaacgtattttagaaacttgaaaaagaaactgacccagaacaagctcatcttgaagggggagttgataaccttactacatttgtgtgagtctcgggaccatgtggaactggctaaaaatgtcatttacaggtaccatgcagagaacaaaaatttcactttgggggagtataaatttggaccgctttttgtgaggttgtgttacgagttggatctcgaggaatctgcagtggagctcatgaaagaccagcatttacgaggtttcttctcagactccacatcattcaatattttgatggatatgttatttatcaaaggcaaatataaaagtgctttgcaagtattgatagagatgaaaaaccaagatgtgaagttcaccaaagatacctatgttcttgcttttgcaatttgctacaaactgaatagccctgagtctttcaaaatctgtactacattaagagaagaagctctactcaaaggagaaattctctccaggagagcatcctgtttcgctgtggcattagctctgaatcagaatgagatggcaaaagctgtgtccattttttctcaaatcatgaatccagaaagcatagcctgcattaatttaaatctggccaaagtgagggaaaaagtgaaggatgtgcctgcccttgtggccaaatttgatgagatctatgggacactgcacatcactggccaggtcaccactgattctttggatgctgtgctctgccacacccccagggacaggaaatctcacacgttgctattaaacaagaggatggtcagccgtcgcaccttccagccactcagccagtccctgttggctgagtaaccctggtttcagtccacctatggatctgaggggcctgcttctagtgagttattacctttcctaagaagccaggtatcgcacttcagcagacagtgtgctgacacttggtcttctcctgaaattcccaaattcactgaatggtaccatgccgatctctgagaagttatgttgcaccactgtgaaggtctagatgcaagcttggctccctcagaaaggcgcttcccttttgcatggctgaggatccttgaaggaacctggtcagtctccggttcagcttccgacaccagagtggaacccagtaagcaccatcaggaatgaatttcactacaagtgtggataactctgattttcaaaggagtagttacttgcaaattacatccttgctgaattcaggaggtatgaaaccctattttaccatgttagaaaacagcccaggattttctcattgctctgccatcatatatgtctatgacttgagcccttatttttccatctgcaaaacaataatgcctatgtgtctttgcatatagatttgaaatcttcattcaaggtttagtaggatcatattttctcaaaaataagagaaataaggttcataagcaaacttgctgggattgtggttgttttgttttctcagcagcacaaacaaaaccagaatttagcctttaggactgctgagtaagccaaatttaaatgactactgctttgttcatgggtaagccatgtgcttttcaaaataagtgccactaaaaaccacataatgctttggtttctatgtggataataaatatttagtcctatagtttaaaaaaaaaaaaaaaaaaaaaaa

SEQ ID NO: 2158 - DNA, 1089 bp, Homo sapiens
  SITE (3): n equals a,t,g, or c
  SITE (8): n equals a,t,g, or c
  SITE (585): n equals a,t,g, or c
  SITE (1071): n equals a,t,g, or c
  SITE (1075): n equals a,t,g, or c
  SITE (1079): n equals a,t,g, or c
  SITE (1080): n equals a,t,g, or c
  SITE (1086): n equals a,t,g, or c
tangtggntccccaggggtgcaggaattsggcacgagctttgaaggaagcagaattgaagatgggaagttcattgggactgtgtcttggaaaagcaccaagttcgtctcagttgttcctgttttttgcaatggggagtgacgttcaacctgggacagaaatggaaatcgtagtagaagaaacaatatctgtgagagattgtttaaagttaatgctgaagaaatctggcctacaaggagatgcctggcatttacgaaaaatggattggtgctatgaagctggagagcctttatgtgaagaagatgcaacactgaaagaacttctgatatgttctggagatactttgcttttaattgaaggacaacttcctcctctgggttcctgaaggtgcccatctggtggtaccagcttcagggtccctcaggacactgggagagtcatcaggaccagaccaactgtacttcgtcttggggcagaktttggagagccayttccagccaagktgcttctgggaacgagcctgcgcaagtttctctcctctacttggggagacatagagatctcagaagatgccacgctggcggantgaagtctcaggccatgaccttgcctcctttcctggagttcggtgtcccgtccccagcccacctcagagcctggacggtggagaggaagcgcccaggcaggcttttacgaactgaccggcagccactcagggaatataaactaggacggagaattgagatctgcttagagccccttcagaaaggcgaaaacttgggcccccaggacgtgctgctgaggacacaggtgcgcatccctggtgagaggacctatgcccctgccctggacctggtgtggaacgcggcccagggtgggactgccggctccctgaggcagagagttgccgatttctatcgtcttcccgtggagaagattgaaattgccaaatactttcccgaaaagttcgagtggcttccgatatctagctggaaccaacaaataaccaagaggaaaaaaaaaaaaaaaaaactcgaggggggcccggacccaattcgccctatagtgagcngatncaanngcgccnatt

SEQ ID NO: 2159 - DNA, 2957 bp, Homo sapiens
tgggaccgctgtgtagtagggggctacctctctccaaagacagtcgcagatacatttgagaaggtagtggctggctccatcaattggccagccatagggtccctcttggactatgtgatmcgcccggccccacccccagaagccctcacactggaggtgcagtatgagcgtgacaaacatctcttcattgacttcctgccatcagtgaccctcggtgacacagtcttggtggccaaaccacaccggctagcccagtatgacaacctgtggcggctgagcctgcgtcccgcggagacggcacgcctgcgggctctggaccaggctgactcgggctgccgatctctgtgcctcaagatcctcaaggccatatgcaagtccaccccggctctgggccacctcactgccagccagctaaccaatgtcatcctccacttggcccaggaggaggctgactggtctccggatatgctggccgaccgtttcctgcaggccttgaggggacttatcagctacttagaggctggagtcctgcccagtgccctaaaccccaaggtgaacttatttgcagagctcacccctgaagaaatagacgaattaggatacactctgtattgctcattgtctgagccagaggtgctgctgcagacgtagggcaggtgaaggccaaagcgggtgttggtggtcaggccctggattctccgttagatacacttggctacctagttggtgcctcacagggttcctgctgcctggtgtcttgctgatcatcaccctggtcacttcatgctgattagaatgacatctctttcgtctcctattttgttacccaactcttcctatttttgttaccaatcactgtgctctctgccgccccctggctccaggctaatttttctggaatgaattgagaaggtggcgtgctggcctgagctgatggaccacttggtgttttgcgttttggcccatgtttgctgcctctatctggtctgccttgcccgtttgcctgttcctattcagtgtcttttctattttttcctctctcgttcatgccttctgttttgctcttgtccctggagcatatctgcctaattaagatgttgccttttagttgaatgccactgaagagctgtgatagcatgtttcaaagctgaactctacagagcgagtgctgagacagtatttagggtttctgggagtgaggctggtagaagagttggcctttgaccacggttcctggagtagaagtccatcctccccccaacctcctgacccattcataaatgctgagaatgtctctcatgggaacactgttaatgacccacacaggataagctgaatgcaaagttatttgcaggttgaatttcttggtggctattagcagaagtgcagagtagggaaccagagctggttaagggcctagtgaagggtttgtgtgcccagtgtctgctcgtcatctgtggctgcaggggtcagacagacaaggatggggactgccagggcaccacttcatcatgaatgctggttttcacaccttttccttattttattgccaatcaggacaaggccttgaaggaacgcagccttagacatcaggtgaggatgatggaggtagacagtcgactgaatgtcagctggaaaatccagtcactagttggggtttggtggccatgttttctacccagacaggccctgcttttctaggatgtggccttagagcaagaacagacccaacagccagcccttcatcctccagcgtctgccataggaatgtgagaggggtgtttgctgagcgctccgggcacggccagagggcaagtgagcatgcacggacctcttccccctgtcctgtttctcacccagcacctggggagatcggtgctaccaaggaagagagcacacagataagacagaggggaggaggtgggcatttcctacattcctccttgtttgccgctgctgagattgcagtatttattgcaatgtaaatgtatcctgaaggtggggaggaatgtttaatctaccatgtccgtgtgtcatcttggtttgtgtttttccctgtttgtagcaagactctgatgataattctgtttctcatctgcccattcagtattttgttttccttccgtcaagttgtcttattttttcaatgactacctctccatcattgaggttctggtgaagctctctgcagctgtctcattccttcccaacgatagtaacaggaaatgactctttagcatcgatacctcaacatcaatttagggtagagattcctgcccctcttttgtcacagattaggaaattgagaactagggttaaccttgactatatttagaggtctttttgcctcttttccccttaacaaggatttcttatggtggtttcagtttcatttgcataaaggtattgagagggaacaaaaaacataaagctgagaatcttgagagagctcatctaccctgtctgttggtcagactcaaatgagagttaaaaaaaaaaaaaaaaaatctktatgcctgagtaccatcctggatgaatctagaaggtatggggtagagcttgacagggttcctgtgtacccactgggtatccgttagaggtaagggagaggagaggattgatagagtgttgcaaaagtatagattattcattgagataaaggatttggtttccctgccatgagtattaaaaaaatttaagttttcccaagcttgcatctctgaccaaatttcacataaaacattggaaggaggctgggtgcggtggctcatgcttgtaatcccagcactgggaagctaaggcgggtggwtcacttgaggtcaggagttcgagaccagcctggccaacatggtgaaaccccgtctccacgaaaaagataaaaataagctgggcgtggtggcaggcgcctataatcccagctactcgggaggctgaggcaggagaataacttaaacccg

SEQ ID NO: 2160 - DNA, 1419 bp, Homo sapiens
ggcacgagctcgtgccgaatagacattgtaaatcttaatatttatgtatgtattttattattaccggttttccatttatgatggtaatattgtttcttctaagaatatttatttttccttctaaatattgagataaaattcatgcttttgaaatgttctattcagtggcttttagtatatttgctatgttgtgcaaccatcgacactatccatttctagaactttttcgtcatcccagacagacgctctgtattcataaaaaaataacttcctacctgtctctccccctagtctttggtaacctttgttatactggtaaactttgttggctctgtgtctgtgtggaatttggcctattctagggcctcatataagtgtaatcatcagattgcttttgggtctgtctgattcactagcgggttttcaggttcattcatgtgcagcatatacagtactgcgtcctttttctggctgaataatattccactgtatggatagaccccattttgtttattcacacatcatttggacatttggattatttctggtttttggctattatgaacaatggtgctatgaacagttgcgtacaagtttttgtgtgaacatatgttttcaattctctcattatatacctaggagtagaattactgggtcatatggtaactgtatatttttgaggaactgccaaactattttcccacgtccatgcaccatttcacattcccaccagtaagtaagagggttccaatttctgcgcattcttgccaacactagttattatctgactttctggttataatcattctaatgagtgtgaagtagcctctggtgtcatttggatttgcatttctctgatgagtgatgctatcaagcacctttgctggtgctgttggccatatgtgtatgttccctggagaagtgtctgtgctgagccttggcccactttttaattaggcgtttgtctttttattactgagttgtaagagttctttatatattctggattctagacccttatcagatacatggtttgcaaatattttctcccattctgtgggttgtgttttcactttatcgataatgtccttagacatataataaatttgtattttaaaagtgacttgatttggctgtgcaaggtggctcacgcttgtaatcccagcactttgggagactgaggtgggtggatcatatgaggaggctaggagttcgaggtcagcctggccagcatagcgaaaacttgtctctactaaaaatacaaaaattagtcaggcatggtggtgcacgtctgtaataccagcttctcaggaggctgaggcacgaggatcacttgaacccaggaggaggaggttgcagtgagctgagatcatgccagggcaacagaatgagactttgtttaaaaaaaaaaaaaaaaaa

SEQ ID NO: 2161 - DNA, 2043 bp, Homo sapiens
ggcacgagcagccctcggccccatccctacgaccagcccttccgtcctgcccaccccggcagcgactggtgttcctgaagacacataaatccgggagcagctctgtgctgagcctgcttcaccgctatggggaccagcacgggctgcgcttcgccctccctgcccgctaccagtttggctacccaaagctcttccaggcctctagggtaaaaggctaccgcccacagggtggaggcacccagctccccttccacatcctctgtcaccacatgaggttcaacctgaaagaggtacttcaggtcatgccttctgacagcttctttttttccattgtccgagacccagcggctctggctcgctctgccttctcctactataaatccacctcatcagccttccgcaagtcaccatctttggctgccttcctggccaatcctcgaggcttctacaggcctggggcccgtggggaccactacgctcgcaacttactatggtttgactttggcctgccctttcccccagagaagagggccaagagagggaatattcatccccccagagaccccaaccccccacagctgcaggtcttgccttctggtgctggccctcgagcccaaaccctcaatcccaatgccctcatccatcctgtttccactgttactgatcatcgcagccagatatcaagccctgcctctttcgatttggggtcttcatccttcatccagtggggtctggcatggctggactctgtctttgacctggtcatggtggctgagtacttcgatgagtcattggttctgctggcagatgccctgtgctggggtctagatgacgtggtgggcttcatgcacaatgcccaggctggacataagcagggcctcagcactgtcagcaacagtggactgactgcggaggaccggcagctgactgcacgggcccgagcctggaacaacctggactgggctctctatgtccacttcaaccgcagtctctgggcacggatagagaaatacggccagggccggctgcagacagctgtggccgagctccgggctcgccgagaggccctagcgaaacattgtctggtagggggtgaggcttctgaccccaaatacatcactgatcgccggttccgccccttccagtttgggtcagctaaggttttgggctatatacttcggagtggattgagcccccaagaccaagaggaatgtgagcgcctagctacccctgagctccagtacaaggacaagctggatgccaagcagttcccccctaccgtctcactgcccctcaagacttcaaggccactctccccataaacatcagactacagatttaggtggaagagcagccatgtttgaagggcacatgtgatgagtggggggcagcaagatgccatttctgcatctcccagaagggatgagtctttgtcccaaatgcaagccccctcttcgctgggctcccagcagtgcttccctcctccaccctccactcattttgttctttccccccaacttttttttttttttgaaacggagtcttgctctgtcccccaggctggagtgcagtggcatgatctcggctcactgcaacctctgcctcccaggttcaagcgattctcctgcctcagcctccagagtagctaggattacagatacgtgccaccatacccggctaatttttatatttttagagacagggattcaacatgttggttaggctggtcttgaactcctcacctcaggtgatccacatgactctgcctcccaaagtgctgccattacaggcgtgagccactaggcctgacctccccttcccctttcctgccccaaggcagatccacatcaccgaagctccctagaggggcaaaagatggagtgagccacaggaagtttggggcgtggtgagttggaatgatacgtccatttctctatgaaatatttgctactagactgttcatttctctctgacatgtttgttgaatgaataaataatttgaaacttcaaaaaaaaaaaaaaaaaaaaaaaaaaaaaaaaaaa

SEQ ID NO: 2162 - DNA, 1484 bp, Homo sapiens
ggcacgagaaaattttaaaatatctattgaattttattattttttgacatcccttggtcatggggtttctgtcgtaaatctgttatatggtgagctgctttactggagtggactcaacgtggttattgtatattgtcttttttgtattttttattgatatagttgtacatatttttaggatacacatggtattttgatatctgtatgcaaggtgtgatgaccaaatcaaggaatttgggatattcatcacctcaaacatttattttttgttgagaacattagaatctctagctcttttggaacatacgataaattatgctaactgtaatcttcctgctgtcaaatactagaacttattccttctaattgtatttttgtacccattaaccaacttctcctcatcctgccctgccttcccttctcagcttctgggaatcaccattgtaccctctacctccatgagatccatgtttttgactcccaccttggcctcccaaagtgctggaattatatgcgtgagtcaccacgcttggcccaaaaacaatctttttgaaaaaactggggtaaaattcacatgacaaaatttgccatcttaatcatttttaagtgtatagtttagtagcactaagtatattcacattgttgtgtaacagagatccaaaacttcctcattttgcaaatctgaaactctgtacttattaaacagcttccacagtccctggtaatcaatcaccattctaactttgtttctgtcaatttgtctatttttgatacctcatataagttggagtcaaatagtatttgttttgtgactggcttattttacttagcacagtgtcctcaaggttcatccatgttataacatgtgacaagattttcttcttttttaaggctgaataatattgcattgaatgtatatagcacattttatttatctgccagtggacatttgggtttgctttctcctcttggcaattgtaaatagtgctgatgtcaacatgagtgtgcaaacatctcctcaaaatcctgcttttaattcttttggatatatatccagaagtaggattcctggatcttgtggtagttctattttcaattgtttgaagaacctccatactgctttccatggtagttgcaccattttatggtctcacctcagctttttaaaacctgtttaattttgaatcctaaccaacctctggtaacagataccaaattacagctagataggaggactgagctctcttattctgcagccctgtagagtgaatgtggttaactgtatttattgtatattttcaaaaagctttctgaaagagaggattttgaatgtttacagcacaaagaaatgataaatgtttgagatgctggatatactaattatcctgatttgatcattgcacattgtatgcatatattgaaatatcactcagaatcccataaacatgtacaattgtcaactaaaaaaaaaaaaaaaaaaaaaa

SEQ ID NO: 2163 - DNA, 2865 bp, Homo sapiens
  SITE (1965): n equals a,t,g, or c
  SITE (1971): n equals a,t,g, or c
  SITE (1999): n equals a,t,g, or c
ccaacagggaaattaccctcactaaagggaacaaaagctggagctccaccgcggtggcggccgctctagaactagtggatcccccgggctgcaggaattcggcacgagaaataagtgaatagaaactgttgctaatttgttcaccaggccttttccctgagaaatataaactgttgtcactttatgtccttattcatcacttcaaattgtttgttttcctgaacatttaccactaatatggaatttcaaaactgttgggttgaaagatcaatagaagagtatttgaaatgtattttgtgaaatcaaatgttggtacgtgatggacggacatatgcttattttaatagtttttaaaataatcaagtatttactaagtgccaggcacaagcctaggtgctatgaatacctgttggtgttcaggaactacatggtccttggtcctcgccctcatgaaacttatactcaagtaggaagtagacaagataatgtgaaatagtaacaaatgctgtgaatctaacacagtaataaaatagaatgtgtctagaactgggttctcttagtaaggatggtcagaggggttattaaagtaggtgacattttagctgagaccaggagtgataagaaggagccaaattgggtagaaaattgctttctgcaaaagcagtagaaagtacaaagaattttcaggcaagagtgagtaagggtttgtatgagtttggaaacgaattgtttgaagtgaaaagaagtaggcaagatgcatattgcataaggcatagggccatgttaaacaatatttggttacgctggatgtttctgttgcactctgaatggttagccatttcatgaactgaatttcagcaaggtgattgactttttaaaaaaaaatctttttcagatcaggtatttggatccaatctcgctaatctgtgtcagagagagaatggcacagtaccaaagtttgtgaagttatgtattgaacatgttgaaaacatggtttggatattgatgggatatacagagtaagtggcaacctcgcagtgatccagaaactaaggtttgcagtcaatcatgatgagaaattggacttgaatgacagtaaatgggaagatattcatgtcattactggagccctcaaaatgttttttcgagaattaccagaacctctttttacatttaatcattttaatgattttgttaatgcaattaagcaagaaccaagacagcgagtcgctgctgttaaggacctaatcagacagttgccaaagccaaaccaagacacaatgcagattcttttccgacatctcagaagagttatagaaaatggagagaaaaatcgaatgacctatcagagtatagcaattgtttttggtcccactctattaaaaccagaaaaagagactggtaatatagcagttcatactgtgtaccagaatcagattgtagaattaattcttctggaactgagttccatcttcggacgttgattcttactgaagacaacctgtggaatagaagctggattccatcagatttcaaatgtttatacacaatgtattttattttttggaccaagcagtgactctttgattttgcactttttttttgagggatcagaagggaaggggagagtcgagatgtgtgttaggccctcatatttgctgctttgttgcaagttgatataactgcgtgtaattatgaattcattttatcctgaatgtttgcatttcatactctgaatttcagtaaaaatcaaaacttaaaattctaaccagtcatatacactggataatttggtaagaaaactgtattttttttccctgaaattggataatgtactttcttctcaagattcatgacttgatagaacaatactttcagtatgtgcaaaggctcttggcattttaaacaaaatgaaagtatatccattttgaaacctgtgtatttctttttcggggtttctgcatncagtgncagtcttaagtgccaaaattcattatanccccaaaataaccccttgatgaaggcttgctgtcttttactgtgttacacagcatccttactgatatcttagttgcttgtttgggcagcacactaatattacttaaaacactgtgatatactggagttttagttagcgaagtcagttcagggcattttaggctgtcttgctatactgaattgtagctaacaatcctaattatatctagtaccatactgagttattggtatgaccctgtggaaacacacattattttatgtaaatataggctaaagacttaatgtcctttagcttgtgtatataattgtgttgtatagtctcagagtacattctaaccctacatttctaatcattgttattggtaatcttttctgtgaatattaggtttcctccagaaatggtccgttatttgggaaagttaactgtgtgcactttagatattaactacatttacaggcaaatcactgtaatgagaatggtactggaaaaatactgaatagacttgctaaatggcacatgcactacaagaggaaccttttgggttatttaatatgtacagaaaacattagaaaaaatttattacagaattctaattccagtatgaatagtggaaacccatctgtaaattagatggatgttggatggaaaatgacattgctaaatttgagaatttctttttacctactaatgtagattgctttgtataataaaacacagggtttggaaggttttgttacagggagcatggtctgttgaagatttttaaaatgtatttttctagattaacttctgtacatgaaatgtctaataaaactataagaggtttagagatttttccattggaaaaaaaaaaaaaaaaaaaaaaa

SEQ ID NO: 2164 - DNA, 1272 bp, Homo sapiens; identical to SEQ ID NO: 1551

SEQ ID NO: 2165 - DNA, 1529 bp, Homo sapiens
ggcacgagcaagccttcaactttcgcagagaaaatgctcaaaaacttcagtttcagcagtgcccagcaaagggcaagtgcggtcttcaaggaggagctgggagatgatgagcgatgggaggcaagcgtggggactggcgggaaggcgggagcagctgaggggatcccagtggacccaaactacaagttggggcttgcagggagcctctgctgaaggtagtaggaaatgtgcttcttactgctcccttgtcttctctaatactcctcttagttcttttcctcttgcataccttttatttctggctaagtgttgggcattgttgtacattttctagcttgactcccttgggcaagttactttctgtctctgtgcctttgtgtcttcatgtttaagatggaaagaactgcagtgttgacctcctagggctgttgttagaagccattgaagacacagagaatacttagaataatagttggaacttggcaggccctgagttaattcactgccatcattgtcctcgtgcttcatagcagtagccgtgttgctgctcttagcctcagttctttcatgggcttctttcggttccttggaggctcccaagcaaaggtttttcagcacctctgttctgtgaaaaagagattaagcattttcagtatatttaaagttatctccagcctattgtgatgatgccttttctccaaaacccttttttattttcgttttattgtaggcacaaatctttctaatgcagatgcttaatttttcccaaaaagcaacttactcctttcaacaaggttttctatttggtcatcacatctgcattcttccaagaagcccactggtaaataatggaacaatgaagcagtgtcgccactaaagagtaatctgcaaccacacagaagctggaatcccaagtacctgtcattatattctcctacacatgtgcagagtttgataaaaagagagagccagttttattattcctttaagaggaaaaaactgccaagaactcctaagctttaattaccaaaataagcttgccttaaacaaattcaaacacatgaacacaaagtagaagatcaaatgcattttgtggccccatgcacatatatcttccatgagcttgtatcttcaaggtaacagtgctgcgtctttaatacccattagcgctgcactgtctaaatggtgcacgccagaaaagagccgtctctaggtgtctcaatgaaccatgaaaatctcagggaaaatgtattaatatatttttcagcaaatcctttgagatgaggattctcaggaaggattttagtgcattatgcaatgtagttgaattccctcttcagtattgaatatgctttgctttattccaaagagctcaacctcttcctatagacattgaaattcatctgtttcattcatagcaccacgtaaactttttatttttgtctcaaacttctctgataagcttgcctctgcatacaaaaacatcaaagcctgtggtgaaaaattattagaaaaaaaaaaaaaaaaaa

SEQ ID NO: 2166 - DNA, 1314 bp, Homo sapiens
gcacactactgaatcttttccaatcaagctgtcactcccacccttcacctcccacacaaacaccccatcacactactctggtcaagttccagtgacctgcacattgccaaagccaatggtcaattcctagtactcatattactcaacctatgagcagtatttgttacagttccctccttctttaactttttccattggttttccaggactcagtactcttaatagctttcctcctaaatatccagtcgttctcagtctccttttctgcttccacctcttctttacaatttctaagcattagaatgcccccagggcttagtccttggactttatctatgcttactactttgctgacttcattcattccatttaaatactctgcctatacggatgtcttctaaatagcaatagaaataatctcagcctcctccctgattttgttggtccagatattactccttggatgccttattagcatctgagatttaacaggttcaaaatttwagctcccgatctctgccctaccctcacctcaatttactattttcactgtctttctcatgtcagtaaatggtaacttcatcttttagttaactggaccaaaactggcagagttatcctcagcccttctctttccctcctgtgctttatccaaactcttaggaatccagtcagctctatcttcaaaatatagctgctaccccatagtacttaatcatcattggatataaattccatgtaatcatcttgtttactacctgtgcaccacccacctcccctatccaccctccaggccccagcaacataagctctatgacaatatggagttccatcagtctcagccaatgtgtaggaagaggcagatgaataaymyygaaccaccattagcatggcacttctttacttcacttctttactcctaatacctagaacaatgtctagcacattgtatgttctcaataaatatttggtgggtggttagagggatgaatgcatgaaaggatgaaaggaacacatgaaaggaaggaacatcaaaggagctgagcttgagtcttccctttgccctttattacctgagtgactttaggcaagtcagttgattttcactgaacctttcgtcttatttagaaagttaggggataaaataggtcctattctgataaaataggtttgttctgagaatcagatgagagaataaacatatattttcttgataactagaaagtcgtatacaaatgttagtcatgataaggagggagaaaaggaagggaaagactcgagggggctaatggttgccaaatgagaggtctcgag

SEQ ID NO: 2167 - DNA, 2354 bp, Homo sapiens
  SITE (2180): n equals a,t,g, or c
  SITE (2255): n equals a,t,g, or c
ggcacgagaacaagtccaagcttcttaaaatgattggtggttaatttttcaaagcagaaattttaagccaaaaacaaacgaaaggaaagcggggaggggaaaacagaccctcccactggtgccgttgctgcgttctttcaatgctgactggactgtgtttttcctatgcagtgtcagctcctctgtctggttgtttacctgttcctgttcgtgcttgtaatgctcacttatgttttctctgtataacttgtgattccagggctgtttgtcaacagtatacaaaagaattgtgcctctcccaagtccagtgtgactttatcttctgggtggtttgatagtgtttttaaaagtaatatataatgtggggtgaaatgggagtaggggggtggacaggggagaaacgaaaaccacaaaaagaaaacccaactcctctcctccccccaagctcagttaaatcccccacctccaactttccctccaccagtgtgcttgggatcttcaatgaactgtgcttttcgctttctttctgcatgactattgtaactagatagaacattaagagattttcaagatcaaacttccatagcttcatccactgaatttgaaggcatccacctttttctccatttgctaaaatttggtgcagtttgagtttatgtgaataggctggctgtgcctgtagagctcttgtgtttttagtgatgacatgaaatacaaagaacaagctatttccaggaatgtgttctgtattttacatcccagtgtaccctttattttattattaactaattaactatgagatttttaaaaaatggggccgctgatgtgcaatatcaaagtgaacttgtgagtattttgtgtgtgttgatctcagttgtttcttcattgtgctgtttctggatccagccatgtgtgcgcttgtgtggacctgaggctgctttctgttcccaaagcttgacctgtgtacagagataattccttggcaatgttggacatagaatgcaggagctactgaaggtctgtcagggatttgtccattctgctcttggcctctcctgaggcctcataatgggagaccaaatcaaaaatgtcccatgtcacttgagtgggtacactgcctacagaaccttgaggttgactcctgcttcagttctcagctgtttaccacagccctccagggtccaaagattgaggagctttctctttcctgggaggaactgtctcagatttagcttgtgtgtgttttggacagaggctccacagcggtggctcttgaggaatcctcaccagtttgttctcttccctctgacaagcagcacctgagcagatgctgaggcagttcattaaaccaggcctcagcttcagtgcctcatcttgccatctcccggccaggctgggaacgggcaccaagcagccgcctctaacaaacaccatggtccgtggaagttcatgccagcagcttgcctttgagaagaaatgctgctggctctatttttacattcccttccacctctatactgtcatgtcaccgttctgaactcccagatctgagaaggaactagtgttggtggtatgtaacaagagttacgtatccaggggcttgtgccttggtttctcctttgattgctggtaaattctgaggccacagagaaatgcattgagtgtgaatgttgtcatctgtaatccctccctcagctgataatggtagttgatctgttgtaaatatatacatatatgcatatttgcacttccagatgggttgcataagaatcaggtccttaaatacctcccaatctgatgaaacgatagaataaagtaacatttcccagaatggaggaatacattattttatcgtatatttttgtccaagcgatgagctgacggtggtattgcttctctgcatgttatcagtgtgtacatctggtgcttttcatgtgtcatttgtgagccacaaatgcaaagttgccatttgaattcagtcaggctacagggtggtgtcagtcaaggtctttcaggtgggggagaaattggttagggctcccactgccaaatgcaagcagatagcataacctgactgttatgtgccctcaggcagcatgcttagggacaactctgtggcctgggggacatctgtgtcacagtataggattgccattcaggtgttttgtacctatttcttncctgacgttgtcccctttttttgtactgatccaactgggagaacctcagccaatgctggaagtatgattgaagtncctctcttttgtgactcttgtacagcttaatgtgcaataaaggaaaagttatatctgtcaaaaaaaaaaaaaaaaaaaaaaaaaaaaaaaaaaaaaaaa

SEQ ID NO: 2168 - DNA, 744 bp, Homo sapiens
  SITE (14): n equals a,t,g, or c
  SITE (21): n equals a,t,g, or c
  SITE (706): n equals a,t,g, or c
  SITE (744): n equals a,t,g, or c
gaattacccttccntaagggnaccaaagctggagctccaccgcggttggcgcccgctctagaactagtggatccccccgggctgcaggaattcggcagagcgggtttagtgattatctttattgatcagaaaaaaaaaataaactcacattgttgggataatctaaaaataacatcatgatattacagcataccatgaagaagttaactctaaaggcctacagtatataatagtttgagtttggaatcttttttttgtgtcatgcataactcaaactttgcatatcaccttcttcttaatctccagtgagtaactgctttatagtttcagactccaagttaggtcagaatactcaatatcaaatacttttgataataccacaaaatttaccaaagacatagatattttaaaaacaaggaaacaaacagaaatcttagaactcaataactcaatggatgatataaaaaatacaaatgagaacttcagcaataaagtagatcaagcaaaataatgaatttctgaacttgaagacaggtcttctgaaataacccagtcagacaaacaaaaaaaaaaaaaaaaaactcgagggggggcccggtacccawttcgccctatagtgagkcgtattmcaattcactggccgkcgttttwcaamgtcgkgactggggaaaaccctggsgttacccaacttwaatcgccttgcagnamatycccctttcggccagstgggsgtaatagcggaan

SEQ ID NO: 2169 - DNA, 372 bp, Homo sapiens
  SITE (368): n equals a,t,g, or c
gaattcggcacgaggtggaacccaaaacgggttttggtttgctgtgctgctatgaaagtacacaaaagtgtgctgtgtacactttgtgattgcctctgaaattcgatgtggtttattctagacttgggtgtggtgtaggcagggcctacatccaaggagctgattggtcaatgaaggcgcctccctctcattggtctctgtggctgtcattctgtcaccctcctccctggctctttgccctcaataaactggctcaaagagccttggaaaagcattttattcccagctcttatgcgaactctgtgtagaccctggacaactaaatctgctttcccatttgcaaaaaaaaaaaaaaacccggggggggncccg

SEQ ID NO: 2170 - DNA, 427 bp, Homo sapiens
ggcacgagcatgaccaactagaattaaagtaagtgtaaacagtgaacatactgtatgctgtacaagatataatgtaacttgctgttttagcatctgtattttggttagaagatattattaaatgcagatgttaaggattggaaaagtctaattttatttttagaaataatggatataaatttgtttttgcttgattaaaatagcttattcctacattaagtctctttttaaatgttttcatgttatttcttttgtgcagctatttcatctgtgtgagtcacagctttgtttccacgtattattcagtttatttctgtttccttacttgtttacattccgtggtacctacttacatgcttaggagtcaaatggattatgacattaggaaaaaagcagaataaaagagattgaagtcttaaaaaaaagg

SEQ ID NO: 2171 - DNA, 304 bp, Homo sapiens
cggcacgagaaaacatccaagcttcttacctgtagatagaatcagccctcagttggtgcttattaccagttattcaagaacaataacaacaacaaaattagtagacatccaagaagcacatattaggaccaaagatagcatcaactgtatttgaaggaactgtagtttgcgcattttatgacatttttataaagtactgtaattctttcattgaggggctatgtgatggagacagactaactcattttgttatttgcattaaaattattttgggtctctgttcaaaaaaaaaaaaaaaaaaaaa

SEQ ID NO: 2172 - DNA, 400 bp, Homo sapiens
ggcacgaggaaatgagttaagactttggggactgtgggaagggcattgttgtgttttgaaatgtgaggacatgaaatttgggagggaccaggggcaaaatgatatggtttggctgtttccccacccaaatctcatcttgaattgtagttcttagtccccatgtgtcatggaagggacctggtgggaggtaattgtaggtggtttaccccatgctattcttgtgacagtaagttctcataagatctgatggttttataaggggcttcccactttactcagttctcattcttctccttcctatcaccatgtgaagatggacatgtttgctttcccttctgccatgattgtaaatttcctgaggcccccccagccctgcagaactgtgagtcaattaaagcgg

SEQ ID NO: 2173 - DNA, 703 bp, Homo sapiens
aattcggcagagggcgatttgtgcatgcctgtgacacctttctcttcattcttctgtgcctctatgattgttacaccttttttattttttttcttttttgagacagcctgggcaacagagcgagactccatctcaaaaaaaaaaaaaaaatatatatatatatagatagatagatagatagatagatagatagatagatctgtgcttccttgttcccatgttttgtacatgctatttctcgcatctgcaatgtccattctcttcttccattccccaccttttcctcactcccaaatggataactcacacttgctctttaagattcaacttacatattattttctttgtgctccagtagctctttgcatttctcttataggaattaccatgttgtgtcttgtctgtctgttagtttctctcataagaatgtaagttcatcaaaggaatggactgtgtctcattttagctttgtttctgagcccaaagctagaattgtgtttgtttagcacaatgcttggccacagcaagcatctatgatgttgtttaaactgactttaatcctataaatcaatgtctcccctcaaatgtgtcccactagtaccaggagatttttcaggaaaatgtcctatagtctaataatttggcaaatcacaaattctatgtaatagtgtatataggctctagaaagactagcaaaaaaaaa

SEQ ID NO: 2174 - DNA, 675 bp, Homo sapiens
aattcggcacgaggaaaatatagaaccttttcatcatcacaggaagctttcatggacagtgctgctctagagtatatcaatggcattggaaattcataagccaagagtgtctttcaaatatcagctaattaatgaactaatatcacgtcagatatcacctctataacatttwaaaaatactcattgtgctattatggctagtgctgcaatgaagatgaaatcaacctaaatgcccatcaatgacagattggataaagaaaacgcagtacctatacaccgtggaatactatgcagccatgtaaaaagaacgagatcatgtcttttgcaggaacaccaatgctgctattattctcagcaaactaatgcaggaacagaaaaccaaatactacatgttctcacttataagtgggagctaaatgataagaacctgtgaacgcaaagaaggaaacaacagacgctggggtctatttgagcgtggagaatgggaggagggagaggagcggaaaaggttaactcttgggtactgggcttaacacctgggtgatgaaataatgtgtacaacagaccctcaggacatgagtttacctatgtaacaactatgtaacaaaccttcatatgtagcccccaaacctaaaataaaagttcaaaaaaaaaaaaaaaaaaaaaaaactcgag

SEQ ID NO: 2175 - DNA, 432 bp, Homo sapiens
ggcacgagaaggtattccatgcaggtgaattttctaaaaatactttactgacacaatttaaaaacacttttgatgctcatctttattaatcatattataattagccttttccccccagaatatatagagcatagtttaacccttttttaatgactcagaattatcattatgaccagatactattatctttagagtctgctaatgttattggtctttttgaccctgtgccaaatggtcccaggctagcatgccttctgagttccttgcttttaagaattgtattcctaccacatactccccttgccccttgctctctactttaattttctatttcagtcaagtgtatttgtccctaacagtttcccttcttattttccccaaatgactatcagctttgaaatgataagccagaaaaaaaaaaaaaaaaaaaaa

SEQ ID NO: 2176 - DNA, 794 bp, Homo sapiens
gcacgagtccagccttgcagcccctcatgagtgtggctgcagacatgctgtccggcccctccctgtgctgctgaccccctctcatgggtcccccagtgttccgtccccatccctgagttacggagccgcctgccgatgccccgcccatccctgactttgggtctcctgctccccagccagcacctctgcgctaaccacaccctcctacaacatttttttaaccccaaaattatagcctgaatgttcgcttttagtctggccaggggatctgactcctgagttggttgctctcccctgctcactccagtcacatagagaattggtgtttcccgcagtggggatgcagctgttggacaggtattgggggcaaggttggtagggaggacagactgtcacttgctgttacaggcacaggtgattaaaatgctaaatattgcaaatttaagctttgtcagtatatggaaaagttgaagggaaaatactggaatgcttcttcaaaggttaaaaaataaccgagtcttttggtaatttgaccccacgtgctctctggccctcaagcatgtaacctcggggtctgaggcccaggacccacccccctgccacccctcccaccccactccctgctcagtacctggcgttggtacacaggcaaggattggcacaaccaaaattggcctttttctccctcttaatattgaagaaattcccacatttctcatttggtaatggtgttgtggcctcagatttcttctagtatttgcttctgatgaatgattatggtctatacataaaaa

SEQ ID NO: 2177 - DNA, 425 bp, Homo sapiens
gaattcggcacgagagaagggaaggcaaggggctgaggggagggaaacagggatgcatttctgttttctggtatcattatacattatttaaaatttatgcatattttggaaaactagttgacctgacaagaataagacagtctaaacttgtagagttaaacagtccctccatggtgagattttagactgattcagagttgtgttaacctaatgactgacacactttattgtggattgtagtaaataacaacaaagctaggttttatgatgcttttctcctactaaatgtgtgtcacagccatttacaaacccatttggtgcaattcttatccttgaggtttatttatttgctttttaaaatatattgcattgtcttattttaaaaaaatagtcaacagaaataattgcaaggaattgtggaaaag

SEQ ID NO: 2178 - DNA, 1489 bp, Homo sapiens
  SITE (240): n equals a,t,g, or c
gtaaagatttaaattatttgaagcatagagatttttttttatgttttgttttctaattgtcatggtaggtcatgtcatactaaatacaagataggctatagagttttaatttactgtcattgaacaatttgcattgtttaggaggtactaggatgatcaactgattgaaaaattcatcagtgtgttaatgaattttttcacccctttagatatatgctgaaaacatttagcatgagttgnattttaataccaatttttcaatattttttcaaattgagacataaaaactaaggcattttaaatatctgtgctctaataaaaatattttagaaatattcattgatgctgctttttacacaggagaacacaaagttatacctcaatttacttgaaatggaatatagtggtgacctcaaacaaaatgaagaaaatatcckaaattgttttgacaaagctgtacatggttcattacctattaaaatgagaattacattttctcagagaaaagtggaatttcttgaagattttggttccgatgttaataagcttctgaatgcttatgatgaacatcaaacactcctgaaagaacaggattctttaaaaaggaaagcagaaaatggatcagaagaaccagaggaaaagaaagcacatacagaagatacaacttcatcatctacacagatgattgatggtgatttacaggcaaaccaagctgtatataattatagtgcgtggtatcaatacaattatcagaatccttggaattatggacaatattatcctccccctccaacctgatgggaaaaatgtaaatttcaaatgcagtgtgtgaaaagtatgaaattattattttttttaatgagggatgtaaacagtataagcttgttgtatttgataacctgtcttccttgtttctgtgtaacatgatttgtttagtaatagggggaaaatgtcaattagtagcttaccacagatactgtttcctaccatttataaaatttactttttattgaaaaactattttttgatttttgcattaagtggtctagaattcttttgcaatgcatttgcaacagaattttgtagccttaaggggtaggaagaaaaacctgactgcaaatcatgtcagtgtagtacaaaattctgaaaacacataagggctggttatttacctccttttttttttttttttttaaagaaaaaaggacttttaacctttgctgacaaggttttgtctgtttcagttatacttgtgaattgtgatctaactgcagaaaggatacattattaaaatactttgccttggaatagattataaatgagaaaatggaatgtttgcatccctttaaaaatgaaaatcatatcaaaagtatgttgtttcaggagactttgtatttagaatattcatgtaaaacttgtgaacaagctttcattttgatcaaactgatcttcatttttgtaataaaacggaagactcatccaaaaaaaa

SEQ ID NO: 2179 - DNA, 323 bp, Homo sapiens
gaattcggcacgagctgcctctggcctctgtgtttaaccatttgcggaactgccaaactgttttccaatttggtggcaccattcattgtagattcccaccagcaatgccccagggttctcatctctccatctcctcgttagcacttgtaattgtctacctttgattatagccaccctagtgaatgtggaatggcttctcatggtggttttgatttgcatttccctggtgtttagcatcttttcacgtgcttcttggccatttgtatatcttcttttttttggagaaatgtctattaaaatcctttgcccatttttaaaaaaaa

SEQ ID NO: 2180 - DNA, 674 bp, Homo sapiens
ggcagagcggcacgagaaattttatatggagttaacatgggaaaccttatgatggaatttaaagattatctaatgtagagtataaataagatggttgaaagtgtgaaattgtaatcagactgtttatatgctaaagtttatcctgtttcttaaactgcgtaatgtaggtaaccttttctcttacatttaatgaagtagaatacaccttttaggagcaattaaatactgaaatggttaatttgtgtttagaagtgtgattttcttttttacttagagttcattttgccttgtatagaagtacagtttttaaaaactcaaaatgacctagaggaagtttcatttttaggggcggtggaggtcttaatcagaattagttccgcagttaaatagcaaacagtaagttgtgagtagtcaaggatgggatgataagagcagtattttttgcaacttaaaatgaacattttcttaaattatcagcaaggcttatttgaccaaagatgaggtaggattaaggtgatttatatttacctttttaaacttttctgtatttttttattttcaaattttccataaaaatataaggacttgaagatcaagaaaaaatttctgctttggctcacaaaaaaaaaaaaaaaaaaaaaaaaaaaaaaaaaaaaaaaaaaaaaaaactcgag

SEQ ID NO: 2181 - DNA, 650 bp, Homo sapiens
ggcacgagctgctgtggggccaagcgcatcatgaaggaagctttccgctgggccctcttcagcatgcaggccacaggccacgtactgcttggcacctcctgttacctgcagcagctcctcgatgctacggaggaagggcagccccccaagggcaaggcctcatcccttatcccgacctgtctgaagatactgcagtgaaagcccaagtccttggaagctttccccagtgaaggactgactgggggcctcacgcttaactggtagtgcccacaagcctggcagctgtagagccgcgaacctccccacacctccctcaccgcgcaggaccctgagtgaggaggaggagctggaaacctggggtgggttggccaaaggagaacctcaagctcctggcctgatccagctccttcctgcccaaggcagcttagcccatccagactggtcctgaagtctgtccctccattggcatgaagtctgccccttagcaatccggcctcgcaggctgtactttcatggtgctctctaccttctggcccccatcccggaacattcctgagtgaattcgcaagcgcactagcatgtgatattagggagtttgcaataaattattgaggctgaaaaaaaaaaaaaaaaaaaaaaaaaaaaaaaaa

SEQ ID NO: 2182 - DNA, 757 bp, Homo sapiens
gggctgcaggaattcggcacgagctcttgtgtgctggtagagattttaatcctgatttttccataaaacatgagtattaagaaataattcctggtttggagaaactggagaaatcacccttttaaggaagaaacactggaaatttctgctaacaccaagatatttaagagtgtacatagtaggtgctcaacaaatttattgaatgaatgagtgaatggaaaaactgggagagtcaaaagtgagcagaagctctccatttctacttctgtcacaaaccacattaaattgtaaataaggcccttctccacttgacttcaggcagcagattgtctagaagcctaaggacagcaatttctctgacaagacaaagtagatattttataccaggggttggcaaactactgcccacgggccgaatttggcccagtctgtttttgtatggtgcaaactaaaaatgatttttacatttttaaagagttataaaagaaaaaaatatgtggtctgtgaaatctaaaatatttactacctggcctgttggaggaaaggtttgccaatctctgttttataccattaactatgagattaacaaaaacttttacctttgtgcagaaggttaaaaaaaaaaaaacatggttaaggaaaaggagacatgttacctcttcatacactcctataactgtggcattgcaaaaaataaaaataaccacctttaaaaaaataaatcttatttaaattgcaaaaaaaaaaaaaaaaaact

SEQ ID NO: 2183 - DNA, 818 bp, Homo sapiens
  SITE (2): n equals a,t,g, or c
  SITE (6): n equals a,t,g, or c
gntccnagctccccgcggtggcggccgctctagaactagtggatcccccgggctgcaggaattcggcacgagcacaaaggtaatttcaaagctaaaatcataagtaggaaaggcattgccaataagacagatgttctctttggaagtcctctttctttttgctgggtagcatctgagacttcttcaaccttacaaaatgatgaaaaattaaagaagataatagcatttgtagttttcatgaatactgaaatcacacattcatgtacaagaaaaaattgtgcatggcaacacacgtccatactcaaggctgcacatacataataaaaaatacaagcgcattgttttttcttacattttataaacacatgctcatttgattgattgtgtagataaagtagcattgttctatcatctttccctcaagcttttagatataattctttttggagccttattgtgtgacatgtgaatggagaatttgatatttaatatttgktcttttgaatcatgtccaggggctgggtagggtggttcatgcctataatcccaacagtttgggaagctgggcagagaggatcatgagcccaggagtccaagaccagcctaggcaatatagcaaggccttgtctctactaaaaaataaaaataaaaaatttagccaggcattgtgatgcacacgtatagtaccagctaccgaggaggccgaggagggaggactgcttgatcccaggaattctagattatagtgggctatgatcattccactgctctccagcctgggtaatgaacaagaccctgtttcaaaaaaaaaaaaaaaa

SEQ ID NO: 2184 - DNA, 821 bp, Homo sapiens
  SITE (40): n equals a,t,g, or c
  SITE (816): n equals a,t,g, or c
  SITE (819): n equals a,t,g, or c
  SITE (820): n equals a,t,g, or c
tgttgtgtgaaattgtaaccggataccattttcccccagnaaccagctatgcccatgattacgccaagctcgaaattacccctcactaaagggaccaaaagctgragctccaccgcggtggcggccgctctagaactagtggatcccccgggctgcaggaattcggcacgaggggaaactcactggtaggaatccataaactgtcctcctggtgggctgtaaacaactcaccctctatgcatctcacatcaaaattccagtttcttgggaaaacaagtctgtttgcccaatttgggtcatatttccacctccatgttactcaggcatgattcatctgcaagttatgtgtatagatattttgctactgttccacccttacgctgtgctggggagggaggtgtcactgtgagctgtgtcggtgccttaagagatatctgttgtgtcttattacttggttgcttttccccacatgtacaatgacaaaaatgccttcaacctatttgatccagccgttccagtacaactcctatacttgccatctttccaagcccaaaggtacatccagctgatggaaggagcatcttggtgttaatattcttttagtcatggtctctgaaagtaaaatgtctattcttctaattctggcacaatcttatctagctatagttcctcatggtcctgcactccatggactaaattgtaagtataattactaccaatgtactctataaataacttttggggccagggtggcaatagttgctagagaaaaaaaaaaaaaaaaaactcgagggggggcccggtacccagtgcganccnnt

SEQ ID NO: 2185 - DNA, 735 bp, Homo sapiens
  SITE (3): n equals a,t,g, or c
  SITE (4): n equals a,t,g, or c
  SITE (16): n equals a,t,g, or c
  SITE (22): n equals a,t,g, or c
  SITE (710): n equals a,t,g, or c
  SITE (711): n equals a,t,g, or c
  SITE (734): n equals a,t,g, or c
acnnaatggcacatcncccttnctattgggaacacaagctgagctccaccgcggtggcggccgctctagaactagtggatcccccgggctgcaggaattcggcacgagcaagggttcccttttctccacatgcttcccagcatttgttattgcctttttgctataagccattttaactggggtgagatgatacattgtagttttgatttgcatttctctgatgatcagtgatgttgaggaccttttcatatgcctgtttgccatttgtatgtcttcttttgaaaaatgtctattcaaatattttgcccagttttaaatcagattaaggtttttcctatagagttgtttgagctctttgtatattctggttattaatcccttgtcagatgagtagtttacaaatattttctcccattctgtggcttgtttcttcactttgttgattgtttcctttgcagtgcagaaactttttaacttgatgagatcccatttgtccatttttgctttagttgcctgtgcttgtggggtattactcaagaaatttttgcccagactgatgtcctggagagtttccccaatattttcttgtagtagtttcatagttcaaggtcttagatttaaggctttaatccattttaattatatttaaaaaaatttaaaaaaaaaaaaaaaaaaactcgagggggggcccggtacccaattcggggatnncccgttccgtcccccccccccgna

SEQ ID NO: 2186 - DNA, 1372 bp, Homo sapiens
  SITE (386): n equals a,t,g, or c
tcgacccacgcgtccggcaattctttcctgaggtccagggtgttgcaaactcatggccttgggccacgttttaccttcagtgaggttttgtttggcttgcaatgagtacatgggttttaggttgaatgtgagagtctgcagacaatgtgggttctccgactgccctcccagtgaaggtggacctctgatttagaccggcccgctgggcccgtgcctacatccttttcctcagcgtcaggatcttagtccccatgattgctgcccctttgtggtctgcatgtttcttggtaagggtgcccagtcwagtgtctctgggagccccctcttctctgtcatcgtcargctccccacttgcagtggccgtggtggctgcacatgctcccggnatacccctccagcactcccttttgtcatcttgagtttcagtccgtgacttgggtggcaccctatcttctccatcagggatggtagctatttttctgccatgagactagaggttgcttgagaacaggaaattggatctctcccttcaggctgggatttcactaagggytggagaakgggggaatatgggaggattatctcctatcacagggagcgctctgagggcaaggctgygtctccgattcagactgacggttccctgaggatggggctgtttctcccctccgactggggctccctgaggatggggctgtttctcccctccgactggggctccctgaggacagggctgtgtctcccctcagcctggggctccctgagtcagggctgtgtctcccctcagactggggctccctgaggacggggctgtgtctgcctcagactgggaatccctgaagatggggccgtktctccctcaaagtggggctccytcaggacagcgttgtktctcccctcagactgcggctccctgaggacggggctgtgtctccctcagactggggctccctgaagaaagggctgcttctccctcagactggagctccctgaagatggggctgtgtccccytcagactggggctgcctgaggatgaggctgcatctcccttcagactggagctccctgagggcagggctgtctccccccttcagactggggcctcccccaaaggacagggactgtgtctcccctgggactaggttctttgtgtcttctgcatcagacagattcccatgaggacagggctgtctccccctccatctggagctccctgaaggcaatggcctctcccctcaaatgggacatttgcaccccaccccaccctctggctccccatggcgcccaggcattcctcccaggacaccatttgtcacgctttgatgaatgaaacttactaagaataaaaaaaaaaaaaaaaaaagggcggcc

SEQ ID NO: 2187 - DNA, 580 bp, Homo sapiens
  SITE (3): n equals a,t,g, or c
ggntcgacccacgcgtccggacatttgtcttcatgaagcagatttgcactggaaccattgctttactctggttggaaatgccattgttttggggacagacttttaaaatgcccttgtgtctcccagtgaggagccctaagcattgacttctctaccctaaaactgtttgagagagggagagtgggccctggctttctcaagcatgggtcgggggttcagcggggcctctgtcttttgtggtgacccctcaggggtttcattgtttccttctgacttaagcaatagagagagaatttgttttggtactcttcagaggaattgtgctttggctcataacttggccatgttctccatgaattagttctcctatttttttttttaactaccttaaacttaagggaaaagttctcctatcttgatttcactggaatataggctttaggagctctgtaaggctggtatttttgtctgttttatcttctactgtatcgccagtgcctggaacagtgtctggtgcacataataggtgctcaataaaaatgtgttcaatggaaaaaaaaaaaaaaaaaagggcggccgc

SEQ ID NO: 2188 - DNA, 2120 bp, Homo sapiens
ccacgcgtccgagaaagtccaggcaggaacctggttgtatatgggaaggaactgatccaagttgggagtttaaaatccaaggaaccagctcagatctgagacttgtgaactaaccttcggggctaacaggccagcaggtcagccaggatggtgagggtgactttgctcccaggcagttttccactccaccctcaggctggaggttgttttaaatattttatgtgagggaagaaagggaagccagcatgatcatctggggctgtctgctaatcgtgagcgtgtgtgtagaggggacagagagttttagacttggcaacagcaatcttttatttatgattaagtataagagtaggatgtaaagtccatttgcgttttagctgttatttaccatgctttaagttaggtgattttaaattattcacattaaattattcacattctcatcgctttagtttcttaaccttatacttctttcaagatgtccgccaacccctgaaaatatgtggcacagttgttggtgcacatatgtgtattttgttgggttagaggtgcacctgactcagtaaagattcagtctgctaattactgtattgctttctcttagctcagatggtataatgcaagcatatatatttcttcattgtaaactgttctcaagaggcgattttctactgattcaagtaaattatagagaggtgagacagatacatttaaaatttacatctttagtctaaccacaacattttttctcatattaatcagcaagcttttaatttttagttcagaaaggagaagtataaagttggaaaaaatgcatgtttgaaagcacacaatgctgccctatatagatagagagagagagagtataaaaatcaaaatgaaacacaacctgcaaatgtcagagaacatatttggaagaggaaatgcagctggatttgcccaaatttgcaaaacaccagatgttcccacagcttgtacatgatgttaaaaatgtaaaataaatgtgtactattcatacacagtgtgcagttttcaaatgtgtacccacatttaatttagaaagaaatttttggaaagaactggtaagctaattctcgagtgcataacaagaacaataagcaattgttcagatactagaattcagaaaggaatattcccaaggcctgaactgagtgcccaatccactggtaaaacataccagagaaggctcttcactttcatggtaacagtcattccattgccatttacatttgcagaattcctagaatctctggggaaaatatttacaaatagtattatgtcctgcagtcagagagtgaatttgtgtgccatttgagatgattaatatgcagaaggaaaaaggaagcaaatgtttaaagtgtatttgtaccaaatctaaatgcttttttttgttgttgttgttgttgaatcagattagagttgctcctctattgcttgtcaattcagctgttataagcatttttatagaagggcagagaacaagtgaatgggttagaaatccaggaaaatggttgtaaaagaggctgaaaggcaggtcagaacacaatttgcttggtattaggtggttagtaatggggagcatatgtataatcttagcctttgtgttttatactttccacttgctgtcaatagctagtactgctacatccatagataaatgcatggcaaatacttctctctcatatgaaatgctgtcaagaagtttgccaggatccttctttaaaaattcccaggtaatcatacagtttaaaaagtccttctggtaccttgcccagtgttactcaacctggaattagataggtatttacccactcccctttcccccaccttgcacgtgctgcctttccaactcccaccgtttgtgattcattgccatcgtaaaccactgcttctaatgggaaacatgttgtctcctttggattgtagcagaaaaattattgagaacctcttatctagcctactttctaaccttcaaactcatttctattgataattaagccagtatccctgcttacttgctttatttatttaataaaaggtatcttttgcctaaaaaaaaaaaaaaaaaaaaaaaaaaaaaaaaaaaaaaaaaaaaaaaa

SEQ ID NO: 2189 - DNA, 1467 bp, Homo sapiens
ccacgcgtccggtctgaaaggaagtggtttggattcatgatgccaagctccacactatggagctgggaattccagaattgctttgactcagatattaatggagaaagtcatatccattaatggataaagccgtatctgttatggataaagccatatccagagttgctttgactcggatgttaatggataaagccaattattgatttctatttgcctaacctgccagcttttgtccaagtggggaatggagagccatagggatgtttgtcatctcacatgttttggtgatctgctgtctgtgggtctggacggaatttgttggcaagaccattttctgtattggatattcttcccaacagtgtccaccccaaaaggctttcagccaaaacatctgagcctaggtaggtttaccaagggaagccataagtcaagaagcatcagagtgaaaaggagcacttccttcattttacgcccggaggctaatgctccgagaggaatgtgtacttgggcaaagtcatgcaggaaggtcatatcagagctgtggaggctggagtgtcctgattcttggaccacagatgtctccctgagccattatttatttatttttaaaaagcacagttattccatcattttgagtctttgtatttcgcttatattggggggcaggactattttctcaggtgtctcatttggcagtcaacattgtcccctatgttccctatgactagttgaaaattcaagtgtgcccacaggggtgcacaaaaccacacccatgcacacacacaccctcagcccccacacacaccccgttgaacccgtgggtctatcaggacatcctaaaactccgtgattgacatttcagtaatttcaggggaaggtgttttccagggatggggtctcccaggttcagatagtgcctttggctgcaaatgctcctttagctaaacttttcctcaggaagaattcattattctagacattatgtgatatatctgttaggaataaaaggtgcttaaccttcctccctgggatgtgggagaaggtgctggaggttgtactgtgaagtcttcaggctcttagaaggctccagcctgagagagccctttattattgacattcctgtccttcctcaaggcctggtgacctgtgacctttcgctctgggcagggcccaggtagatgggccgtcatccgggcctgtaagccgtacttgatttctgcattgatttacatattttttactgtgatcttggttccaaacacagaatcgtcaccccattctcccttgaatgtgccggatccttgtaaattctcatttacctacttgttcttagtgtgtatgtgtgtgcgaaactctatgttcaagaaagaaatcatacaaagagtaagaacatgtttgtgccattgaagaaatggttttttgatttctaataaatatttgttttgcctcgttaaaaaaaaaaaaaaa

SEQ ID NO: 2190 - DNA, 1917 bp, Homo sapiens
  SITE (1862): n equals a,t,g, or c
  SITE (1892): n equals a,t,g, or c
tcgacccacgcgtccgggcgtgagccaccgtgccctgccagaatagcctattaaccagtctacctgcttccacttttcctccaccctgatcacatacacacatgcattatccactgagcagtcacaatcagatgttaaaccaaacattattcagataagatctctgaaaagcctctgatactttctcttttaaaatggaatatattctaaacacctctccaaggacacaagacttaccttgtctaactaatgacttttctaacttcattccctatcattctccatcttgccccatgctcctcatgcagcagctttttttttttttyccttttycaaatatgtkggttttgatcttatccaagaacctttgccctgatgtatgaatgactaactgcttttctacttcgggggtctcatatagaaatcctgcttcagaatactcttccctgagcactctatctaaataaatccctcttctgcaacccagtgctttttgttctattactgacttcttttccttgtagaagttactattactgctttttacctttttatttatttgtgtattgtctttgttgttgccctcatcttatctccacaaaaatatatgctccataaaaacaggcatttctgtgtcttattcagcactttatcagggcctataacaatgcctgggacatattcagtgaccagtgaatatttttggaaggaaagaaaagargaaagaatgaagtaacaaacaaagaatgaaggaagaaaaaatttttacaaacattcaacatatttttattttgaaataattttgtatttttccctatatcctacattggatcagaatattactgttatgtatagccatgaggacatggtctcaaaaaatgagaaactttcttagacagtaaaattgttaacttgagatgtttgcttccatcttctagagccaagtaggatctaactttaatttgacttagccaataatctgaaactattatagtatctgtctttcacagatacatgcaatattcacttctaaatatttaatgataaatttgtaatcatacatgatagtcaattttaatgattatgttgtcaaaattcaggctttytgtgtgaattgaagacttaaagaagaatttgtaaatatgactgtataagaaacaacagaaagatgaagatgaaccgaaatagaaatatcaagaggctacaaagtcttagcaaattataattgctaatggtacattatgtggtgtttagtatcacatttagaatgtagtcatttgttaagtttttcatggggtaaaagaaagaatttattccaagaaaattytggaattttaaaaataaacatgacatcttatcatgagaaacatttacagtttttgcttttactacaagatactgtgaaatgttctgctctgtcagttgtgaaagtatgaaatttaagtctatcactacaataatatttwgtttttagtgttcatttctttcctcctgactacattgagatgagttagattgagtgaaaggtaaacactaacatttgaattgaggtaatttccactgtggaaaacaaactgttgttagtaaacaggcatcagctttgagacacagaaragtcatccaaaccagaagattgggaacttcctcaattactttgtcttccatttattgcattcaattagtcaaaaatgttgttaattatacattttaaagactatttttggtaaggtctatgacacattcaaaatactacatayaagtttgtattatcataaataatccaraagaaaacatacatgtaaccaccaccatctggaaatttcacactaaattataaaacattccatcactgcatgtattgntaatgtcgcttatgaatccacttcttcctnatctgtagagttaaaaactacttag

SEQ ID NO: 2191 - DNA, 1164 bp, Homo sapiens
ccacgcgtccgcccacgcgtccgcacgagaaacagtgaggctgaaagggggggctatggaagagcggtagggagtccacggagaagatgcagtgaatgcttgcatgcattcacacgtgtgtgtgtcccagctagttcactcctttcgccgtgcgtggtggaggctggcctctctggctgggtgcagtgaatggccagcgggtttcttttctgctgggccaaggcgctttgggggtggagggggtggtgctggtgctgcactgggctgactgcggcgctgacgcagcgtttccccccatccctgttgcctgtgtgttgtgtggatctgttcctagtataggcaacataatgagatactgtgcttcccacctccccttcagttcagagccaaaatgggtctagaatctggcactttactcatttcctttgataaattgtactatgcagagctgtcaggaaccttcagatagcagtagaggactgcagctgtctaggtctgcggccacatcttggggacacactggactgttcccatgtgcagggttcagcagttatgtgggagtgctaggggttaggcttttgagcttgaacgcctgcgtgtgaacagatgaaaaatccttcagtacccaagtcccagtctgtcctatggggagcagtttgggggcggccggcagcaggagcctgggaaagaggccctcgccaggtgatggcagggccagggtggcctggggcacccagcggaatgtgcttagtatttggtcaccagccgtcatcctgggcttttcctactgtgtcttgttacaaggcctcagcaatccacagaactctctctccttccttccacctgtcagcttctctgcttctgagataagaaccatttgtgtaacaccaacacttaacttcagaaagacatgcattatgtggtgtaatcaaacccgatgctttcagatgacctacttacatcttcaatgtggataagataaagaacaaaacacatgcatctaaactgctgggcaatccagttgacttttaaatgtaagaatggaattccaaacacttaacacattcagctatatgacagaaagtaaatctatggatatggtattttgtgaatgatcttttaaataaaagaaaaccttacgtaatatttaaaaaaaaaaaaaaa

SEQ ID NO: 2192 - DNA, 1180 bp, Homo sapiens
  SITE (25): n equals a,t,g, or c
  SITE (35): n equals a,t,g, or c
  SITE (40): n equals a,t,g, or c
  SITE (1174): n equals a,t,g, or c
caggaaaccagctatgcccatgttnccgccaaggntctantcggcctcccctatagggaaagctggrcgcctgcaggtcccgggtccggaattcccggggtcgaccccacggcgtccgataaaatttagtgaactttgtaatgatctatgtgcacttttacttgtaaaatggaatttctgtatgtttatacttgtaaatatgattgttgttagtgctcctgttgctcatggtgtcctgcctcgcatttgtgattctgttaatgacatgtatcttaactaatttcttagtggtgttgtaatagggagatggggcaggtggggggttatttgtaccactgaatcttcattaatttggttctttactgttttgaggggagaaagaacgtgaaatggtttgtgtattattgaattttaagcaatattttagaagctgtgtgactgctttaataactttttcccagtgttatttgaatcatactacccgttatactaaagctgaatgacaattgtgtgaaagttactgccttcataagatcaagtcaccactgttacacagctgacatatagtgtattacctttgcagctagtaaactataaagtttagatattgaatctcgttacagggttatttatataatgtgacattattcagtactgacagactacatgaagtagttttaaaatctagtgctatttttattttaaaggttagcaatgaggaggaaatgtgatctggctgtgtttgtcttctgtacaaagcctgaagtgcttatggttttttggctaacagccacagagggcaaagtttaagactttcttgtaaggactaactgttcttttcaagctactgtttgtttttctaaaagcaggatttgcttccgtaggaggcaagttccttgatgtggaatagtgcaacctgtatatgggttattataataggaaagacatttgtacttgcacagtttaaatcattcttaaattttgaacatgtgaattgtcccaaaaaatctttaattttttggtaatttttactctttttgtgcacatgttgatttcttaatggtaaatccttcatttaaagatagtgttctctgttgagaatatttacatggaataaaacaatcttttcatggcctgttaaaaaaaaaaaaaaaaaaaaaaccccggggggggncccggt

SEQ ID NO: 2193 - DNA, 2056 bp, Homo sapiens
  SITE (2038): n equals a,t,g, or c
  SITE (2054): n equals a,t,g, or c
gccttagctttcagtgtagctgggactacaggtgtgaacacagcttggaaatctcttaaccatgggagttaagtctcaaaattctggtgatacaagtggttgaaacttaaaactgtatttaaaaaataggattcgtgaatttgagatagttcataagtctgcaaaaggctgtataaatacatattttacatttactattattaattttgtagtaaatttgagtacagcactctctttatctgtggaaacttcagactctcccctattactttaatttcagtgagacattattaaatataagtgggcttacacatttgttttgctttactgacaaataatacacaacttggaggcttttttttcctttctattcttcctctaaatgttcaacacttttctgattttgtgatttgaggttgtttaatagcttcctgaggctccattgagaccgtatatacgtgacacttaacagtctagccttcctcggtacatatagatatatgatggtggctttgcctgtagtaaattcatgccaaaacataggctttcagtgcctattacatatggctttcagctctctctactgagggatgtaggagtttatttctgaggtctgagcctcttttcctttacttcctttactctttcctaagccttctttataaaaactatgcatgttctattgttttcctttttgattccctttcttttattatccccagtaggagtgacttgtaattctcatatgttagaaaggcagrtctcctggttgaagaaaagatccacccaagcaagtcagcatgtttaataatttttgagggggatctcaaatgtgggaaggattgttatataagacaaccaaatgatgacatgagacaataaatgctataggaattatggaggaataattagctatttattttcttggttagggaagagatattattagttgtagaagtaattactaacttctacattttttattgtggaaatcaaaaatatatatatgaaaataaaatgttataattgacttcagtgtcccataaaccagcttcaacaattaccaaattgtgaccaatctttacacacatgcacaggtgtccctcagtatctgtggggcattggttctaggaccacttatggataccaacatctatggatgctcaagtccctgatataaaatggtggactatttgcatataacctgtgtacatcccgtattatttaaatcatccctagatcacttataatacgtaatacaatgtaaatgccatgtaaataactgttatactgtattaaggaataacaacaagaaaaatgtacatgttcagtacagacgcaattttttttgtgtgtggaatattttcattccaaggtcagttgaacccatggacataggaggctgactgcgtgtgtgtgtgtgtgtgtgtgtgtgtgtgtgtgtgtgtgtgcatacagacacacatatttctgaaatgtaaatattctctttttaaaaaaattattatcacagctaaacaaattaccagtaattcttttatcctcatatacccggtgttcagattttctagattggctcctaatttttttacagattatttgaatctgattcaattcatgtactgtaatgtttgataacttaagtaccctttataggttctcttttacctcttctttattaaattccttgtaatttgttgtactaaatagattgtcttctagaatttcctgtagtctgaattatgtagtattgtttcacatgttccagtgtcctcttatttcctgtgagttggtagttagatctagaagcttgattaaattcagattttctctctttagatcatcaactttagatcatcaacttggatcatttgtttcattttgcttttgatatgttgttttttagaattacctcttaaaattttgatttaattttataatcatgtaaaatgtttataaatttccaaattcagatcagcaaaacacaataaaatctattcagagaaggcaaaaaaaaaaaaaaaaaaaaaaaaaaaanaaaaaaaaaaaaaaanaa

SEQ ID NO: 2194 - DNA, 825 bp, Homo sapiens
aattcccgggatcgacccacgcgtccgacatctttcaattgggagaatatctgtgtctaagcacaatatcttcacactgtgctgtattgctgctgaactaaatgcacttttccccacatatggggcactggcttcaaacaattcagttcagtatcattacttttaatctcatctttcctttcttggtagttgttaatacagttatggaaaagaggcacattgcatagaagccattggggagttcagtggaagttctgtaagatgtgcatgtactatttgatgcgttttctttgcttcactgcttttaatacttagcagtattgttggtctaagtcaatttgattattgaggagtctcagagcaaggtgcgttctagatgtcatcctaaaaaacacttcatatataattaatcactattttgtataattacatattgctgcttgtgtgtttttttttttttccatttagttgggcgttgtgttttacacaaaaccatttttgaattaaggctatgatattaagatagaaatttggactgttgttctgcttttcctggcactcaaattcatgactagttttgaggtcaaacctatgttcgtaatgagagattttataaggatcaactaagaaatggaaggcaggtgaagatataaaaccctagaatgcttaaatgtgctgtaaaactattgtagatgtcactggattttaccaagtaatatcctttcttttttttttccccccatctgctgtggcttttcagttaaaattttgtttataaaaggaatttgtttattacagctctacctaaaaaaaaaaaaaaaaaaa

SEQ ID NO: 2195 - DNA, 3107 bp, Homo sapiens
ggaatgtttcaaaaggatatgatgaactgaggcttatcgagtcagggagcagaaagctgaaataagaccgctaagctctaaacaaatccgttaaagcttcacagggcagagcagaacaaaaatagtatactcaatgtatagtcggaaagcagccgaagaagtgaagcgagaactgataaagttaaaagtgaactattacattctagaagagtcatggtgtgtaagaagatccaagcctggttgcagtatgcctgaaatttgggatgtagaagatcctgccaatgctgggaaaactcccttatgtaacctcttggtgaaggattccaaacctcacttcaccactgtattccagaacagtgtttacaaagtcctagaagttgtaaaagaatgactgctacatgacctgctgcctacggagaactacatctgtaatggttttaatgttttgctaagtcatgtgttgttcatatcccaaaaacttttataggtaactgttttcaaatagaaaacgttttatttggtcaatttgaatgtcattctaattataaaaatgacttacacctttatcaattggttactatttcaatgcaccctttaaaatttgctatgcaaatgagtatatgcttgtacttgactttaatatttgtgctaaagtgagcaaagctaactgtataaagaaaacacagtgggttgtgacaaggatgacatgaaaatacaggacaattctgacaatgtaggggctgattttatagtgtaagaactattaatgccccttgsttcttttttctgcctcttgctcttgtcttttggacatttcagtgawtgtaagttcttcggtcatgtcagcccctgtcatcaacttgagttacagtagatggggcagacatggagtgtttgctatatagaactatctgtttgttttacttccttgtgcgctttttgttctctgwtctcttgttaatgaagcttttcctgcccattattaatccaaactcttggaccttgtggttaggaaattcccttaacttccagccatatggcattatcgtgtctctttctctctctctcttgctctctctcttctcctcttccccatattttctgtcaaataagtactgtttactcatttagttgcttatcaagtacttattcttggttttaaaaaaaattaatggtaactgtatttttctcatttttagcattattcaaatgtttatattttaatacctttaaaccactttaaagttttttcatgtttaattatagttttaagaaaaactattttgaacaaccccaaatatagtgcatctagaaactaatgtatatttgattagacatcatttatagtggaacagtagactgtagtacatggtaatttttcttttactattaagatacaataaaacatgactaattttgctgtcaaaaatgtaaagaataatgataaatggagtttttatattttacttttaagattgcctgtctttaataagacaaagccttaagccttatgttataattttggttctaaaaaccatcatttcagtataaggaataagtatatttcgtcctcctctttagtttttttcttcctatttatttttattttgaaaaatttctacaccttctttgaattccttgtatgaatttttgtttcttagaagttaatttgtgtgaaatgagattcttcaaaacgatgaaacctcatagctctgagaaaaggttttagggttttaaattctaagcaaagcgtgactatggctgacagactacacatttaattatacagcttctctttcttaaccacaggcagattaacctcattgtggattgtccttcagaccttagtcctcaggcatggtttctggtgcccactcctggaagccgctgttccctttctaccttcttaccagagcccaagggcaggcctggtcccggggaagcagcagcttgctgacataagtcagctgcaaaggctgaggagtgtgccctcagagaagcaccgccccccagtcttgtgccagcgcctagagccgcagctcccagggatgctccttccctggaggcagcccaggagagggactctggcagcgttcttcagatttgtggccactgtttctcatttgctggttgactgtttttatttcttaggcttttgctagttttagaaaatagggaagcagcccttgatttgtggattaaaagcaacatttgagcgatgatgcacaacagtccaggaaaatgggcggtggacacttgaggctgaggatgggagttgacatgagcagggagagggaggtgcgcgctgcttatctgtgattgttgctcacctgagtgtggctgattgtgtacatccagcagttacaatttttaaaaattatacttttacatttattttatatttttctcacccccagtaatttccttccaaagaagttcacatgtaataagtagaaattctgtataggaaaaaagcattaaaaatactattataactgcttcatttgctgggaaccattaaaagtaatataaattagctttttccagaaggatccttttgtagcagtgtttatgaatgtaacccccagcaaaatatggctatatattaggggagccagtttggagcagaggcctgaaggtccctgctatgcagccgtggccacagctcgcagcccaagcactgtggagcatccacacctttgatggcaatgcagattggtagcaggttccataggcgtacaaaacagtattaaagctcagtgttttgcatattgttagcatttacaaatatttttgctttagtatgaggaaagtaaggatgggcaaagaagcgatcaaaatagctattgctacaacattttcgaaaacaaagttggggctgtatttctttaaaaagataagcctctaaaaatgcttggcaaaaaaaatatagtgttaaaataggccagtgatattaatgagaaaatgaaagtatgtatcaggaataaagtgatattgcataggagtattgtatttttatgaattttatgccagttgtttacatgtactatatatgttaaattaaaaaaaatcatgagtaatgaaaaaaaaaaaaaaaaaaaaaaatt

SEQ ID NO: 2196 - DNA, 939 bp, Homo sapiens
  SITE (935): n equals a,t,g, or c
  SITE (938): n equals a,t,g, or c
ggtcacgagcggaaagcgtggcggctgctgctagagcctttccctttaccgcacccaaggagctggagcgacaacaacgacgtcgtttccgtttccaccacctcttcctgttcccgtccttgaggacgccgtgccgggtcagtgttagcctccagccctggttgtggaaggcgacagaagtcatggcgatgtttgagcagatgagagccaacgtgggcaagttgctcaagggtatcgacaggtacaatcctgagaacctggccaccctggagcgctatgtagagacgcaggccaaggaaaatgcctatgatctggaagccaacctggctgtcctgaagctgtaccagttcaacccagccttctttcagaccacggtcaccgcccagatcctgctgaaggccctcaccaacttgccgcacacagacttcaccctgtgcaagtgcatgatcgaccaggcacatcaagaagaacggccaatccgacagattttgtacctcggggacctgctggagacctgccatttccaggccttctggcaagccctggatgaaaacatggacctcttggaaggtataactggctttgaagactctgtccgaaagtttatctgccatgttgtgggtatcacttaccagcacattgaccgctggctgctggccgagatgctcggggatctgtcggacagccagctaaaggtgtggatgagcaaatacggctggagtgccgacgagtcggggcagatcttcatctgtagccaagaagagagcattaaacccaagaacattgtggagaagattgactttgacagtgtgtccagcatcatggcctcctcccagtaacttcaggtgtttaataaagatgtgttgactcagaaaaaaaaaaaaaaaaaaaaaaaaaaaaaaaaaaaaaaaaaaaaaaaaaaaaaaaaaaaaaanggng

SEQ ID NO: 2197 - DNA, 588 bp, Homo sapiens
ggcacgagcataacttaggccgggctgaccatcatcttggatggcgtcgtccttgttggcgcagattgtgttggggggctggttgtttgtgggcgcctttaatattcaaaggggagaatactgttctgattgaggcattatgcccgctgagttgtgatattacatccatcatcttgttcaaataaatagcgccgtatctatatgtcggaatgaataaataaaagtgctgcagcagggaggttgggctggaaaccagaggcccacgatgctctttgctggctttgaaatgcccttgcaaagaagtattgaaaatttaccagcccacaatgagtcttttaaatctccttttccttgctaccaccaacccctgcaccaaccaagaatacgttgccagcagagttctttatttagttggcattggtttttattgaccctgattgaatttgaaattgtaaggctgagagaggatttgcaaaacatttgaatacattttgctcacggtattgttttgtaacttggaggaatttatctttttagccaatcaggttaaggtcaataaatttggtttttaaaaaaaaaaaaaaaaaa

SEQ ID NO: 2198 - DNA, 2317 bp, Homo sapiens
gctcgtgccgagaaaacagaggctcttcggttgcagtatcgctacttagacttgcgtagtttccaaatgcagtataacctgcgactgaggtcccagatggtcatgaaaatgcgggaatatctctgtaatctgcatgggtttgtggatatagaaacccccacattgtttaagaggaccccagggggtgccaaagagtttttagtaccatccagggaacctrgaragttttattctctccctcagagtcctcaacagtttaagcaacttctgatggttggcggtttagacagatattttcaggttgcccgatgttatcgagatgaaggttcaagaccagacagacagcctgagtttactcagattgacatagagatgtcatttgtagaccagactgggatccagagtttaattgagggtttgctccagtattcctggcccaatgacaaagatcctgtggttgttccttttcctactatgacttttgctgaggtgctggccacctatggaactgataaacctgacactcgctttggaatgaagattatagatatcagtgatgtgtttagaaacacagagattggatttcttcaagatgcacttagtaagccccatggaactgtgaaagccatatgtatccctgaaggagcaaaatacttaaaaaggaaagacattgaatccattagaaactttgcagctgaccattttaatcaggaaatcttacctgtattccttaacgccaatagaaactggaattctccagttgctaatttcataatggagtcacaaagactggaattaatcagactaatggagacccaagaggaagatgtggtcctactaactgctggagagcacaataaagcatgctctttgttaggaaaattacgactggaatgtgctgaccttctagaaacaagaggagtggtgctccgtgaccccactctgttctctttcctttgggtggtagatttcccactcttcctgcccaaggaggaaaatcccagagagctggaatcggcccaccacccatttactgctccccaccccagtgacatacatctcctgtacactgagcccaaaaaggcccgtagccaacactatgacttggttttaaatggcaatgaaataggaggtggttcaattcgaattcacaatgcagagctgcagcgttatatcctggcaaccttactaaaggaggatgtgaaaatgctctcccatctgctccaggctttagattatggggcaccccctcatggaggaattgccttagggttagacagactgatatgccttgtcactggatctccaagcatcagagatgtcatagccttcccaaagtccttccggggacatgacctcatgagcaataccccagattctgtccctcctgaggaactgaagccctatcatatccgagtctccaagccaacagactccaaagcagaaagagctcattgaatcatgcataccatgcagaaagttgagcttttaggttttgtcctctttgcttccccaaggctaaagtcagatctagagttctgccacaggtctaacaatcaagtctttagatggaaggaatccaggcaacattcttcaccacaacgaagaaacagataaaagatacccaattttgacttgatttcatgcatcatttggattttttttggttaggactttttttgaagttcctttttacttaggtgtgaaagatggttctttgttgaaataatatagtggtttagtgttttcaaatcatgtttctcatacccagatagtagattattcacttaggacagaggtaatcaaattatgtgtgaaatgtaggaaaatgcttgcccctgtaaactagtgagttgatggagcatttgcttcatcatcctcatcaagagaatcatataaattaagctttataatgacatttcaaccatcaacataatatagtgaggagtagcataatattttttaataatgcagaaaacatcactgaaatgagagtcacaaatttttcttcagtgtttcagcctgagtaagttacataaacctcgcttagcctcccttcctgctaatgtgtaaaatacatacttgccctggctacctcaccgggctgttattgctggaatcagaggagataacatatatggaagataaagtgaataaaagtactttgaaaaactawaaagcattccacaaatatgagatgatggtattatccatccataaataggtagatatatctctattttatagtttcagattaaacaaaactgatatcaatagtaaaagtcaaaaaaaaaaaaaaaaaaaaaaaaaactcgag

SEQ ID NO: 2199 - DNA, 1290 bp, Homo sapiens
ggcacgagctggtgagtgctccatagtttccttacctgctgctacagaatgttattttacatccctatggctattgccaaggctacaaaaaaggaaagctatatttgtatgcaacactaaccttttgactgctaatgtatgtttctgcttgctgtgccttgttatggctgctttttttgtgctaataaagtatgtttggtgttctccttgtatatctgctgttttatacatttgcaacaatttctcttgtaaatggaatggtttggggtttttaaataagcataactaacaacctttctatagttaatgcagagttaatgaacagtctaatattgacttatcagaataagctaactctaaatttaatgctctacatcttatcagtcataattatatatactgtggaacagtatctgtagttactgcaaattactgtacagtttaggttataacagaaaactgacagagaagtaataaacctattgatttctctgcttataaatgaaagattgaaactatccaatgacatattatagtaaatgagtatctgtaacctcccactgcatcagaagcaggttaaatgaagtcttgtgaatttgtaatagatcagtaccatttattggtttggggaccatcttaattaaaaataaatgcccaaaatgtagaactttaaccaaagacttgtcccttttaaagcaaaatggggattgaagggacttataatttctgttgtttctaattaaagtccctgaagatcatataccaaagtgtttgagaacttcatccaaacctactttaaagcattatgtgcaattaagttgttatgacataattatattgcctaattgttgggtcttttttcttgagcttataatgtacctggaaaataaacctcttgagaaaaagaaaagttcatactgattattggaaaaggactatatatgtgagcaagattgtgttttagagaggaaacttgaaactccaagaaagcacttgatgtttttatatgcttgtagcaaattgatgttctaactgtagttttatagaaagtattaatgcttttatgtatttcaaaactttcatatgttaaatggaaattgttttaaatgtgtttgagtttatgtaagcatgtatacactgtgctaaaagtcacatgtttcagtttgtgtataatattaatatgcaatttttggtttaaatttttgtcttaaaatattagtggcttacattttaaaaaagaaaaatcaccagcatgaacttgaaaaaaaaaaaaaaaaaaaaaaaaaaaaa

SEQ ID NO: 2200 - DNA, 2290 bp, Homo sapiens
  SITE (2283): n equals a,t,g, or c
caaaaaggaaaccctaacagctctgaactctggttttatttttcttgctgtatttgggtgaacattgtatgattaggcataatgttaaaaaaaaaaatttttttttggtagaaatgcaatcaccagtaaagaggtacgaaaaagctagcctctctcagagaccggggaggcagagtactactagaggaagtgaagttctgatggaatcatgcctgtcaaatgaggtcttgaagcggatgcccaaataaaagagtatattttatctaaatcttaagtgggtaacattttatgcagtttaaatgaatggaatattttcctcttgtttagttgtatctgtttgtatttttctttgatgaatgattggtcatgaggcctcttgccacactccagaaatacgtgtgcggctgcttttaagaactatgtgtctggtcacttatttctctaaaattatctcattgcctggcaatcagtcttctcttgtatacttgtcctagcacattatgtacatgggaaatgtaaacaaatgtgaaggaggaccagaaaaattagttaatatttaaaaaaatgtattgtgcattttggcttcacatgtttaactttttttaagaaaaaagttgcatgaatggaaaaaaaaatctgtatacagtatctgtaaaaactatcttatctgtttcaattccttgctcatatcccatataatctagaactaaatatggtgtgtggccatatttaaacacctgagagtcaagcagttgagactttgatttgaagcacctcatccttctttcaatgcgaacactatcatatggcattcttactgaggattttgtctaaccatatgttgccatgaattaactctgccgcctttcttaaggatcaaaaccagtttgatttgggaatcttcccctttccaaatgaaatagagatgcagtacttaactttccttggtgtttgtagatattgccttgtgtattccacttaaaaccgtaatctagtttgtaaaagagatggtgacgcatgtaaataaagcatcagtgacactctaaaaaaaaaaaaaaaaaaaaaaaaaaaaaaactagttctcctccaataatgtccaaattgtaatgtgccttgcttcaagataaagtgtatttgggaataatattataaacccttacaaattttatgcatgtatctactgcatccttcaactctcactagaaaatcttttgaaaccaaatggattaatttatggctatttataatttgctttgacatctcactgttggaaattttttaaagatgagatttgcctttataatgtaaattgtgatttttgttttacatgtgggtttctatagttttaattttttcagcttttaagatacgagttttgtgtaatttggtatttttaatcatttatgttattttaaaagctcagaatatcacattgaaattactataaatacatttaaaattatctattttagatctaaggaaatactacagagatattttcatgggttcagtaacttttcattttataacattgggcacggtacagagtgattgtcacataaggtacttgaagatttattagtttaattctatttttacagtaaccttgaattcttctgagttttgcatgtattaaattcaattaatgctgaacatgaagagtaaagtatttatctgaaagaagtttctgggttaggagaagtaatgaatgtatccatttgtacatggtttacatgttgtggatgctttgtaaacattttcctgtatgtttaaattgtgtttcagcaggatgtaattgcccttgtgtgtagttaaaatgagtcatcatctggtcctttgtgaaatggaattcatggtattttctgtaacgttttcctgaagctgtttctggagagccacacatttaaatacagacagctttcctgatcatttgatttattgtgcacctgatttttggtctaaaaggaattattgccacaatatattttatttattctttagattttagccttgtaagttaaagtgctttacatgatgatgtgaaaagctgtttgtccctttactgggtttggggggttgttaaaagatagggaatgaagaatgcaaaatggtttatcgttcaaactgtccactctgatccaaccctgtactgatagtacttcccagtatgatattgtgatgtttcatacaatgcagtgaacataaccaacttgttacctaaataaagaattgataaaaacagtgtgacatattaaaaaaaaggggggcccggtacccaattcnccctata

SEQ ID NO: 2201 - DNA, 1934 bp, Homo sapiens
gcaagaaaataaaataactttctacctctaaattgaggcttaggagtaaaaagcattttgtcctaaatttatcatttaaaatagcatcagtaacttttgagctcatgtcaatcaagcattggcagtcagagattttatagggaagactaagtaaatccagtttccaagaacctaaactgattgaggctccaagagtcagaccaacaaaagttttattctgtgttgtttactggtaagaatattattatcttgatactacctctcaagggtattgttacaaaatgccacttatggttaaagagatagatacaaagagttctatttgacagaagcttgaaactctggcatctatctgcccaacgatgggggctttcgttctgtaatttaatcctttgtagatacattatttgtgtgtaattttatacgtgttcatatttttctcattttgcattgtgtaaagtgtacaaaatctcaaagtataaaatactgcttatattgcttgkaatttacagtgtgtaaatattttctaawtgtgtacattgatgggggggacaagtgggttattcaggtttttttttaatgacccttttgtattgcagtttcaacagataactgtccatcaaatttaaaaccactttgatacatttttatttaacagttccaataagaaaaaaatctctatttttaattatatttctcctttagaaaaaaaatacttcatggtccctctaaaataaatggccagacctcagtttaggcccttgtatttatgactctggtagaggtcttcagactccaggtcatagtccagtcagtatttgcatttgggttctcatgaaaactttgtgactctcttttagcacaagtagcccatggtttttcttccaaatcaagtattttacttctcccttgagtccccatgctttgtctccctcctgctgctattgcccggtgaatgggatggtagagagggagaaatgttcattgcacagagaatgtcaggccactttggggacttggcaaacgaagcttgcactgagtggtggtgtgtttggcaatattactgtgccaaaaatcaccttgtctaattttatggatatgtatggcaaacttattacccttcttgcaagctgcacattaaggtacttgtaagtgtttatgcttttgtgtgtaactgtttgccttttctaactgcttttcttgttactgaaaatataattctactagttttatcacattaagaggctctccatgcacaaaatgcattgatgtagccgtaaagtaacagcatttgtacattttctatctcctgatggcagtggtgcctttgtcaccttttggaaggtttgcattttgtttctgctttcaagcgcaaatagtagcttgctttcagcttcacaaaaatctcctcaaatgtaaaagatacaaaatggcgtgttatcatccaggcttagttggagtatttgcatttttatttttatcaaaacaaatataattggtggggactggccagtaataatgtgtggcgtctttaagccaagagtaatttttaaattaaaaatgaaaattttaagaggtagcccattaaacaagctactgagttggagaattaggggatgactgtggtggtttgtcgctaaggaggcaacagtagggtccaggcggcggggcacgtagagcagttagcatgatccatggttattccttactcatgaacagtgtcggcgcacctcattatctgtgcatttgtttttcctgggcagtcctgtcagccagttaatccaccagctcttaggaagtaaatacagatttttttctttccttttttttttttttaaagattttatactacatcttgttaaagtcctatgaatgtgtgtgtgtgtgtgctattaaaactgctttttctcagtttgaaaaaraaaaaaaaaaaa

SEQ ID NO: 2202 - DNA, 357 bp, Homo sapiens
  SITE (22): n equals a,t,g, or c
  SITE (39): n equals a,t,g, or c
  SITE (171): n equals a,t,g, or c
gcctgagcccaccgtgcccggncccacccgccattaatncctttggccctcctcccacytactagcccygaggctgaaagtatttaagatcaatgaagagtgacttaggtcctgagttgcagcsttcccttatcctacagaatacgataatatctgcctatgagaaggatncctgagacattgaaataagatgattatataaagtgtatacaagcacaacataactttcttctcacatatccatcacagtgcaaatctaaccccttaactctgtaaaactagattgcaaagaatattgcatgtaatatttttcctttgcctcagaaatgggtaaacaaaatttaagaagaaaaaact

SEQ ID NO: 2203 - DNA, 1469 bp, Homo sapiens
ttctcaaggttttgtgagagttttgactggatgtggccctgcatgaccctccttctcctgtacttcctctttcctttccaaatgggaattagaactgtggggcagcaacagtctcagagccagtgagaggccagcttagagaatgcttctgagttagtgggactctgtgtcacaagtaagcaaatgaatatatgaaagaaattatggagataagttagattcttggtaatacttaaatgtcttgctttctactaaccttttgttactaaaggtaaagggtataactcaaactttttgtggacattcttttcaaaattttttaagaaccctgtactataaaaggttgagtaaaaacaggaaagcgtgctataagttcaaatctgttgtattaccctaaattagataaaccaacctgaattatagtagatttctcaatagatgaggaactgaaaaatactatgtaaaatatcttccaaaatgctttttatactttttttatttgtaatttggtctatctaaaatgttcgttagcttaacttaatgggcgttattggattcatatgactaacgtttcctcagtattgtaatgcttgaaatatttgaaagaaaaaatgttgttttttagttgaaactggtatatataattcagtgcttggcaggttagtatatttttatgcatttttcagagtcagcagtttcaaatcttattgttatcatgttataaaattttagcccacatttcaggctccgtaaatcatttgagccattattttttcccaacaaatggtgaattttttctttaaatgtggatatatatgttgtaatttatgattcctggttatgtatttttgtgggatcctgcagtaaaattgacttttttgtgtctttgggagatttaaattgcgctaacagtgttgcgcaaaaatgagttcatgccatttaacatattggattttaattattaactgtattaatttactatgaaatggacatccttttaactaaaatggaattgaacattgcagttttcaaatatttttccttgttgggtctggaaaaggaattctactttgatctgcatagaaaattttgatacaattttttgaaagttcttaggtgaaacatttacccattaaaaaggaagcagaaatactgagacatgaaaggcattatcaactaactctagactctagaacccattctagcatatctcacgtgcaatttttaaaaataagttaataattcatctcatatcaacaaaagcctttgaaacatgggttttcactagatatcacctagtgctaagataaaaaccaaaacaatatcagaattacatttatgctctaaatttgtagttgtccattgttgtgcttagtaaatgtgtgtcattaatgctgtattctcctagctattatggaaacttgtttaaataaagatatggatataaaaaaaaaaaaaaaaaaaaaaaa

SEQ ID NO: 2204 - DNA, 567 bp, Homo sapiens
caggtttataactaaaaaggtttaagctgctaaaactatttttaagagatgtgaaatgcagtatgggactatctttttttcctcctctaagcccaaagattaactagagtccctccaaccttatagattgttggctttcacaatcttataacctaggatacaggtagtttcgagtatggtgccagtgatgttttgtttttgtttggtcaaggggtaggtgcaacccaatggaccacttatgcaaaagatgtaaactcttgcataatacattgataacatgttttgccaactttaaatgcttaaacataagcgaaaccagtagcaagtatgtgggtcagcttaaaaattttgattgttaatgccctattttctaatttggcacctcttgatgcctaagcaggtaagcagatgcctaagctgtatttctccaaataaatcaagatgaagtactgcccaagttaaatattgatagcctaaagacaagtttatgtagtacttaatgtacatgatatgaatgtgaagcataaaattaaataaaatttttccccaaaaaaaaaaaaaaaaaaa

SEQ ID NO: 2205 - DNA, 1679 bp, Homo sapiens
ggcacgagctggtgcctcacacagcgcacgcgggagagcagaggtatccatttgaggccctcttccgcagccagcactacgccctcctagacaattcctgccgcgaataccttttcatctgtgaattttttgttgtgtctggcccagctgcacacgacctgttccatgctgtcatgggccgtacactcagcatgaccctgaaacacctggattcttatctagctgactgctacgatgccattgctgtttttctctgtatccacattgttctccggttccgtaacattgcagcaaagagggatgttcctgccctggacaggtactgggaacaggtgcttgccttgctatggccacggtttgaactgatcctggagatgaatgttcagagcgtccgaagcactgacccccagcgcctaggggggttggatactcggccccactatatcacacgccgctatgcagagttctcctccgctcttgtcagtatcaaccagacaattcctaatgaacggaccatgcaattgctgggacagctgcaggtggaggtggagaattttgtcctccgagtggcagctgagttctcctcaaggaaggagcagcttgtgtttctgatcaacaactatgacatgatgctgggtgtgctgatggagcgggctgcagatgacagcaaagagttgagagcttccagcagctgctcaatgctcggacacaggaattcattgaagattgctgtctcccccttttgggggtttagtggcatttgtgaaggaagctgaggctttgattgagcgtggacaggctgagcgacttcgaggggaagaagcccgggtaactcagctgatccgtggctttggtagttcctggaaatcatcagtggaatctctgagtcaggatgtaatgcggagtttcaccaacttcagaaatggcaccagtatcattcagggagcgctgacccagctgatccagctctatcatcgcttccaccgggtgctgtcccagccgcagctccgagccctccctgcccgggctgagctcatcaacattcaccaccttatggtggagctcaagaagcataagcccaacttctgatgtgccagaaaccgccctgagatctgccggtcatctccatggacttctgcaccccattccatacccttcttcacctggggtacccttccagttttccccttgcttcccaggcccttgacatggcttacctgccttcactcccagcaccttgcccaacaggataagctggatccccttggccttctgaatatcccagtgtcttcaggtttcccaagaccacttccctgtgggcttccaaaatggcctttatcatttctccagtctgtcaccctcctttcctgctcccatacacccaaggcttgtttcttcccctgtaaaaaccactgcctcaatctctggttcactcaactagtcaccatgtcctgaggcatgaagcctcctcagctcttggaattgctggcaaggggtgactgcctctgagtcattgtgtttttcaaagtgatttcttttctgtagctttttgacctaagatctcagcaatttgaacactaacctctcccctcctggctcaagaattactccgaagtcagtctgcagaaaataaatatttagtatgacatgaaaaaaaaaaaaaaaaaaaaaaaaaaaaa

SEQ ID NO: 2206 - DNA, 1598 bp, Homo sapiens
  SITE (1508): n equals a,t,g, or c
aattcggcagagcatagtctttcaaatttggacatttaaaaaagaaacttttactgtagtcatgaagtagtatcaaagtttaccacaagtttgtattgagagaagaacaaacaatatatgctaatatgaaaaacagctctacttagaaagctactgcttgggttttcttattaggcatagttctccagactgagttggttttactcatctacatgatttttccttgccttatggaacagaaattcaggcccactcgaattcagttattttagggctctttaaaatccagtatttgtgatttaaatgatgcggagggactttcattacctgtgtctttgcttatttctctctggccctcagaacaccccaccctgacctttaggggaaattgacagaggcagagggtttcacctgcctcaattgtcaccagccctgttacattcttccttccaagccttagcctcacagggaccttctcattattgaacaawtgccttcaaagcagtagaatagcccaattgttatggagattaaagataccgattgcaaaactcctgtaaataaaatcttcactgacaaacccagtttcttttcataggcttttcttctgtaatctctttctggcagaacatctcatgttttgatgttagagattcagttaccaaccacagtaaataaagcaaaataataatagaaaaatagtatagaactcaccctaaaaacaaacattggccaaccatgtttattttttgtctctctttgcactcctgagaattgataggggaagaatgtaccacctctaattcaggtgatttctgattagcaagctatggaaagtcttcaggttgagttttagccagttcacgctcccctaaatggcatggaatagactattttctgttttaagaaaaaatagaacaatggcactaaatgcttgactgaatgtttgactaaatgttgactgaatcatggataggaaagattgggcagaaaagacagccactgcctccagacacaggatgccacaatcctgggcaccatcattattccatacaaccttagggtcatttttagggtttagaactttctcaatagggtttcaagattttgaaaagtgtcttccaattctgatctccgtagatcctgttatgggaattaacctttttggaaggggattcttgttcttaaagatgaaattccctactttctttcctggagggaatcagtatgggcagagggaagaggagatggcgattctgacctgtgtgtctcatgtcacctaacacctatggggtggcatgaaacttgagctttaaaacacaccaggggccaggcacagtggctcatgctggtaatcccagcactttgggagaccgaggtgggtggwtcacctgaggtcaggagttcgagaccagcctgccaacatggcaaaaccccgtctctactaaaaatacaaaaatcagctgggtgtggtggcgggcacctgtaatcccagctacttgggaggntgaggcaggagaatcgcttgaacctgggaggcagaggttgcagtgagccgagatcaggccattgtactctagcctgggtgacaagagtga

SEQ ID NO: 2207 - DNA, 824 bp, Homo sapiens
aggggagagacttagttacacaaagtcttaaaatattccttgattgtgctgtgtcaaagcatcagaatgggacaaagctgattctggagaaaggatgtacttgctgcccttcagagcctgagctccacccatgctggataagtcagaatgctggcactggaagggcccttaatggacagctcgtccaactccctcatcttacagatgggagaaactgaggtccggagaaactgaggcccagattaggagcaagacttgcatgcctagatccttctttgtgtgcctcttccctactgcaagctgagacccaggtcccctggtttggctggtcgtggctgcttgtaaagtgaaggtgcttctgtgactgaatgactccaacaatgtccaatccctaatcctttcctcaccaaagaagatggcccttggggacagcagcacttgctgagcaggagcatgagtcaggtgaccacctcattccagtttgctcaggactcgccctgttttagcactgaaagtctcacagcggctgggcatggtggctcacgcctataatcccagcacttgggaaggccgaggccggtggatcacttgaggtcaggagttcaagaccagcctggccaacatggcaaaacctcgtttctactaaaaatacaaaaattagctgggcgtattggcagatgcctgtaatcccagctactcgggaggctgaggcaggagaatcacttgaacttgggaggcagaggttgcagtgagccgagattgagccactgcactccagcctgggcaacagcacaagactctgtctcaaaaaaaaaaaaaaaaaa

SEQ ID NO: 2208 - DNA, 2023 bp, Homo sapiens
  SITE (486): n equals a,t,g, or c
ggcacgagcttgtttcagttttttcttttcttccaatggtactttagctgttgagtgcaggttacaacctatattgttatgcagatggcttctttaggaataacttttatatttatttaaaaatttttaaattatgggatgttttgttgttgttgttgtctttgttgttggtcatttgtcaatattcagtcaccaattctgctcacttcttgccatggataaaattgggtctttctggctaattaaaaaagacaactttataaaatggcactttaagcaagccatagttagttttattatttgtaatgcacatggcaaagcaaagacgtttgtgatgaaggaactgctcatctaagcaaaagatttgagtatgatatgataaaggctttctacattctaatttacttttccccccacttgaatgtgttttaaaggctaattatcagctcagtaaagcagtgagaaactgatcaaattgcacttgtnctcctacaagcaacctccacgcaaacacctcgtactgctacaggtgtgtcatttcctttaataggaccagggaccatgtaactgaggtgagggttgtagtaaatgctcccagtgtcagtatgcctgttaattttaaaagctcccttacttgcagagaacaagtctgcccagattccatgctttctataactggaggacctggcaaacctgccgcatgctgcacacatctacctacgtacacatatacaatagtattgatgattctgaacaataacagggtaaaacagttggtttgccattgttaaaaactgatttacagtaacttacaacaactgtacttttgttggattagcaaatcatgtgtttaaacaaatcccatatgttgggcaacagttcaaataagcacggagaagtgttgcccaaacttggttctctgactcttatgtatttgtaaggctgggttcaaaatcaaaacaaaaacccccaaaacagcaggcaaatgctttttaactctgacaccgttgccataaatccctgatactcaaagtctaacaagaaagacatggaaaattagcagcccattttcagaaagatcaaaatgatctagggttctaattgcttttgcatcctattcttacaaagtgatgtcccaacagggaacagtaggagctggagtgggatctccaagtcccagtttgagtgtgggatgtgcttccagcagtgccttccctttatgaaagacatcacatggcatccagggccaggcaggcagcttgaggtgcctttacaaaaaaaccgaactggggctgggaaaagacagttattgacactgatgtgcaatgaagtgacaagatgagagcagaatcgtaagagctttgaatttgaagtgagttttttccccccataagttatttattccttttttctgtgtaaatatatttattttactgtggagcgctaacatctggatcgtaacatgtgcagaatgtatggtaggaatgtattctcttgtaggaatgtaaatctgtattaaaagggggtccaagccaggcccccaggtcttctcattgtatgcacagtccgcattcatttttactcttctctaatatgggtctatttgaaatatgcaaaaggtatgaggaatgttttaatacctccaaatttttaagaaaagcatcaaagggttgatattttttaaagtttttttagtagcactttctctggatgacagaaggggcaaccacatgggcacccttgttcataccaaagggtgagcagtggccagagcctcctctgcacctctcgagtgtctttaccaattgagctttttatcgccatagccccttggagtgccccagctgccctgaggtcaatcaaggaaaatttcttaatgaaataagctccaaagagccaaagtatcaacttacagatcgtttttaaagcttaaatttatgaaccacctttgtggtaaacaatgaattatgaataccgcagggcagccttcttaaatgacaaatgtaaaaaaaaaaaaaaaaaa

SEQ ID NO: 2209 - DNA, 942 bp, Homo sapiens
ggcacgagtggctgtgcacctgtttgcgctcatgatcagcacctgcatcctgcccaacatcgaggcggtgagcaacgtgcacaatctcaactcggtcaaggagtccccccatgagcgcatgcaccgccacatcgagctggcctgggccttctccaccgtcatcggcacgctgctcttcctagctgaggtggtgctgctctgctgggtcaagttcttgcccctcaagaagcagccaggccagccaaggcccaccagcaagccccccgccagtggcgcacagccaacgtcagcaccagcggcatcaccccgggccaggcagctgccatcgcctcgaccaccatcatggtgcccttcggcctgatctttatcgtcttcgccgtccacttctaccgctcactggttagccataagactgaccgacagttccaggagctcaacgagctggcggagtttgcccgcttacaggaccagctggaccacagaggggaccaaccccctgacgcccggcagccactatgcctaggcccatgtggtctgggccttccagtgctttggccttacgcccttccccttgaccttgtcctgccccagcctcacggacagcctgcgcagggggctgggcttcagcaaggggcagagcatggagggaagaggatttttataagagaaatttctgcactttgaaactgtcctctaagagaataagcatttcctgttcttccagctccaggtccacctcctgttgggaggcggtggggggccaaagtggggccacacactcgctgtgtcccctctcctcccctgtgccagtgccacctgggtgcctcctcctgtcctgtccgtctcaacctccctcccgtccagcattgagtgtgtacatgtgtgtgtgacacataaatatactcataaggacaaaaaaaaaaaaaaaaaaaaaaaaaaaaa

SEQ ID NO: 2210 - DNA, 884 bp, Homo sapiens
ggcaacaggtaccagccagtgctggaaggagctcaccctgggaggtctcgtcagcctctgtccttcatggctgtcccttgtgtcccatgtggagagcccttcctccctttccacatggtaagcactgagcccaatttcttctcaccccacagatggtccctcagagcagagatgtctaatgaaaggttcagattcagatcactaactttccatcttccactttttccagtggtggccatgttcccccgtttgccttcacaaaaaccttgtgaataatacaagccatatggactctgatttacagtttagaagatgagcagaggtgggtgtgagttgcccagtcatgttgctagttgttgaagaaactaggattgttctcaggtcttgggctcctggcccatagaccagtggctctgtgttctgatggggtattggggaggatttttacaaatgcagattcctgagattgttcctggaacatctccgagtgggtgtgggttgtggccctgcgtgtgtgattttgcctatcccagctccggggtaccaccaaccactttttgtctctgtgggtttacctactctggatattttgtttaaatggaatcataccaggctgggcacagtgctcacgcctgtaatcctagcactttgggaggccagggtgggcagatcacctgaggtcgggagttcgagaccagcctgaccaatatgatgaaaccccgtctctaaaaaaatacaaaaattagccgggcgtggtgtcaggcacctgtaatcccagctactcaggaagcagaggttgcagtgagctgaggtcgggccattgcactccagcctgggcaaaaagagtgaaactctgtctcaaaaaaaaaaaaaaaaaactcgag

SEQ ID NO: 2211 - DNA, 2637 bp, Homo sapiens
acgagaacgagagccccatcccctgcttcctggccggggaccaccgcgccaacgagcagctgggcctgaccagcatgcacacgctgtggttccgcgagcacaaccgcattgccacggagctgctcaagctgaacccgcactgggacggcgacaccatctactatgagaccaggaagatcgtgggtgcggagatccagcacatcacctaccagcactggctcccgaagatcctgggggaggtgggcatgaggacgctgggagagtaccacggctacgaccccggcatcaatgctggcatcttcaacgccttcgccaccgcggccttcaggtttggccacacgcttgtcaacccactgctttaccggctggacgagaacttccagcccattgcacaagatcacctcccccttcacaaagctttcttctctcccttccggattgtgaatgagggcggcatcgatccgcttctcagggggctgttcggggtggcggggaaaatgcgtgtgccctcgcagctgctgaacacggagctcacggagcggctgttctccatggcacacacggtggctctggacctggcggccatcaacatccagcggggccgggaccacgggatcccaccctaccacgactacagggtctactgcaatctatcggcggcacacacgttcgaggacctgaaaaatgagattaaaaaccctgagatccgggagaaactgaaaaggttgtatggctcgacactcaacatcgacctgtttccggcgctcgtggtggaggacctggtgcctggcagccggctgggccccaccctgatgtgtcttctcagcacacagttcaagcgcctgcgagatggggacaggttgtggtatgagaaccctggggtgttctccccggcccagctgactcagatcaagcagacgtcgctggccaggatcctatgcgacaacgcggacaacatcacccgggtgcagagcgacgtgttcagggtggcggagttccctcacggctacggcagctgtgacgagatccccagggtggacctccgggtgtggcaggactgctgtgaagactgtaggaccagggggcagttcaatgccttttcctatcatttccgaggcagacggtctcttgagttcagctaccaggaggacaagccgaccaagaaaacaagaccacggaaaatacccagtgttgggagacagggggaacatctcagcaacagcacctcagccttcagcacacgctcagatgcatctgggacaaatgacttcagagagtttgttctggaaatgcagaagaccatcacagacctcagaacacagataaagaaacttgaatcacggctcagtaccacagagtgcgtggatgccgggggcgaatctcacgccaacaacaccaagtggaaaaaagatgcatgcaccatttgtgaatgcaaagacgggcaggtcacctgcttcgtggaagcttgcccccctgccacctgtgctgtccccgtgaacatcccaggggcctgctgtccagtctgcttacagaagagggcggaggaaaagccctaggctcctgggaggctcctcagagtttgtctgctgtgccatcgtgagatcgggtggccgatggcagggagctgcggactgcagaccaggaaacacccagaactcgtgacatttcatgacaacgtccagctggtgctgttacagaaggcagtgcaggaggcttccaaccagagcatctgcggagaaggaggcacagcaggtgcctgaagggaagcaggcaggagtcctagcttcacgttagacttctcaggtttttatttaattcttttaaaatgaaaaattggtgctactattaaattgcacagttgaatcatttaggcgcctaaattgattttgcctcccaacaccatttctttttaaataaagcaggatacctctatatgtcagccttgccttgttcagatgccaggagccggcagacctgtcacccgcagtggggtgagtctcggagctgccagaggggctcaccgaaatcggggttccatcacaagctatgtttaaaaagaaaattggtgtttggcaaacggaacagaacctttgatgagagcgttcacagggacactgtctgggggtgcagtgcaagcccccggcctcttccctgggaacctctgaactcctccttcctctgggctctctgtaacatttcaccacacgtcagcatctaatcccaagacaaacattcccgctgctcgaagcagctgtatagcctgtgactctccgtgtgtcagctccttccacacctgattagaacattcataagccacatttagaaacagrtttgctttcagctgtcacttgcacacatactgcctagttgtgaaccaaatgtgaaaaaacctccttcatcccattgtgtatctgatacctgccgagggccaagggtgtgtgttgacaacgccgctcccagccggccctggttgcgtccacgtcctgaacaagagccgcttccggatggctcttcccaagggaggaggagctcaagtgtcgggaactgtctaacttcaggttgtgtgagtgcgttaaaaaaaaaaaaaaaagtcgacgcggccgcgaatccggaccggtacctgcaggcgtaccttct

SEQ ID NO: 2212 - DNA, 1889 bp, Homo sapiens
  SITE (1859): n equals a,t,g, or c
  SITE (1864): n equals a,t,g, or c
gttctgattatgctgccttcacaaaacactctaagtgacctaagtggttatgaagcaaatgcatttatggtgaaaacagtctttgctcattgctttctcttgtttcatttagtgacaaatgatcaagatgacttgattttttttccttcttaacaatgtcttttttatttaaaccaaaggtgaagccagtgtactttctcagtgagttctctgcataaagactaatcagtgggaccaggtaaaaaggtcatataatacattgtggagattgcttacttaatacttctgaaaaatggagtaagggagaaactgtaatgttgcaatatgaacctcccattgggccttccatagggaaagctgtgactactctgaaatggaacctagcattatatccttgtagggtagattataaatcatttccagttcatttctcttagaggtgattacctctagccatcagccttactccatcccatgtttggtatgcaatttgagccacaaggctcgtatcgccaacagctatatacattttgttccatttttctgtcttacagagccatgataraactgtggttagtgagttaaaattcctggagtaactactgtttttctcctttgaaacttaggtttctaaagttgcacctaaggaatctgtcacattttctgttgaatcatggtttttgtttttgtttttaacagatattccttctgatacggacttgaaaattagtgtatggtgacctgtgtttaaaaaaaaaagtacaatacaactacatatagctatatagcttaatgagacttccacccccccccttttttttttttggtttgttgttgttgtagtagtctggtgctggccacatttaagtcttaaaaatttttaaattttgytgttgatgtttgtagacagccctgttgttgaaatcatggctttattcattttatttattttttaaacttgcctgaatttgttctaaaggaatatttaagagacataattttcttctctttaccataacattacacaaaactttttcctaaaacacggttgtgaggtactgatgaggtgtaagtggagctgttaaaaacagcagtgctgtattgyagttatgtatattcgtgtacagtatgtttagatcccaggtaaacatattcttttctgagaggataaatacctgcattcagatattccaggtaaatataattgagtcagggagtagtaaatctgatggagaattcactttggggaggggaaaaagaatagtatgcaagacccttattggcttttaattatacctgaaaccaaaatggatatttttagtctctctgcatgtgagatttggtgtaacaagatagaactataatatatacagtatatggaaggatagatatagtgctttgttcattttaattgcaaagctgccaaaatagttgaagcttaattacttgacttgccttgatttataggactggggcttggagaaaatgagcagatgttcctctaagacatcgattacagaagccttatatacatggatttgattttgtatttgtagctgaaagtcactgttgtctaaaactaacttttctaagttatcaaaacaacctaatttcttttccaacaaggagaacttaatggcatgaaggattgtgtgacacattggaaaagccagcttactgccactctcttcctttggccattagagggaggtgttgcctttcattgacgcttagaagcaaattgttcacttgttaagaaaagtaaatccttaaaaaaaaaaaaaaaataaccaatttttcttaatacccagaagggattttactcaatatttccctaggtaaggaaagggggggttatnttccncttaaaaccccaccgtgtattacaa

SEQ ID NO: 2213 - DNA, 785 bp, Homo sapiens
ggcacgagattttcatagctggcactcggggctatggctgaagtgtctgagaaaagaggaacgtggaaaagcaacctgatatcactccactgggaggccagaggggctctcaaataggacctgggttccaggcatgcttccccagggagagcaggagctgctttctcagtggggtgagaggccagcaggctgggtgggctggctggcatgtgcccaaggctcctgttcagctgggcttttctctcccgataggaagaggtgaaaaacttcatcacccgagagaacctggaggcacgggtggaagcagcattggactcccggaagaactacaactgggccatcaccagagaggggctggtggtcaggccacaacgcagggactcctaggggcccagtaaggacagtgcccgccagggaccatgtatgtatcatggcggaagagttggccctgacctggaataaagcagttggtgttgcttatgaggaaggttcagccttatccagcacagccttcacgttttgccctctgctgtcaccacttggtcagaaacttccaaacgcagtgccctgttctgccggtgtgtacagcctcagcgcaccaggagaccctagagtggtttccatctcacagagaatcagacagggccacagccccctcaggcagccaggtcatctgagtatcattaagagtagtgatgggaagattacagtctgagggccaaacgtgcctgcttcctgtttttgtaaataaagttttgttggaacacaaaaaaaaaaaaaaaaaa

SEQ ID NO: 2214 - DNA, 854 bp, Homo sapiens
ggcacgagccagcaacatcattgatgtgtctgctgcagactcacagggcatggagcagcatgagtacatggaccgtgccaggcagtacagcacccgcttggctgtgctgagcagcagcctgaacccattggaagaagctgccaccgctgccgtctcttaccagccagccccaccaagtgctggccagtgagcccatcccgttctctgatttgcagcaggtctccaggatagctgcttatgcctacagtgcactttctcagatccgtgtggacgcaaaagaggagctggttgtacagtttgggatcccatgaagagaggggtccttggacagctcttctcctctcttcatcccatctctaccccacccccttggcccccagcctcactgcggcttatacagtaccctaacctgctactaatcacagagaaaaatgtgaagaaggaggagaagaggaaggctagaagcctgagcaagtgagggtagaaccttttgggactggcctttgaagctctggccagggatggggtgggggccaaaaggacagagcctggtatgtcttcatagtcattgagaatgtggagataccagtttgggtggggggtgatcaccaggggacctagggagatccccttcccaccctctctgttggcctcagagtcactcctgccccctctccctgacttggtgctcacatgcacctcactagggtttgtgaccagggtctggatgagcttgaatttgaatgaattgagtttgtatttctagaaccctgggtttttacatgtttggtctttttttgttttggtttgtcaccctcgataaaggaagtatattcaaaaaaaaaaaaaaaaaa

SEQ ID NO: 2215 - DNA, 753 bp, Homo sapiens
ggcacgagcttttttttcaatctaaatgaagcttaccttagataaggttcatatttgtttcctatagagtaaataaacttccccttcttaaattgtgtaataagcaccaacgtgtggttgcttggcagaatgagaatgttaagggagattgttggatgtttggagtttcattatattttttgtttttattttttgatacctaggtgctttttaaaatattcagacaaatatctatcttacattgattaaacccgtgtaaattcatttgcagtatctacatcgaatgtcaaaaaagtatacttatttttgttccatacttatgtacaattttttccctcttcaggctttttcatttacctttttgaaaaagcacttactctccccttccctatcacccctcccccaaggtttctttatttaaatttttattgagagttgttggagctctaagacaatacaaatttagagttgaacaaaagtataatctgctttacaactagtatagacctaaggtcatttgctttcaattagaggctccagagtcttcatagtggaaagaatgctttgtatttaattgttcttagttaagttgtagcacgtgaatacttacttacatgttttgtttaaatatacttcttgcatagtttaattttttaaaagttgtatctaataaaatgtcttttaaccattattacttgactatatggttgtattaaattttgtttacgaaaaaaaaaaaaaaaaaaaaaaaaa

SEQ ID NO: 2216 - DNA, 864 bp, Homo sapiens
  SITE (251): n equals a,t,g, or c
ggcacgagctgatttttagccacgccacgtcgtatgaagtctgcctgaggctgaattatatattaacttgtggatcagtgagcccccgctgctgggggagtgcaagctgaggccgccatctgagtgcgttgaacaggaacacccagagccctatattgcaagaggtttgaactatgcaacttttttctcttttcttttctttcccaccctccctccatccctcgcccattcctccctccctcccctactcntcccgcctccctccctctctccctccctcctgattgtttctgctgcttggctctgggctgtgggtaaactccagcactgcagcttcatctgggagacccacagctcgtttgcttccttccttccttccttccttccttcttttccttcctctctcccttcctccctccctccctttctccttccttcctcccttccttcctttcttcctctccttccttccttcctttctccctccctccctccttccctctctccctttctttctttctttgttgcttttttttttctttttttaaaacagggtcttgctctgttgcccaggctggagtgcagttgtacaaccatagcttactgcagcctcaaactcctgggctcaagtgatcctttcagctcagcctactgagtagctagtactgcaggtgtgcacctgtagtctcagctactctagaggctgaggcaagaggatggcctgaacctaggagttcgaggcttcagtgagctgactgtgccagtgcactccagcctgggcgacaaaagaccctatctctaaaacaatatggaagtgtaagaagttggggaaataaaaggaaaaagaaaaaaaaaaaaaaaaaa

SEQ ID NO: 2217 - DNA, 1863 bp, Homo sapiens
  SITE (1825): n equals a,t,g, or c
  SITE (1836): n equals a,t,g, or c
  SITE (1837): n equals a,t,g, or c
  SITE (1851): n equals a,t,g, or c
ggcacgaggggcagagtagagatgaatagttgggtatggcacaggcggctacctgttgtatcagtgggtatggtttacctcacatagggcacctacacgtgaagaaatggacaacagaactgctttgtctgttggcatggttgtcttattggaggactgcattattggaggactggtttcctcttccctaccaggacaatcctccgaagttctttgagctttttctactgcctatttttgcagcccaggtcagttgatcaggaggtgtggccttgtatttggtccaccttgagtcagatgccgctctgcttactgagtatttttatattggactcaaatcatgatatggaatcatttgtagacagcagacccaccaaaattctgctgcgcatgacagcagggcagatcacggtgttaactgtaatcatcctggtagggagagggtatttatatactataggacagatggagagtgtgtactgctttcagaggtggaattgcaggctacctgggaggcaatgaatttccgcaacctctccaaaagcaaagatagaagacatgcctttctatctcttcacctctgatgcattcagagctacatcataatgttgcacaaggtcccctttaagagtaggtgtagcctgttagagtccaggcagggcatatgaacatagaacaagtaacttctcctacactcagtcgaaaggccacaacctccacacagaaggtgaggttcttcctgagcacaataatgtagttgccagatcttccacatggctgtatcaatgggcttgactctggagccttagatttgggcaagaacatttaatcatcccttgaaggaccaccagctaggattgttaccatgagagaatatggggaggagctatttaagaggatccaaaatgatgtgctgcagggctccaggctcattttattgtgtcagtcttatttaaaggtgtaagtttctcaagcagtgactagttcagggaaaaagaaaaaaaataaaggcataaggctcaaacaatcctttaactgacctctaagcaggtaataaatattactactttttttcttatagtttcttattttttaccttttttatgttcaactctttagtccacttgagatttttttctggtatgttatgtgaaacataaatcacatggacacttttatatggggcactgtcacgtgcaggattacaaatacctgttgtatttattcattcagtcatccattaccagttcaaggcacattgttagggaccagagatgataaacatcaaaaagaatgtgcttcttaatcggtagcagcttattgtccatttaaggagatcagaggtacataaattactgtatatacaaagcagcatgtaaaaagtgccatgtgagtgatgcgaacaagaaagaatataaaatataaggattgttttttatttttacctgagggcatattagggaactagcagtagattccttctgcctggaataagagttttcccagaagaagtgtcacttgagatgtacctacagggacaggtagcaatcttaatcatgacttgttggatataatgaacagaaatcctcttgtatcatctcaatttaaaaagggagctatccacttatcttgcttctaagaatctattctaaaagtaaactggctaaaacatataatgacctatgcacatagctattttttatggtattacttgcaatagcaaaagactgagaacaacccaaatattatcaatatggggctagtttaaaaaactatgatacatccacataatggaggactgtgcatcaaaaaaaaaaaggcgagntgggggcgtanncgagtcgccctganagtgatcggggg

SEQ ID NO: 2218 - DNA, 1114 bp, Homo sapiens
  SITE (56): n equals a,t,g, or c
caagcagcacattctcaagagcacacaggattaagttgtcatcattctgggaaganaaaaaaaacattaatgaagaggccaataatatgaagggaatcatggatcagttttctttcgctccctgtggtggatttcacttacaagaaaattgaagctggcaagaccctgttttctctgcaatttatttaaaaccttgcacgcatttggataccttgtgatttccaagaactacgtgaagattaagctttgcttactgatacatggcatgtattcttttcagtcttttgtgtttgattttgtttgatttccctctgcagcacagcgtctctgtaaaaggtttttatgctttcaccagccatgtcttaaatacattaaggacaacacatttggtgttcacacttcttccagtaaatgtctggaacttggaaagccacagagtggcattaaaacaatgtgtgttttctttgaggagcagtgcacattttgcaaccactagggaggaattttctgctaaagcaaacccctgttctctgacttgacaacttggccccggactgtggggccccacctgttgcttaccttttgaggtaawtttgcaaatgtggtttttttacttggaaataactgcacatttatatataggatattggactctgcttagcattttcaagccacatagcatgactgttttttgaataggttggaattgaaaaaacaattatcaaacgttaagaacaaagacagggataaattgcttacatttcaacctctggagattgaggtaactttttgtgtctgggtcttgtcaacatctaatttttttccatccattctgttacactttgtattttctaactggagaaaagagtgaggaacagaatgttttaaatctggtgcaaaagaactatatctgctggatgagccttgaaagcagtcttggcctgttagggcttacaaagtaaattacaaagtgatccagttcaaagtttgcttagttacaacaaagcacctttaaaaaaaatacattttaaaaaaacattccaagccaattggaagacatcattgggttcttactttaagacatctcatggaaaaaaaaaaaaaaaaactcgag

SEQ ID NO: 2219 - DNA, 796 bp, Homo sapiens
ggcacgaggttaaatatgcatgtatgcactattggttaatattttctattttctaataatctacaggtgtctgtagttaacgttgagtcatagtgggacttgagaagtggtgcatagccagtaagctgacttttcccacccataaaaatacatgtgttttgttcttgatactatgtgtgtgcacaacaatgggaaggccattgtcagccccccaggagggacacaccgcctgctgttccatatgaacgatgcttgctgatcctgtgtgtggtcacgcagcgcagttctaccttcccatccctgtgcaggtgactgtcagttctttaaattcacttcaagcagaaaaagcccaggaccccagaacagtaacatcacatccctgtttatataagcctgaagcaagacaagcgtcaggaagaaaatttccactttaccttttttctattaataaagaccttttaagtaaaatctctgtagtgcaagttggcatgagcagacttggtaacttgtctttaaaggagaggtttaaattggaacttttaaaaactagaaaacaacagattgataaatcaattttgtattcgctagatgaagaaggtgctgtattattcccagggataataactctcagaattaatcaggctaaaaagatacatttataaaaatattacagttttatatattaagcctaaattcgatgttttgatgtgtaatatgggataaaataacatactgttcagtgcatgaaataaaaactaaataaaaattgtcaaaaaaaaaaaaaaaaaaactcgag

SEQ ID NO: 2220 - DNA, 1545 bp, Homo sapiens
cggcacgagcccctccaggcttaccatcgggtcatcagcttggaggatttcatggagaagctggcacccacccactggccccctgagaagcgggtggcatactgctttgaggtggcagcccagcgaacccagatcagctaaagcatgtatataagagcacgttgtaaacttgaaagagacaaaggcacaaatgtggctgttgattaatttgactgcttctcgttgctcgtcacctccatgccaggcactgtgcttgctaattgctttatgggggcattctcttatttattccccagccctgggaaataggagctgtcattatccttctctttctgcacaaggaaaaattaatgccctgagaattgtcataattttcccaaggctgcccagctggtggtgttaagccagaatttgacctcccagagccagtttccattagctgccatgctctgctgcctctaattcacagaatgcactttctaccctgtgtgccatggagacctcctatggaaaaatgatcagccaccttaccttctactgggtacctgctgtgagtctgcctatgccagaaggattaaggaggggaggttacccaagaaacaaagcctacatgccgcttacagcccccgttggatggttgctcagtacaacagtcttgcattcagcaggtgtttgttcatcacctactatgtgtcaggctctatgctaggtactggggatacaggagagaatcaagcgtaaagtctttgttctcaaggaatttgcattctagaaagtagaagatgtaataaatgtactgtgggacatgttaataagtgctataaagaaatataaagggtttgggagcaaaaagagggagtggatctattttagatgagcccaggtaagacctctctgaagagctgtcatgaaggagggagggagcacattcctggcagagaaaacagcacgtgcaaaggccccgagactggagtgtgttcctgaagagcagccaggaggccagcatggctggagaggcaggcataggcagggaaccgagcagcaggtcagagcaggcgagctgacattctgcagcctggacggccatggcaggaagcttttagttggagagatacaggaagcctcctagggttctgagcagaagaggggcatgagctgattcacattctgaaggacctctctagctggccagtgctgaggaggttggagagagaaagggtgaaagcagagagaccagtgcagggctgttaacagggttgcaggcgagagactggggtgctgggctcccctagactaggactccagtgccctcctctcccaagagacaaaggaccattgcattgaaggaggtgggaaatgattagattctgaacatatgtaattatttttcagtctttttcaaagatacaaatatttacatagttttaatcatgtaatatatacaatttaatgtcctagtgttttacttaatagtgtatcatgttttccctgttggtatgtagcctggataaatgctcttaattataaaaaaaaaaaaaaaaaaaa

SEQ ID NO: 2221 - DNA, 1733 bp, Homo sapiens
aattcggcacgagtggacaacactatgaagctgtggctagaaagggactgtcatgtcccatcctttggccagattgactggggatgtccggacagatgcctgcatgggtggtgagggccacatctgcacacgagccagtggctgcttgcagttcactgctgtgatgccagagtgtgttcaaaggtgactctcctgctcttctggactcttctctcaggcaagaaaggctgcaggctgcctgctatgtgatgcctgagcacaaagccaaggaactgaactaagtctttctgttaagtcctgagtttgtcattggcaggtttacttgtggccagctctctctgcccttgggtgtctgagcaggcagaccagaagaccaggcactggacctgcatgccaaagggactggtcatctcctgaggacctgtaaatgaccctgtggactgttccgcacgatccggaacccactttttattcactccccatgtctttggccttcctcttctttctctttccctctgccatcctgacactgatagtttgtcatataaattccccgggttgtgtttttttttctagaaaaaaattaaaagggaaaacaaaaccaaaaaaaccagaaaccacgaataagaatggaaatgacaatggctgcctgtcatttttctgtcacgattttcctgatttggtttgttccctttgtctcagagaagcaggagatgttgatgaggctgtatttttttttctttttcttgtttttgagacaagagtctcgctctgtcacccgggctggagtgtaacgtggcatgatctcagctcactgcaacctctgcctcctgggttcaagcgattatcctgcctcagcctcctgagtagctgggattacaggcatgcgccactatgcccagataatttttttgtatttttagtagagacagggtttcaccatgttggccaggctggtctggaactcctaacctcaggttatccacccaccttggcctcccaaagtgctgggattataggcatgaaccaccgtgcctggccaaagatgtaatttaaaatagttagaagggacttggcatgggccagctccgtgcatggcattttcacccccagagcttcctaatcctgttttcacacaggaagtttctaggtctttctagaacagctagaaatagtagctgactcccgcccaaggcccaaccttcaaaccctgagctcttcaggctgcatcctctggtgagctatagaggagaacgtggctcctaaactctagccatcctgtgggaggaaatagacttctttgggctgtggcttgcagaacaaactacactttttttccctctattgtttaaattttatttaataatttgtgtgtttttctgtctttattttctgtatttcacgtgttccttcactccctagaaactgcactttctttgaaaccataggtaatgaatcttactaggagaggcatggggatagagacagttctgggagtgtgacctgtaagcctcctgtagggcagtgccaggccttgattgcccacgttctctccgttccttcttccttcatacatttgatcacacagcctacacccagccccgagtgtgcatcacggtaaaagagctgagggctctcttcagggagcagcccatttaggtctcttttgttgttgttagggagaatacacatctttcttggaaaaaaaaaaaaaaaaaaactcgagggggggc

SEQ ID NO: 2222 - DNA, 1417 bp, Homo sapiens
ggcacgagctgtcacctgtgttaggctccgtcccctttccgcgttttatccccgtaccagaaaaggatacatttagtgcctcccacccagctccactaaacgggacgcgcggcctcctcagcctctttcctcccgctgccatgcaccctgcagccttcccgcttcctgtggttgtggccgctgtgctgtggggagcggccccgacccgggggctcattcgagcgacctcggaccacaatgccagcatggactttgcagaccttccagctctgtttggggctaccttgagccaggagggcctccaggggttccttgtggaggctcacccagacaatgcctgcagccccattgccccaccacccccagccccggtcaatgggtcagtctttattgcgctgcttcgaagattcgactgcaactttgacctcaaggtcctaaatgcccagaaggctggatatggtgccgctgtagtacacaatgtgaattccaatgaacttctgaacatggtgtggaatagtgaggaaatccagcagcagatctggatcccgtctgtatttattggggagagaagctccgagtacctgcgtgccctctttgtctacgagaagggggctcgggtgcttctggttccagacaataccttccccttgggctattacctcatccctttcacagggattgtgggactgctggttttggccatgggagcagtaatgatagctcgttgtatccagcaccggaaacggctccagcggaatcgacttaccaaagagcaactgaaacagattcctacacatgactatcagaagggagaccagtatgatgtctgtgccatttgcctggatgaatatgaggatggggacaagctgcgggtactcccctgtgctcatgcctaccacagccgctgcgtggacccctggctcactcagacccggaagacctgccccatttgcaagcagcctgttcatcggggtcctggggacgaagaccaagaggaagaaactcaagggcaagaggagggtgatgaaggggagccaagggaccaccctgcctcagaaaggaccccacttttgggttctagccccactcttcccacctcctttggttccttagccccagctccccttgtttttcctgggccttcaacagatcccccactgtcccctccctcttcccctgttatcctggtctaataaccccccacacatacacctctggtgacctatttgcacagaccgtcgtcttccctccagtcttctgagggataggggacattccatcccaagcttctcccttacccacacctatccttttgaggggctttggggtggggctggggcaagcagagggactgggtcttcacttcttgggctaataaaattgtttctttgtggactaaaaaaaaaaaaaaaaaaaa

SEQ ID NO: 2223 - DNA, 1389 bp, Homo sapiens
gtctcaataaagaagttcttaaaaaaaaacaaaacaaaatttcagggcccatcaagttatatatatatraaatawatatwttrgtagatatggggtcttgctatgttgcccaggctgatcttgagctccagggctcaagtaagtgatcctcccacctcagcctcccaaaatgctgggatttcaggtttgaaccaccactgtcatccccataaataaagttattggaatacagccatactcattcattcatgtattgtctatggctgcttttgctctacaatagctgggttgagtacttggaacagagaccaaatgtctggcaaaagtctaacatatttactatcttgtacagaaaaaaaatgtcaacctacatctatacttattacaatttcagtaaaaatacagagtttaagtaatttgggaaaatggctttaagaatgaaaaggtgcaaggttatacctgctgaacaaatgaactgtgggcgtgaggtgccattagtctaggcctgcatgttcagggaaggcccaggggagagcctgatgtggcctggctatttgtcatatttgcaaaggggaagtgatgtaattggtctgcaatgaacttgattttcaattgactcaaagatctaaggaggaataaaaattatttaaaaaggaaattagggaagaatggggagaatattggaatcatttaatagaagtacaaacacatagacttttaacttttgcccattaaattttttttaacattttattttcttaaattttttttaaaaaaatagtgatggggtttcactgtgttgcccaggctggtctcgaactcctgggctcaagtgatcctcccaccttggcctcccaaagtgttggggttacaggcatgagccagcctcacccaacccattaaatgtctttaatgtaacttcgggtgtatgagaatttgtaagttgactgtgcagatctctwamaaggttgatatggtgtatttttagaatgttttagactgcacgtgtgtgtgtgtttgtttgtgtgtgtgtgtgtgcgtgctatagaaaacacagcatggaaaccttgttaaaatcagaggctttgattttttattctaaagctttgagttatatgtttaatcagatactatgtgaaaaattttcattaggtacatattgaagtgttccattcaagtctacaagtatatcctcctaaggatttagtttaacatcctttccctgctycaacaagggaatgctttattagagtttcctagaaataatgggactaattaggacctttcatattacctagtccagcagtccaacccatgtgacctccagtaaagttttggcaccaaaaaaaaaaaaaaaaaaaaaaaaaaaaaaaaaaaaaaaaactcgag

SEQ ID NO: 2224 - DNA, 1988 bp, Homo sapiens
ggcacgaggggcgaagtgtgggggatcacttgaggccaggagttcgacaccagcgtgtgcaacatagaactctgtatgtacaaaaaaataaaaaattggtcgggtgtggtggtgcatgcctgtggtctcagctgcttgggaggctgaggcatgggaggatggcttgggctgaggaggtcgaggctgcagtgagccatgatcgtgccacgatactccagcctgggtgacagagcttgactctgttttttttagaagaggacatgacagtcatggtcacgctccttttccttctcaggtatgtaactgctctgcgcctgacacgggcaacatggagctgctggtgaggtatggcaccgaagcgcagaaggctcgctggctgattcctctgctggaggggaaagcccgctcctgttttgctatgaccgagccccaggttgcctcttcagatgccaccaacattgaggcttccatcagagaggaggacagcttctatgtcataaacggtcacaaatggtggatcacaggcatcctggatcctcgttgccaactctgtgtgtttatgggaaaaacagacccacatgcaccaagacaccggcagcagtctgtgctcttggttcccatggataccccagggataaaaatcatccggcctctgacggtgtatggactggaagatgcaccaggtgagacctccaggggcgggtcacccctgggtgtgggtctggtccccaggaaacaccactgaggggcccctgctcttgttcaggacttgccacatcccacgtctgaaggtatgatgacatttggagtcacatgctcctgcatttcatttccatacatgaatatcaaccatgcaggcggatttcagacaggcatttatggatttttttccctcttctaaacttagaaagtaatcaggagtctgtgacacaggaagccatacagggcagacgcaggaagtggaccccaaacctactcttccaggccccagtgtgaacagctgacctctaggccacagccctggtttggtccgctcccagtttggttctctgctaatagtgttcacatttttactttcagtgttttcataggatcactacattgtcacaaaccactaggagcttcagcttaaggtggcattattatgtttttataaaaggaatcacagaatagtcatttgccattataaatcagtgattcattttctgtgtttaacaggctgtttcctgccgtccttttccctttaaccatgtcccagtaagaagctaaataaagggcagggacattgccagcagataacccagactgaggtgaggaataaacacatccaaggaaaatgactatggctattgctcacagtgatcgtttgggtctttcaggtggccatggtgaagtccgatttgagcacgtgcgtgtgcccaaagagaacatggtcctgggccctggccgaggctttgagatcgcccagggcagactgggccccggcaggatccatcactgcatgaggctgatcgggttctcagagagggccctggcactcatgaaggcccgcgtgagtgctttcccccgcacccagcactgactcagaaccaccaccttctgctttgctgtcggacttcaattcctacctgttttctgagtgcagtcctagcaggtgaagcaaggtgatgtccttgccaagaagttgcattcctgtctgctttgcatctgctactttgctgcagtttggattcagagcagaatggaccccactctgtcgaggtgacctgaagggaaacgccaggctctgtagcagcagaggcaaggttccaaggtgtaaaggtcatgctgctagcacattattaaaaatcagtctgggtgcaatggctcacagctataatcccggtactttgggaggtctaggtaggagggttgcttgaagccaagcatttgagaccagcctaggcgaaaaagagagactcagtctctacaaaaaaaaaaaaaaaaaa

SEQ ID NO: 2225 - DNA, 1301 bp, Homo sapiens
ggcacgagcagcctgtcccagtcatagctatatcccagcacccagaaccatgcctggcgcatagtagttgcctaataaatgtttgctggatgagtgagtgaacctctctgggccttattttcttcatcggaaaaatagtgataacaatggtaatagtaacaactactgcagtcaggatgatcatgtcaagctccaactcctcgatctggcctgcgatgccctgcatgctgctctcagtgtattcatacctcttcagctgcatttcacacggaagcccacggctctctgcactccagccacctaagccctgctccagtttctcaaactcatcagccccttatctcagggcctttgcaagtgctagatgcacttcyttcccttacttcacctagttcatcaaatagctttttaaattttttttggagacagagtctctctgttgcctgggctagagtgcagtggcacggtcttggctcactgctacctctgcctccctggttcaagtgattcttgtgcctcagcctcctgagtagctgcaattacaggtgcatgccaccatacccagctatttttgtatttttagtaragacggacttcaccacgttggccaggctggtctcgaactcctgacctcaagtgatctgcccgcctcggcctcccaaagtactgggattacaggcgtgagccatcgtaccccagttcatcaaatatcttacccgcattagcacttctttggagaagcttcctcagatctctagaccagactaaatcctcctgtcttaagcttttagagtgctgtgcgccttttctttccagctcttctcagaagtggtagctacagatttgttgatttacttttagtctaatgccagtgttctccagccttttgtcagctctgcaagatacagatgtggtttatttgctccaacatgtaaatgcagaacttagcccagtacctggcatggggtaggtgcatgatgcacgctgggactacacagacaaatggatggttgcctggcatggctcactgaggacactcaacaggtaccagcaccatttatttaagcggatcaactaacgaatgagttagagagtggctggaatggatgtatagcactaatttgtgagagaagacagaatgagaatgtaattccaaaacaatgagcaaacatcagaagaattgaagcaaataactgcaacatttccccagttgtccctctcattgttcttaaaataaaagcatttctgctacggagtcaggcaaataagtgaaaaagccacataaaggaagagcagtgact

SEQ ID NO: 2226 - DNA, 2192 bp, Homo sapiens
ggcacgagatggcatggactttctgtgcttccttctcctgtctggagccacgcctgccctcacctcctcagggacatcctgtcagcactctccacactccttgatgccccagagctgccacactcgcctgattccttgccttccagtctgtctgcaaccagatgcagccaggcctcgcctcccatgagtgtccctaagtccagggcaggctctggtccccacccacccgaggcagcagcatctagccctgctcctccctgcaccctctcacttctcagccatggacacacaggcccaggtacggttcttgttcattttggggatgtggagagccacgaacacaccaaagcctcctaggtgtctgctacagctctgacccacgcccggaccccagaccccagacccctgtccacctgagcgccaaaatctctgggtgccaggaagctttctgattctgccttcaaagtatttcctggaccattgcagtgggcacccacccctgggtctgccccagccctggtgttgccatctgttctcagcctggggctacagggaccccaagccctctgcttttggctcaaaccttgcacagcccattccccactgactgcccccctccactgctgtcacaattgctcgcactccctcatgctgttctggagctgttgaacatgccctctgggatcctgcccaccgccctcccggtccttaccttctttaggcctttgttcaaatctcccatcagcttggcgccccagggagccctctccatggtgtgcttgcccgaaacctaggtggaaggttcttcatcagagaaaccttggaagagcagcacaggagggtacatttaaagccctcagcggcgtccgttcctttgagggttctgggatctgaagcctctgaaccgtaggagcagctaggggaggccgtgcccctgtgtgaaggggctccttgtgccagccgacagggtgcgacggggtggtcggcccggctgccatcgtgggagggacgtggacaaacggcacgcagtgggaggccatgggcaaggttgatggcccatgggggcggcccctttgtctcttggggctacagcctgtgctgtgaccatccacaggccccaggggggtgctggcgggcatcagggaagtcccggtgacaaggggcatcagcaggggtcagaggggtgtgcccaggaggagcccctctgcattcttcagggtgcatggaacccacaccctgtccccaaagatgccctggacatgccctggggtggggggtggggggcagcacatgccaggctgccacatgtgtgtgtggcctcagggagtctgggctgggtcatcaggcatgaccattgccaaggccacatcctgactctaggcccctctggtctgggcagtgaggccaagcagagcacagggtctcgagaccccatgacctctagggtcacgcggaggctcctggggtcagactgagaaaggggctcgtcctgagaagccacaaagtgtgctcctgcgggggtgcggggtgggggaggtaccacgtctcccgggcagccacagatcccacactcacggcccaagtgacgcttggtgcagagctggaaggttctcagggtgggaggagggttatttttaacgcactgcactagagcatctctaaggccggtggttctggacagaaaaaccacaaaaatgagaagaccaggaatagcaagtccccagccctggggcctcatgtctgcaatgagcccttggtggctctgagcagtgccagttcagcaccttggagagctgccgcctctgtgccttcccttctgcttgctgcgtgggggcttgtggagcctgctaggaatcctgggaagagcccagatgggcctgccctcccagatggcctcttttgcctctggcgaagtgaagtgagcacctgtagtgaggtccattccaagcaccaggcccgggtgtctgtacagagcccgggtggggcatccaggcaccacggggaggcccccgccctggtctcacagacgttgccactggagctcctgccgtgcgcccactgccaccacctgtctgccacctgcacctcctcactgcggcagcactttctccacacaggttcttctctgatgcctcttccctaattttaaaggcattcaggtctcttacttagttaaaaaaaaaaaaaaaaaa

SEQ ID NO: 2227 - DNA, 1152 bp, Homo sapiens
  SITE (27): n equals a,t,g, or c
  SITE (29): n equals a,t,g, or c
ctccttcatgctttaacctgtcttggngncccagcatctgcctctacgtaggcactctctttaggaggctctgattctaagagaacagaatatttggaatgggcgtaatgagatattgagtgactttctcctttctgcaggactggatggtttccatgatcgtggacagagagtacagtgtggcagtggaggccgtcagattactgatacttatccttaagtgagtcctgggaagaggggaggccagtgtctcagacctttgcccttccagggtcatctccctccacctgtcacagctgactcttccatctgtgcaggttgactgaggtcattcctgagttgcagtatgttgagagggtaatatttctgtcttctctaactccccatactcccttgtcttccactctccayttaggagttttttgtgagttatgtccttgttgcttttgcctctttttctttctagccttgattgtgccagaagacaatgtccctattcacacactctttctgcttttctgtgggcaggaacatggaaggggtgctgatggacgtggactgtgagagcgtctaccccattgtgtaggcctctaattgaggcctggcctctgctgtgggtgaatttctgtactggaagtgagtggggctccttttacgtttctttaacaccaccctctcggtttctctcccacatgtgctgctgccctacttaaggcctccccatctccgtggaagtctctctgstgtctcttttcctctctcagctccttggggctttccttagctctgcacctccttttcctttatcatctccttgggccatctcctccstctgtggtcatsattacacctccttgtttcctcctgtgctgagccctttccttgtgtccattccaccagacttttctaccctgagtgcgagataagaacgatgggtggaagagagcaacgccagagcccaggygcccagaggactttcttccagcttctgctgtgccttctttgtggagagcaagcaaatcgsrgtcttctccaggctgacaaggcgaagggcatggcttcgaagtgcaaaagagtcatcatgaaacatcatgaatcatgaatcattaggcgtcttcccttcgctccccacttttttttttttttttttgg

SEQ ID NO: 2228 - DNA, 1893 bp, Homo sapiens
  SITE (4): n equals a,t,g, or c
tccntacttcgtccctgacacccaggccttctgccaccatctcccctgtcatccgccaactggccaccagtggccgcttcattgtcatcatcccaaggacagtgatcgatggcctggatttgctgaagaaggaacacccaggggcccgggatgggattcggtacctggaggcagagtttaaaaaaggaaacaggtacattcgctgccagaaagaggtgggaaagagctttgagcggcataagctgaagaggcaggatgcagatgcctggactctctataagatcctagacagctgcaaacagctgactctggcccagggggcaggtgaggaggatccgagtggcatggtgaccatcatcacaggccttccactggacaaccccagcgtgctttcaggccccatgcaggcagccctgcaggccgctgcccacgccagtgtggacatcaagaatgttctggacttctacaagcagtggaaggaaattggttgatactgacccccaggccctgcagtggggctgactccagatctctcctgccctccctggcagccaggaccagcacctgtagtcaccccaccacacgcagactcatgcacgcacacaggagggaggcctagctgctcagaggctgcagggagggcccaggagccggctgggagggtggggtccctttgttgccaagacgttaggaaagcgaggaaagtgcttggattaggagagtcttgtgggcccctggccagccttcctgcctcagctcccctgctgtctccaggggcaggtggtaggcatgggtacctgcatttcactggaatgggttcttggatctctgaggggaaggaacagcaaaagaggcccttcttcctcacccaagatgcagggtggttggggccaggagtttggaccctctaggtcttgggggaagagctgggtaatacctggtgtctgagtgattctctgcagacccttcccctcctcaaggatcacccatcctcctttcagccccctttatggggaccaggcagctctggagccagccacaggggctgttagagaagcaaggcctggagtggcctgcaccgagtagcagggtcagggttcgtgtgctcctcctcctgctgcaggggctgcacatcccattgccccacttctgctttgtgtctccctctgtctagcttccagggcagggagcaggccccacctagggctgcaggcagtctggcctgtgccagcacggtctcctgtgcccaccagccccacaggtgctgtgctttgtgctcttggctgctgtgctgggacagaatgggatgccaggaagagaagaaagggggtgcagtctgaggccaccaccccccttcctatctaagggagggctgaagacaaggggccggcattcagtgggcagcagaaaggagaggctccttgaagctgctcagtcagaggcccccgtccctccttttgccttccgcaggactgaagacctgaaggggctggcttttggagtgttgaggtgaatatctgggagcagagatcatgaatagctcagggcagtgaatggcgcaccaagagcagggctgtgtgtgggaggctgcagccaggattgcctcagctcctccccctcaggctgggaggatagcacaggctaggggctcggggtggagggtctcagctctgctgcccccaccccagtactagcctagcttcccaagctgtggcttagaggatagttggcttcctgcctctctcctctaaaatagcaagtctgggaaatcctggggtgagtggagtcaccccactcccagttgctggcagagactgagactaaagcatcacttaataaaccccccaagcccaaaaaaaaaaaaaaaaaaaaaaaaacctgggggggggcccc

SEQ ID NO: 2229 - DNA, 2108 bp, Homo sapiens
  SITE (78): n equals a,t,g, or c
  SITE (219): n equals a,t,g, or c
aattcggcacgagaacccagaggttggcatcttcgtcagcattgcccagtctgagcaggagagcctgctgcagcagcncaggcacagttccgaatggcacaggaggaagctcgtcggaacaggctcatgagagacatggctcagctacgacttcagctcgaagtgtctcagctggagggcagcctgcagcagcccaaggcccaktcagccatgtctccntacytcgtccctgacacccaggccytctgccaccatctcccctgtcatccgccaactggccaccagtggccgcttcattgtcatcatcccaaggacagtgatcgatggcctggatttgctgaagaaggaacacccaggggcccgggatgggattcggtacctggaggcagagtttaaaaaaggaaacaggtacattcgctgccagaaagaggtgggaaagagctttgagcggcataagctgaagaggcaggatgcagatgcctggactctctataagatcctagacagctgcaaacagctgactctggcccagggggcaggtgaggaggatccgagtggcatggtgaccatcatcacaggccttccactggacaaccccagcgtgctttcaggccccatgcaggcagccctgcaggccgctgcccacgccagtgtggacatcaagaatgttctggacttctacaagcagtggaaggaaattggttgatactgacccccaggccctgcagtggggctgactccagatctctcctgccctccctggcagccaggaccagcacctgtagtcaccccaccacacgcagactcatgcacgcacacaggagggaggcctagctgctcagaggctgcagggagggcccaggagccggctgggagggtggggtccctttgttgccaagacgttaggaaagcgaggaaagtgcttggattaggagagtcttgtgggcccctggccagccttcctgcctcagctcccctgctgtctccaggggcaggtggtaggcatgggtacctgcatttcactggartgggttcttggatctctgaggggaaggaacagcaaaagaggcccttcttcctcacccaagatgcagggtggttggggccaggagtttggaccctctaggtcttgggggaagagctgggtaatacctggtgtctgagtgattctctgcagacccttcccctcctcaaggatcacccatcctcctttcagccccctttatggggaccaggcagctctggagccagccacaggggctgttagagaagcaaggcctggagtggcctgcaccgagtagcagggtcagggttcgtgtgctcctcctcctgctgcaggggctgcacatcccattgccccacttctgctttgtgtctccctctgtctagcttccagggcagggagcaggccccacctagggctgcaggcagtctggcctgtgccagcacggtctcctgtgcccaccagccccacaggtgctgtgctttgtgctcttggctgctgtgctgggacagaatgggatgccaggaagagaagaaagggggtgcagtctgaggccaccaccccccttcctatctaagggagggctgaagacaaggggccggcattcagtgggcagcagaaaggagaggctccttgaagctgctcagtcagaggcccccgtccctccttttgccttccgcaggactgaagacctgaaggggctggcttttggagtgttgaggtgaatatctgggagcagagatcatgaatagctcagggcagtgaatggcgcaccaagagcagggctgtgtgtgggaggctgcagccaggattgcctcagctcctccccctcaggctgggaggatagcacaggctaggggctcggggtggagggtctcagctctgctgcccccaccccagtactagcctagcttcccaagctgtggcttagaggatagttggcttcctgcctctctcctctaaaatagcaagtctgggaaatcctggggtgagtggagtcaccccactcccagttgctggcagagactgagactaaagcatcacttaataaaccccccaagcccaaaaaaaaaaaaaaaaaaaaaaaaacctgggggggggcccc

SEQ ID NO: 2230 - DNA, 2266 bp, Homo sapiens
  SITE (85): n equals a,t,g, or c
tcacagcagtctgagcttatctgttttgtctttccctaccttgcccaccagtgatcgatggcctggatttgctgaagaaggaacnctccaggggcccgggatgggattcggtacctggaggcagagtttaaaaaaggaaacaggtacattcgctgccagaaagaggtgggaaagagctttgagcggacataagctgaagaggcaggatgcagatgcctggtaacattttagccctcacccctagaacctcaggccacctgccttgctcctccacgagcattcctagggagaacgggtagggctggataattctgaggctccacacgtagcctgccagggccctcctgcaggcctcaccttgcgaggagtacgaattgccgcagcacctgagcttttcctctgcagatgggtcagcctctttgggccttgcgatgctcaggcttggtgttttccctcaatgcacctttgcctgctccccatatgtctccagggccagcttccagggcccactgctgctcactgccctcccagcccccagtgcccctgtcccctggagatcctggtgtttgggctgtgctaatgctgggtcttggcccatcttcccctctgccccccatccccaggactctctataagatcctagacagctgcaaacagctgactctggcccaggggcaggtgaggaggatccgagtggcatggtgaccatcatcacaggccttccactggacaaccccagcgtgctttcaggccccatgcaggcagccctgcaggccgctgcccacgccagtgtggacatcaagaatgttctggacttctacaagcagtggaaggaaattggttgatactgacccccaggccctgcagtggggctgactccagatctctcctgccctccctggcagccaggaccagcacctgtagtcaccccaccacacgcagactcatgcacgcacacaggagggaggcctagctgctcagaggctgcagggagggcccaggagccggctgggagggtggggtccctttgttgccaagacgttaggaaagcgaggaaagtgcttggattaggagagtcttgtgggcccctggccagccttcctgcctcagctcccctgctgtctccaggggcaggtggtaggcatgggtacctgcatttcactggartgggttcttggatctctgaggggaaggaacagcaaaagaggcccttcttcctcacccaagatgcagggtggttggggccaggagtttggaccctctaggtcttgggggaagagctgggtaatacctggtgtctgagtgattctctgcagacccttcccctcctcaaggatcacccatcctcctttcagccccctttatggggaccaggcagctctggagccagccacaggggctgttagagaagcaaggcctggagtggcctgcaccgagtagcagggtcagggttcgtgtgctcctcctcctgctgcaggggctgcacatcccattgccccacttctgctttgtgtctccctctgtctagcttccagggcagggagcaggccccacctagggctgcaggcagtctggcctgtgccagcacggtctcctgtgcccaccagccccacaggtgctgtgctttgtgctcttggctgctgtgctgggacagaatgggatgccaggaagagaagaaagggggtgcagtctgaggccaccaccccccttcctatctaagggagggctgaagacaaggggccggcattcagtgggcagcagaaaggagaggctccttgaagctgctcagtcagaggcccccgtccctccttttgccttccgcaggactgaagacctgaaggggctggcttttggagtgttgaggtgaatatctgggagcagagatcatgaatagctcagggcagtgaatggcgcaccaagagcagggctgtgtgtgggaggctgcagccaggattgcctcagctcctccccctcaggctgggaggatagcacaggctaggggctcggggtggagggtctcagctctgctgcccccaccccagtactagcctagcttcccaagctgtggcttagaggatagttggcttcctgcctctctcctctaaaatagcaagtctgggaaatcctggggtgagtggagtcaccccactcccagttgctggcagagactgagactaaagcatcacttaataaaccccccaagcccaaaaaaaaaaaaaaaaaaaaaaaaaaaagtcgtwtcgatgtcgagcgatcatgatgaatg

SEQ ID NO: 2231 - DNA, 831 bp, Homo sapiens
  SITE (595): n equals a,t,g, or c
  SITE (602): n equals a,t,g, or c
  SITE (631): n equals a,t,g, or c
  SITE (632): n equals a,t,g, or c
  SITE (644): n equals a,t,g, or c
  SITE (658): n equals a,t,g, or c
  SITE (688): n equals a,t,g, or c
  SITE (718): n equals a,t,g, or c
gagagagcagctggaacagagagtcccagagaactacttctatgtgccagacctgggccaggtgcctgagattgatgttccatcctacctgcctgacctgcccggcattgccaacgacctcatgtacattgccgacctgggccccggcattgccccctctgcccctggcaccattccagaactgcccaccttccacactgaggtagccgggccactctgctagagtccatccgccaagctgggggcatcggcaaggccaagctgcgcagcatgaaggagcgaaagctggagaagaagaagcaggaggagcaggagcaagtgagagccacgagccaaggtgggcacttgatgtcggatctcttcaacaagctggtcatgaggcgcaagggcatctctgggaaaggacctggggctggtgaggggcctggaggagcctttgcccgcgtgtcagacttcatccctcctctggcgccaccgcagcagccacaggcagaggaggacgaggacgactgggaatcctagggggctccatgacaccttcccccccagacccagacttgggccgttgctctgacatggacacagccaggacaanctgctcngacctgcttccctgggagggggtgacggnnccagcactgtgnggagaccagcttcnaggagcggaaggctggcttgaggccacacngctggggcggggacttctgtctgcctgtanttcatggggggacggctccacccagcctgcgccactgtgttcttctcttaagaggcttccagagaaaacggcacaccaatcaataaagaactgagcaaaaaaaaaaaaaaaaa

SEQ ID NO: 2232 - DNA, 972 bp, Homo sapiens
gccgagatcttgccactgcactccagcctgggcaacagagtgagacgctgtctcaaaatctcaaacaaacaaacaaacaaaaaacaaacaaacaaagcgtcatttatccagcacccctggggaaccatgctacctggtgttttatggtacctggcaaggtgcaggtgaagttgctgctcttgggcattgaacccgtcttgtttggggcagctcaggccccaggcagggtccgggttggctctcgttggtgtggccctggcccatccagacctatatttctgccgtcctgcaggtgatcaatgttgatgggacgaagaggcggaccctcctggaggacaagctcccgcacattttcgggttcacgctgctgggggacttcatctactggactgactggcagcgccgcagcatcgagcgggtgcacaaggtcaaggccarccgggacgtcatcattgaccagctgcccgacctgatggggctcaaagctgtgaatgtggccaaggtcgtcggaaccaacccgtgtgcggacaggaacggggggtgcagccacctgtgcttcttcacaccccacgcaacccggtgtggctgccccatcggcctggagctgctgagtgacatgaagacctgcatcgtgcctgaggccttcttggtcttcaccagcagagccgccatccacaggatctccctcgagaccaataacaacgacgtggccatcccgctcacgggcgtcaaggaggcctcagccctggactttgatgtgtccaacaaccacatctactggacagacgtcagcctgaaggtagcgtgggccagaacgtgcacacaggcagcctttatgggaaaaccttgcctctgttcctgcctcaaaggcttcagacacttttcttaaagcactatcgtatttattgtaacgcagttcaagctaatcaaatatgagcaagcctatttaaaaaaaaaaaaaaaaaactcgag

SEQ ID NO: 2233 - DNA, 1695 bp, Homo sapiens
  SITE (1256): n equals a,t,g, or c
gaattcggcacgagcatacgcagaaatggttaaattctgacttggaattccatgggaattagcaggctgtagacgaggttctggccgagaatgtcatggttggaccaagacttcccatggggctgctgtttgtggccagtttcttgtttttatttatccaatgtgtacatatgcccagaagctatttgtaatgggagtgttttaagaaattcataaatttaaaacactccacacatacaaaactctttctgaaatgtgacatcttaaaattattttctcaaagtgacataaawtaaaacagcgtaacagccatctctttgtaatatgctctcttatatttaatttttattaatcttcacctaaatactagataacatcatgaagagagcaaaataaactggccatctcagtttaaatggccaacagtcatcttttgatgtttatttctttgaaacaaaatgcaccctacattttattttggagcaaacagtcatcagaagtaatgtgaatttgtatgttttgmcaaaaagttttmcatatatgwtttaaaaggtgtttatgtawtatgaattamcttgtgtacaaaagagatmcagatttttcaaagagcaagcatctgaatgttaagaactgagttcattgaggttaaattgttctcaggaagtttaaggtaaaaaagaaagaaaaagattgtacttctcctatggcaggaagaggctcatttccagggtagagacttctgaaatccataaaatmcattccagatccaagacttcatgcatcatacctggacactgctgtcatagagagagwcttgtgagtggtttcctttcatttactgaatagagataaaaatgcccaaagcatatgtgagggrcaaattttaaaaattaatttaaaaattctgktctgkttaacactaataatctctaatgtatccaacttttcaattattgaaaatccaaaagtcaaatgkggagcaaaccttgaaacwtagagcagtaatgaatatctgctgccaatagcaaaatattcaccaaaattcaagcagaaggtgaatgtgactgaatgagaggtccttaagctttttcatgccatggaccctttggtagtctggctaacgtttctaataaaacaaaacaccggcttataaagaaaatcmatcwtatgraaatgaatrttgatcmcaatatttwaagraatwccmagtttgtgatgtagtaatatttgtgtctttattatgctataaaaggcangatgamcaggaggcttgatattgactcctttttgaagtaggatgagcataaatgatacattgaaatatctgcaaagttataatgtgatatgaaagtgtctgtaatttttattcctggcaatgtgatagaaactgctagtaatactgtggtttgttgaaagaaatgctacatttcagataagattagtgaaattgaagatataatttttttctattcaacttcatggaatctgaagaacgtaggttagaaagccctgatgtaaatgtacaatgcaaggtcatggccataaatgtatagtttcacatatttgcctttggtcaagattttgtctaatatcttggttattttagccagtgagtagtatttaccacatgggttttcactacaaagaggttaaaaataaaacagcaacaacaaaaaaaaaaaaaaaaaactcgta

SEQ ID NO: 2234 - DNA, 1320 bp, Homo sapiens
  SITE (490): n equals a,t,g, or c
  SITE (615): n equals a,t,g, or c
  SITE (1099): n equals a,t,g, or c
  SITE (1115): n equals a,t,g, or c
gtctgtccccagtaaccccggctcccctcctcccccacccgctggaaaccacgactccgccgcccacctctgcatttgactgctccaagtacctcaggaaatgacctcatgcggtctccgcacgttcgcgtccatcttgtttatttccagcgtttggcccgtgggagcgatgagcgcacctgttcagcccctgctttcagttctttcagggagttctcacgtggtcttcagaggttcccacacgctgcttcccacagcagctgcaccattgtacattccaacagcaacggacaagggctccaatctyttcgtattyttgcaaacatttactattttatgtggkkgttttttcttttctttttttttttttttttttgagacggagtctcgctctgtcgcccaggctggagtgcagtggtgcgatctcggctcactgcaagctccacatcccgggttcccgccattctcctgcctcagccgcccgagtagntgggactacaggcgcccgctaccacgcccggctaattttttgtatttttattagagacggggtttcaccgtattagccaggatggtctcgatctcctgacctcgtgatccamccgcctcggcctnccaaagtgctgggattacaggcgtgcgctactgcccggtttgaaaaggcaattgaggtttctaaactcctactaaaggaaataattcctagagttgggctgcctaagagcttacagagcgataatggctcacctttcacagcgacagttacccgaaacacatcttcagccctaggaattcagtgccgccttgactcggcacggaggccacagtctttggggaaagtagaaagagctaatcaaactctaaaaaggactcttgctaaactatgccaagagacatcagaaacctggaggtctttattacctgtagccttattacgggttcgaatggccctaagggaaatctgcatctcagcacttttgaaataatgtatagaaggcctttcttaactacagacctcctaatagacatagatactttcaagctacagaattatgtgatcaacttasgacaagtgcaaaacgcactccttgactatggnaatcagagactccctncccccactgaggaagacaatgtggttccaacccagctgggagactgggtcctattgcaaacttggaaggaaggatcctcagcagatcaactttccccccaagtggaggggactctatcaagttctccttagtaccccaactacagttaaacttctgggaataaacagctgggtccacttatctcaaattaaaaaaaaaaaaaaaa

SEQ ID NO: 2235 - DNA, 805 bp, Homo sapiens
ggaaaagtagtgaaactgttcacagatgggatgatcttatatgtagaaaaatctaaggaatctactataaaaaccagtaaactaataaataggttcaacaaaggttcagaatacaaggctaatattaaaaaatgagtagtatttctatagagtagcaatcaacaaaccaaaaattaagaaaacaattttatttataataggatcaaaaaaataaaatacttaggaacttaagtgtaaaacttatactctgagaattctaaaacatcattgaaagaaattaaaccctaaataaatgtaaagacatcccatgtctttgaatcagaaaattaatattgttaagataatgatagtcccattctgatctatagatcagccttacagattcaacacaatttctgtcataactctcagctgactactttgcacaaatggagtagctgatcctaaagttcatgtggaaatgcaggagacttggattaacaaaaacagtcttgaactaggccgggtacagtgactcatgcctgtaatcccagcactttgggaggctgaggcaggaagatcacttggcctcaggagtttgaggccagcctgggtaacatagtgagacccctgtctctataaaaaatttaaaaattaggcaagcctcgtgacacccacctatagtcccagctattcaagaggctgaggtgggagggtagcttgagcccaggagtttgaggctgcagtaacctgtgattgtgccactgcactccagcctgggtgacagcaagactctgtctcaaaaaaaaaaaaaaaaaaactcgag

SEQ ID NO: 2236 - DNA, 1538 bp, Homo sapiens
ggcacgagcccaggtaccttgtgacactggagtgtcatattagccctggactacccacctcctgacctcatgatccacccaccttggcctcccaaagtgctgggattacaggcatgagccaccgcgcccgccaccttgattattgtttaaataaaagatgaataaaagtacattcttatttttgattataatgtggcccaatgtatacatttcacttagtgtagcacatcacattgttcttactaaaactatttctagttttacaccagctcagatttttaaatattcattgctttttcctacttctgtctcaggcattgccattctcttcaaaacatatttgaaaaatgtccaggcttctcatctctgtgtaaaactgttcagtttgttccagtgtgacgagaaaaattggactgagcatacttttttgtgagacatccattttcttcctttgatgaatttgacaacttgtgacaattctcacattttggaacaagtctcctaattatagaagaagctaataatgataatataagaaattataaattatttgactgttttcaatttatccaaaaggaagtttatcaaactttctcctcctactttctgctccaccccacccctcagccccgatgcacacgctgtgccgtcacagcacttatgcctagagaattatgatccttaaatagcagtcaactcttcttaaatagcagtcagttgttctagcagtgtatcagttagacattctagaatatttcacaaaataagaattttgcagaaggaacattatagctccctaggtctagcaaatgagggaactagggtacagagaaattaagtgacttaagatctcacaacaaactagtggagtacttctacttaaatatatctctagatactcatagaaggtaaaagctacattgaaaattcacacaactcttctggaaagtggcaaattcaatgatgctgtaaagtctggcataatattctagtggtcaagacactttgggtagtaaatgagagaggccaaattcaaatcaggctaagaataaaaagaaatgttttctttcaagtgggtggagctcaagtaagtgtaaattccaggggataaattggattcaggcatagctggatgcaaaggctcaaaaatgtcatcagaatctgcctctttttctctcttggtgttgcttgccactgtgttgtcctcattctcaggtagcttgactcacacagctacaacaatggcttatatcctaatggttgatcagccacagggcagagtacacttttcctcagtggtccaagcaaaaatcctggggctcactcttactggctgacttggatcaggtgtccttctggagcacaacacagtgactccaggtggccaagcttgaatctcatgccacatccctaccaccagctccactaaaaagaaccacatggacagaaggggaggagtggttacaaagggaaaaataaatgtttattacccagggagggataatgaatgtaaggcaagcaaaaaaaaaaaaaaaaaa

SEQ ID NO: 2237 - DNA, 698 bp, Homo sapiens
gtaaggctttatcatctttacctctagatgaatagatgtgaaaaccatgtatagtatgtatgtatatgttagtgtgtatatgtgtctttatcttaaattcttacatttgttgtatctatctagtgctcagtatgttatatgatagtacaacatccaaaatggatcaagtgtgagaaatttatttcacatcaactttcagattgcaatgtttattcagtatttattaacacacatgggaaatattataaaattatgtctttttttagattctctttaaatgatattttcccttagaattctctgtggctcccatgaaattctaaggtataattaaagtcaaaaataagattggattctagttgcttttacccctaaatttaaaagtgatatttcaacactaaattctatactttacctaatttgattacaaagatgaaccacataatctcagcattagcctcaaaggcaaactcaatcataatagaaggaacacaagctttgatgagatctggatttcaggcttagtttggtcaaactgaattaactgagccttgtgacacacacctgtagtcttagctactccggtgactgaggcaagaggatcgcttgagcctagaaggtggagactagagtgagttgcgtttgtgccactgcacctcagcctgggtgacaaagtgagatcctatctcaaaggaaaa

SEQ ID NO: 2238 - DNA, 525 bp, Homo sapiens
ggcacgagatttttataatactatgctgaatctacaaatggaatactgggtaggttggctgggcacaggagatggctgcacctcctgcagagttaaccttggctgagcaagaggctccagggctgggcaccagatcaacctcatacccctaagtgagggcatcattaatgtctgtggcctgcaagtcgaggcatgcaggcagtcactgggtcaacatctgagcactcctggaccagaaccagtgcattccagaattcttgaattgaggatactaagacagggattcataatgccctctgcttgatgtgctggtggttgccaggaggcttggcttcagattcagaggaagataccaaaaaactgatcgtttccttgaattggcttttctatttacttcgtctgtgtctctcatattgaatatcctaagagagatgctggaatattttggcgttcctctagaagaagttttaccgattggagaaaaaaaaaaaaaaaaaaaaaaaaaaaaaaaaaaaaaaaaaaaaa

SEQ ID NO: 2239 - DNA, 861 bp, Homo sapiens
aattcggcacgagtgcaccccaacataccgtgtttaactcttctgtcttttgtttttgctgctatttatattttcatttgatatgttttataatgtttgtccctagagttgtcctttattgaatacaagggtcttttctcaattgctataatgtctgttataatccagatgtagatatttgaacaatgtgaatacacatctttatgtgtattatcttaagtgctgtttaatattaaagtgtatttaaaatgaccagatttcaaattagtgcagttttgagatatttgttacttaggtcttaccaggtatgcacctgtgttgtaatttatgttggtatgctttagatctggtgtttccttggttttttgctgccgtatctcaagtggctagatttgatatttccttatccctgatctgacatttttatgtgaccaagtttctgtagcattttgttgaacaccaggtactgttgccactgtgcctaaccctaccatctccactccatgctatctcttactttacatgtaaatgacagttattttagtcacttttcacaatgtgaaatgtttctaggacacttgtccatgaacaggagcaaattgaaatttgaaatgatcacatctgattgacttgtaattagaggatgtttgggtgtggttgaatgtattgtatctgtacttattgaaaaacctgaaagacctggactcactatgttttgttctgcaacctggttagtcagctacgtggaagtgaccagagagttgaaagccaatttatttatccctccaagatgaataaaacataaattactcttctagcaaaaaaaaaaaaaaaaaaaaaaaaaaaaaaaaaaaaaaaaaa

SEQ ID NO: 2240 - DNA, 571 bp, Homo sapiens
ggcacgagataagatctagctttgcattaaggaagctagaaactgaagattgctatgtagtctatccttgatcattccttgacaattagagaacaaattgagcatggaccatttatcccctatttatatgcaaaattgttctaagtaagtattgatgatgttctctatagaaatttcaatcactcacttccttgtctgttctcctacacaatattatcagctctgctgcacatttcctcattggtgatccctgcaggaaaataggagataaggtcaattctagttgacttttatgagaatatgattatagcaggctttctttagttattggaatatgtgataagttaggacaaacaattatgcagcaataaatttatcttggttgttttaagttcatgtcaaaaattcagacatgctaatgttggtagctaagctcacacaactacctgcttatttacaaacttgcaattcaggaataaatgattgggatcttatatggcaagtgcatgatgccagtctaacaggagcagacgctctgtgcatttgcaactacaaaaaaaaaaaaaaaaaa

SEQ ID NO: 2241 - DNA, 446 bp, Homo sapiens
ggcacgagaaaacatatacatttatttaatataagtttatgtggcatgaaaaccttcagaatttgtgaagacccaaagatgcagtttgtattgaccacttatataaggaattagacaaagagcagtaaattgcagaaatgtgatgaggtggggggtcgggggcttgggccagggcaggtgattggaggagaatggctgggaaggaagggccagtatagcaggtggtacaggtttccctcagcctcagcttctggtccttgcccataggaatcatgcctcccacctggccaagggaggacacctttcacatgggaatgtcatctcctgcttttcagaaacagaaggaaggtcagagtgatcttcttgtacctgctttttgtttttgtttttgtttttgtttttgacagagtgagactctgcctcaaaaaaaaaaaaaaaaaaaaaaa

SEQ ID NO: 2242 - DNA, 780 bp, Homo sapiens
ggctttttgaaataacttagacaaataatttcacacaataccagcataaacaagtataaacccgttcacattaaccaggcatccttagggaagattctaatggcctgaatggacatttcaattacatatatgttgatcatgtgtatttttctagtaagcactagtaccttacttgccctcccctgattaaacaaaaactgaaggtataaaacctgcccaaatggaaacctattttttcatagaaaacattgacaattatattttcatgttattctatctctgtttctaatgcatttttctcatattcataacaggggagatagagttattcttcttaaaagagttgatcaaaactggtatgaaggtaaaatcccaggaaccaacagacaaggcatcttccctgtttcctatgtggaggtcgtcaagaagaacacaaaaggtgctgaggactaccctgaccctccaataccccacagctattctagtgataggattcacagcttgagctcaaataaggtaagaacatactctatcatgttaatgtaatattggaagctccaagtaagataatcggtgtgtgactttaggatattagattagaatatcatatctattgcagagaaagagatttacatattatgtttctacatgtgtgagtgccacatcagtaaatataagtcagtgtttctcaaataggtgctggcataaagatttaatgattaattttgctcatttcattttcaagttaaaatatcgaaaaaaaaaaaaaaaaaactcgag

SEQ ID NO: 2243 - DNA, 464 bp, Homo sapiens
cggcacgagctggtttctacatggaagactaaactcatgcttattgctaaatgtggtctttgccaactaaatttaagatgcagcattttagaaatttacatatcaatgtttctacagtattgtttgctaatttttaaataaagtcatgatcagtgtgcatttgtgattatatgtgtactcattctcttacctagcgaacaagatcttttcagagtggtgtttctaaaagagcatgtacaaaagtggcctgtggacatttaggcctgggtgatgcatttgctcttcctgtttgtgccaatgtatcaatgtagagttgctctgttttcttcaactgtatttattgctgcatttctcagcataaacttatcccattgtattttttataaataaatattttttttgaactttaaaaaaaaaaaaaaaaaaaaaaaaaaaaaaaaaaaaaaaaaaaaaaaaaaaaaaaa

SEQ ID NO: 2244 - DNA, 785 bp, Homo sapiens
gttttgttttaatctttgggggtaaaataatgcaataatgataaaacaaaattcaaaagcctgtaaagctatgggatctgcttgggattttcaagggtgagatagggtctataatagacatgtgtttactgattgtraccccaggcattggttttctgtscttcattgttaggataggtggatctggggacacagrctgrgtggagtggagaagaaaggatttattaataatcagggaggagcatgtgggatagatctgaggtatctgcaagcatttgagaactactgattgtaactatatgaactgaagatggctcagtgcaatcctgggtctttccacattccatatttaattaaaggcctttgccatatcttggttcctggctcaattttagtcagataaaatttaagttattataaaataataacaaatttggcatataaggttttaaactgatcacggtagctggacagcattagcaacaatagttgaaaaaatagagcttctttatgcagtgatatctgtataatctatttagctcaaagataacattgagtttatatccacgtatgtttatgaatgtgtaatttggacacctgggattttattgtatgtagatgttttatccgttccctttttaaaatccaatgttctatctgtaatgctctgccactacacattctttcaaaaaaattctgattctaaatctttaatgatgatatgcctcaatcttcttttaacatagatagctcttctggaaaaaaaaaaaaaaaaaaaactcgag

SEQ ID NO: 2245 - DNA, 410 bp, Homo sapiens
cggcacgagggcggattagccttcgcggggcaaaatggagctcgaggccatgagcagatataccagcccagtgaacccagctgtcttcccccatctgaccgtggtgcttttggccattggcatgttcttcaccgcctggttcttcgtttacgaggtcacctctaccaagtacactcgtgatatctataaagagctcctcatctccttagtggcctcactcttcatgggctttggagtcctcttcctgctgctctgggttggcatctacgtgtgagcacccaagggtaacaaccagatggcttcactgaaacctgcttttgtaaattacttttttttactgttgctggaagtgtcccacctgctgctcataataaatgcagatgtatagcaaaaaaaaaaaaaaaaaaaaa

SEQ ID NO: 2246 - DNA, 1304 bp, Homo sapiens
aaaaaaaaaaaaaaaaaatctaagatagaggtttggtcaacagtgcttaataataaataagaacctcctgccattctaattttcctgctgcaccccatcccccacacacccctcacgaacattgatataagcagtattaacacagtataaagaatgttcaccttgcatatgtcatttcaggcacatggattcaggagaagcacagttgagtggaagaaatggtagacttgtgaggcttgccccaggccttgtgtacacgcaataagtggtgagccatgggtctctccgtcagcgcctccctccccgccaccacttcaggccaacaatttaaggtgctgagttgtaaggctcctccattgtcagtacagggctcgcctttgtagccctgatcactaccagtacacttttcaagacaactgagtatttttgtatgcctttgccttccctttgtccatgaaacatgaagagttgtttatggttcttgacttctctgagcagagtgtctgcatctcttggagagttacacatttcttcatgagccatttttctcattcttagatgcacctgtttttatcctttgcagaccatcttctgccttcttattttcctgtctgtcaaagacagaaattacaggagatagggagggttttttagcatctctttcaaaagatgtatgtcagaatttcctttgcacaccaagaactggagcttagagccccactattctctaagccaggttctagtgccttacactccagaatgtcagatggtgggtgcagattggaagaaagagaaaagttcatctcggtgtgtgggttcccatccgccccacatagcctctccttcttcggaacaatgggcgtggggtagaaagctctttcagtgaagggtgttctagcagctcagttaacactttactctccagtcaacacttgggacatataaaaatgccattgtaactactgtagagtcctgtgactcatcgtttgtgtttgtcartktgcagttcagcttagcccttccctgttcctgtgtagttacaatctggccctgaagacatccgaggcacttcagtaagtgggatcttttctagagatcctgggtgactttgggtgcacagggtgaccgagcatttctgcccctgtgaatgtggcactaacactgtgcactgtctccaccaagcaaggtttccactgagtttcttctcatgttactgggtttgtaaatgaataaacacattttaactactcttgcacggctgcttgtgaaaaaaaaaaagaataaaaaaaaaaaagtttgtcgac

SEQ ID NO: 2247 - DNA, 1248 bp, Homo sapiens
  SITE (607): n equals a,t,g, or c
ggtttgtcagacactgttttaggtatgaggaaatgacagtgagcaatacaaaggccacattctcatggagtaaaattccagaggtggagacatgtaattaatacttaaatataaaacagtagattttctaaacgcagaaaacggaagagtaacaagaaactaaatcaaggagcattatatagcctagactgcagagactcaatataataaagttggcgattcttcctaattatcaaatttactgcaattccagccaaaatgtttcagtggttttttttgtttgttgtttttgtttttgttttgccctttagcttcacaggtttgttctgaaatttatgaggtataaattcttaagagcagcaagaaaaatttcgaatctatttgtagaaactgcatatgatgatggttcataccagtagagagaaagattggatttgggggtattactagtagtaaggggattcactagtagtaagggaaatgcaaaataaaatcacattgaactagttcaaaatcatcacattggcaaaagcattagagtgccaattactggaaagatgtggagcaataggaacactcatacggtgctataggaagtagttgtgtntagcataatttggcaatgtctagtaaagttgaagatgtgaataatctttgacccagcaattccatgtttaaacctctacataktctctcctcgtgtttcaaggaratacatatgatggtccattgcagaactgtgagaatgagaagttgaaagcaatctaaccattaggttaaatacaagatagaatgcaaactaaaatgaataactagagatatttctgtcaacatgggtaaacctcaaaaatagtattaatgaaattgaactacagactattttatataatacagtataacgtacaatttcaaaacatgcaaattagtgttatgtatttttgtcatggctaaatactatataaaaaggatctaaaagaattaataaaataatcatcagattcagaacagtggtgacctgcagggagaaagacaactgagattggggaaaggatgcaaatgaaaatacctttaattattcatttcttttaaaaataagcaaatactgtatagccaattcttaaaatttgataaagctggctgtgagtatatgagtcagttcttactctctgtatctttctgtataaactatttcataatgcaaaaaaataaagaatatttaaatgaaaaaaaaaaaaaaaaaaaactcga

SEQ ID NO: 2248 - DNA, 914 bp, Homo sapiens
cgcgtccgggcaccagctacctcagggacatggcacgggcacctgctctgtctgggacagatactgcccagcacccacccggccatgaggacctgctctgctcagcacgggcactgccacttggtgtggctcaccagggcaccagcctcgcagaaggcatcttcctcctctctgtgaatcacagacacgcgggaccccagccgccaaaacttttcaaggcagaagtttcaagatgtgtgtttgtctgtatttgcacatgtgtttgtgtgtgtgtgtatgtgtgtgtgcacgcgcgtgcgcgcttgtggcatagccttcctgtttctgtcaagtcttcccttggcctgggtcctcctggtgagtcattggagctatgaaggggaaggggtcgtatcactttgtctctcctacccccactgccccgagtgtcgggcagcgatgtacatatggaggtggggtggacagggtgctgtgccccttcagagggagtgcaaggcttggggtgggcctaatcctgctcctagggctgtgaatgttttcagggtggggggagggagatggagcctcctgtgtgtttggggggaaaggtgggtggggcctcccacttggccccggggttcaatggtattttatacttgccttcttcctgtacagggctgggaaaggctgtgtgaggggagagaagggagagggtgggcctgctgtggacaatggcatactctcttccagccctaggaggagggctcctaacagtgtaacttattgtgtccccgcgtatttatttgttgtaaatatttgagtatttttatattgacaaataaaataaaaaaaaaaaaaaaaaaaaaaaaaaaaaaaaaaaaaaaaaaaaaaaaaaaaaaaaaaaaaaaaaaaaaaaaaaaaaaaaaaaaaaaaaa

SEQ ID NO: 2249 - DNA, 1122 bp, Homo sapiens
  SITE (63): n equals a,t,g, or c
tgaacagagcagtgagctgtgatggggctggggctggggcccaggaaggagcaggcaggagantttgtatgcaccgtgattcaaatattataacaaaaatcatcgatcatgtgttaggcactttacagttcccaaagcactttcccatccatgccctgatgatctttgacacaacactgtgatgtgggttttattatttccagtacagatgaggaagactgaggcctgcatcagtgaagcaacctatccaagactacatagagaaggcagtaaatggcagggttagtctcagaacaggggagggtctgttccccccgcagtgggcagtcctaattctgaacttcacctatctgggggtgatagaggggaacaagaggaagcctgctgaagagaaaacctaaacatctgttttgtctacgtatgacttcctctgcttgtgggagagaaggaaggaaaggaacacattgttgtcagccccacaaccccaacagaattaaaccctggagcaggttgaacagcagaggcttccctcagatcaaggagccaggagcagatgatctatctctgtggccacacagagagatgtcaccttatgcaatttgcatatcatattcaattcccccaactgctctttctaatttattcaactggggaccaggctggtctcatgccaacctaggagatgtaccatagcagtatgagcagaattcctcaggaggaacaattagcaaaaactgcagttgcctctcgataggcctgagcagagagaggaacaatagctctcacgtctctcctcatcagattctaactaagcagatgttctcatgcttttttcttcttcctatgttctgtatactgacacctcttctcagtggcatatgaaatatgaaatgtcatgtgttgtgagtttgtataaatataaaggaatatatatacacagtagcaaaagagaagatctcatttacaaatatctatggtgtttccttgttctgtgttgatctgttttattgatacaaactgaattttcttaatgtatcttctatctctattatagtggcaatgatggtatatgcattaaagttcttctgaattgtgaaaaaaaaaaaaaaaaagggcggccgc

SEQ ID NO: 2250 - DNA, 1041 bp, Homo sapiens
ggcacgagcgactccagactctcttacaattggcaataagacaagttaaattacatgagtgtctcaatccctttctgtaaacagggaagaaacagtaccaatatcatgaagtttcaagtatcaaatggagcatgcaatgtgtttatcacagtatctggtatacagcaatggtaattcctttcctcttttccttccaaattattgctccctgatcccatccttccaatgtggctcaattatcgggttctagtcattaaatgctactcttctacaataagccacataccaggtctgagaaagagtctggatcagacaagagttcagcactgtagtagaaaacagattctgggtatcagaggatctggtctcaagtcctgactgtattacctatagctctatgaatttaaccttgctgagccttaactgcctcatctctaaaatagacttaatacttattcctatctaatgggattgttatgagggttaattaagctaatagacttgaaatcatttagtgaactgtaatgtaacaataacaatcaccatcattagcttcctcctgggtcatttacagactccctatctggaagacttgacctgccagagatcaccaagtctcaatacttaggtgcaaaggggaacggctcaaagctaaaaagaaataaactagagacaaataaaattaaagcctacttaatgaactacccaggaccttttaacgttgaagagatggtacaggctaaagatataaacaaccttaactgagttgggctacattttcagatgaaagattcatgacagtagcgacagcgtttcaccatgttagcctgaccaacatggcaaaaccctgtctctgctaaaaatacaaaaattagccaggcgtggtggtgcacacctgtaatcccagctacttgggaggctgagacaggagaattgcttgaacccaagaggcagaggtcgcagcagtgagccgagatcacgccactgtattcagcctgggtgataagctgagactctgtctcaaaaaaaaaaaaaaaaaaa

SEQ ID NO: 2251 - DNA, 900 bp, Homo sapiens
aatctctaggaaggttattcttgagataaccaatgtatatactttggtgtgcagaagtgcttatatgtgctttccattgtatcatacagagtactaaaaagatgtgcactcaaggatcaagactaaataaaattaataactgtgactgcttcttcaaggacgttcttcagtgaattttaagaaaaactggctttttaaactgttgagtacatagtgatgaacaatgactgctaatacagctggtgccatggctttgattcatgcccagtctggggaactggaagctatcaaagccattctgacacctcgttggaatctatcacttgagggaggaacagtagccataagctcagtgaaaaggagtttgtgaataattcccctgaaaagtttctctctcaatttgagcagtcatagatgcgttgcttctttttgaacctgtgtcttattctaattgagttataaagaaacaacaatgaactgtggaactgaacagtccactctgtgacaagttcctctgtacaggttggtcattgtgtgacttttctaacttccattatggtccaaaaagggggttacaaaggtatgatggctgttgtcagatctacacagacaggccagargcatgtwattccctctctaggaacaaacatcagtcaccctcaggggttagggaacccagctgtcagctttggtaggaaaacgcaaccttctccagaacaaggaaaataagamcacccaccacgtcacattcttgaggtgtttgtgctgatccttctctttaatcttaacattgtggaatcwccacggctktgctaaacctagccccaarcccacwcyaccttactaccagacaaccttaaccaaaccatttacccactatttaaaaaaaaaaaaaaaaaa

SEQ ID NO: 2252 - DNA, 1536 bp, Homo sapiens
ttggatacttgctgctctactgctagactctcctcctctacaggagtcaggaatgaattcctggccattgcattaatccctttagacccaagcatgaattagctgacctgtggttatttccccttgccctggctgccaggctgctggcaaagtgaccatttgcccacttacatcctcattatgggaggtagagccctcccgatgcctgtgctgattccctccgtgtaagaaggatgcgtagttgttggtagtcccacgaggcaaatagctacactcctttgcctggctctctggattctgcctcttttgtttttaccctctctgtgcttatggctctacccttctccaccttccatttcgctcagtttggtttccttactctctctagaccatgtctttttcatttccatgtacttaccattagtcatgtgtgcctcttacctaaaagtgtgtccgtctttcatttccttcgtaaatttaggcaactatatgagtattcctgggttgttttggattgagtgagccttaagatatgacagctctagcacacagtaggtactcagaaaatgttagcctctgtgctggactgatttcatattttaccccaagtggttcatgtaactagggggagttttgcttcacactattaaatccactttaaagaattagtattcatgaagcacttagaactgtgcttggcacatagtaagcactatgtgtttgtaaaataaaacttctaccttatttgactttttaaaaattgtaatttatttttatgagaataatgcagctctggttttgttacctatctcaaaaacttacttataaatgggtacagtaataatttataaaaaagaaaatgactttacatgttgttcatatgtgtactttccaataaagtcttggaatatggtgacaatttagaaatatgtggggttctttttttaaaggttgtactgatgaactctcattaaaaggaactgctatattttgttgtttattgtagaatggaagctacaaaagtattcatgcaatggccaaagatatagatctcctcgcaaaaaatgccaaaacttataatgagcctggctctcaagtattcaaggttagttttgttgttgttgttgttgttgttttccttggtaatagtagataatttaaggtcagtaatttttataaaacaactttattgagatataattcacataccatggactttacccattaaaagtgtttaatttaggctgggcgcagtgctcacgcctgtaatcccggcactttgtgaggcctgggtgggtggatcgcgaggtcgggcgttccagaccggsctggccaacatggtgaggccccgtctttgctaaaagtgcaggaattggctgggcgtggtggcgggcgcctgtggtcccagccgatcgggaggctgaggtaggagagtcggttgagtccgggaggcggaggttgcagtgagctgagattgcactccagcccgggcgacagtgcaagactctgtctcaaaaaaaaaaaaaaaaaactcga

SEQ ID NO: 2253 - DNA, 1388 bp, Homo sapiens
ggcacgagattgttactaatctttgtgactatttaatcttcaaatattgtgcttaaccccagcaatccgcacgtatcctgcaccccaccccaaaagagtcatctgtattttaatgccactggtcttatcggtccttttgtctgttgagaccagtcatgacagcattcaagattatgaaagtgttacaatgccgcttcaagtctgcaaaacctcaaacgtagccaacttgacaaatatttaagtgttacggcagatttaaaatccatctgggcacaccgtggtaggtatttgtacagttcttttaattacacatagctttaaaccatcaacctgatgagtttaaagcttttgcacccatgccttcacttcagaatgaacaccttcattgtgatcttatgttaacctgagaattgatttaaaggaagattgataatcctatactttataacgtaaaaatacaggggctacaggagggtacctaattagacagttctccaaacacagaacacacactggaaaattttccggccaattttgctacctcccaacttgatggattagaggtagcgcaaatgctggtgctcccatctaccttgtagacacttagccatcaagaatcaaggcacaagaagtgcactctctcattaacagtaaatgtttgcaagatattcagtttaactttcagcatcatgaatgttcttatccagattttgaatccgaaaaactataatccttttatgttatacaaaattactatgattttttacagttctgagcatattaaaattctactggatttcaaaaagagactaatacccaactgactaactaaacaaatatcaacttgttatactcaatgaatttttttggcatttacatttgaccgttggctttagtgaatgtccatatttaattttttaaggcaccattacacagtttatcctacatttatcacatttcttaaagtgttaagattctatggctcatttctatgtatttttcttactttacaaaataacctgaaacagtatagattttgtaacacttaatttgagcagcttttttattacattgaattatataaagtgcatgttaccttagaaaaattaatatttgctgctttactcttttgcaaaacatttgctgtaatgaatggatttgtatttccaatatgtatcttgactgcattttgtaatatttactgctttattcctaattctgctttaaagtactgaactgggcatgaaacattaaaatattaatgccagaaactgtataaactggatgttgcttaaaatctgtatcactgccatgttgaaaactcagactgcttttgtgatgtttcaaatgaataaaactatcctcccctcgttaaaaaaaaaaaaaaa

SEQ ID NO: 2254 - DNA, 1769 bp, Homo sapiens
gaaaaattaaagcacatgggtaatagcatgggcagagcagagactgagacgatctatgtccatgccaaaggaagcatcctagtaagtttctggctatggcaagatgacaaaactcggtgtacgttttatctggatcacttttggagcactaaagcagataaccaactttgtgctaacatacatgtgctcaggagagcctgattttaagactgacttcaccccattgctcttgtgttccagaaccttcaaggaacatcacctaccagatccaagctttgccagcttagctttcctcatgatcagctcctatctatctatcaatcaatcagctgtcagttccacccatgtgcccaagtgctcttcacaccttcacacctgcaatgstttcctgtgcagcctaccttggagktcccactcaatgctccacttccyttccagctcctttgaagactcagtcacacatgaatttggcatttamctttagtaatatmcycacaagtgtgttactagtgcctacctcaccttcaccagcctggagaaaaggctattttcagggtaccactgttgtgcagctgagccaagtcttcctgctctcaatcaatcaccctgctgctcttggctgccctgcatcacagccctctggatgatatgctcattgagggaggggccaactatatacaaaaaaaatacacgtttgctgaaattactcctagatttctagatgagtatgtaaatttttctgctcccaaagctctggcatctagtttgagtcaatctgagctctataacaggtgaagacatcatattagtttgcagactagactatcaataggagaaataggacgaaagcagcactttaaaaatggatattaaactaccacgatcttgagcaaacatctttatttaagaaatcaaatagggtaaaaattatgcaatttcacacaaggatacaagacaaagcttagaattacttgctcaaaagttactcagaatggaacaaaattgttcaagtgctcccaattagcacaggctgtattacttgcttttcaatggacatttactattttacattaagatctacttataggaacaaagagacaattcccagccccctctggtgtatcacctaaaagactgaatacaaatgttaatgtaatccaagcttttctttgacaacaatactaaaaattgccttacaattttttacaagtacgagtatcaacagtttactgtctgagggaaaggaaatataagaatataaagtgacagaagcaacacacttcactgtggcctgcaactgctcccagcstcctattttataaacatgatttgggttctcacattatagcaggatcactattcctagcctctggtggaagcagacatgtgacacttagcactgcacaagtgtttctttggcttcttgagtagtgctgtgtatactgcctatacatttttataacatctctaaatgcataatgtcaacgtatgtgctatcacatttcactcccaactgcagaatattttaattttaaatttatctaccaaatcttgactatgacatttatttttgggttgttacattaagatcaacctatctgggccgggcacggtggctcacacctgtaatcccagcactttgggaggctgaggcaggagaattgcttgaagtcaggaggcagaggttacggtgaaacaactgccattgcactccagcctggacaacagagcgaaactccatctcaaaaaaaaaaaaaaaaaaactcgag

SEQ ID NO: 2255 - DNA, 1502 bp, Homo sapiens
  SITE (806): n equals a,t,g, or c
  SITE (860): n equals a,t,g, or c
ggtttattttaaatttttaagtggtgtagccttttaacaaactatgtgtttccataaacttctgaaaaatttaaccttgtatggaaggcaaggcaggaatttttaaaaataaactttattttttggagttgtggatttgcaggaaaattgagaagatggcaaagaaagttcctgtatacctgatgcccagtttcccgtgttgctaatatcgtaggttggtatgggatctttgtttcgattagtgaaccaatattgatacattaaataaaagttcatatagtaagtcctcatttaagtcacagatagttcttagaaacccagagtttaagtgaaagaacgtctaaacatgccaaatttactatagactgattgataggaacaagagttaagttcctatggcaaatttctggttacagaaatatcacccagcttctaaataaagaacaaaacacttctaatattaaccactgaaataaataggagctatacatacatttcagaaagattaataaaaatcaataagataattactcagttattccagttcagggcggtggccagagcccatcctggcatcttggagcgcagggcaggaacagccctggacaggatgccctcccattgcaggtgacacacacgcacactcaatctgggaccatgcagacatgccagcttccctaatgggcacagctttggagtgtgggagctcgctggactacctggagaaacccatgcaaatacgtgggagaacatgcaaactccacacagacagtggcttgggctggggatctatttttttttttttncattctcgtcaatgctgtaatcaaatgatgctgaacaaaatgatgttatctganaacctactgtactttattcagatctcctcagttttcatctgcagtcccttttgagttccaggatcctgtctagcataccacattaggttttgtgatcacatctgactcctcttggctgtgacaattgtcaactttccttgtgtcgatgaccttggcagtttgaggtgtgctcgtcgggtattttgtaaagtgtctctcagtcgagattcgtctgatgccctctcatgttaagtctagggtgatgagtttgggaggagaccacataggtaaagtgccgttctcattacatcacatcaaggtacatactgtcaaaatgacttatcatctccatactgacattgattacctggctgaaataggggttgtcagctttctccactgtaaagttgttcttttccgtaataaaggattatggtctttattactgttctcttggaaggaagccactgtgtggaccccacacttcagaagtaaggaattatactccacctccttgggtgtgaagtatacacataaattatttggaattattctgcttaggagatttgtctcatcccccttaccacgctactcctacctatctccccttttatactaataatcttataaaaaaaaaaaaaaaaaaaaaaaaaaaaaaaaaaa

SEQ ID NO: 2256 - DNA, 2199 bp, Homo sapiens
  SITE (2143): n equals a,t,g, or c
  SITE (2154): n equals a,t,g, or c
  SITE (2159): n equals a,t,g, or c
gcttactgtatggacaggttatatggaatggagtttgtagtatccacattaacaaagcaagtttatatggactggtatgatattagggatatgaattagaaatggatgttgttgcactcatttaaaatattttgcctctcactttatccccagttatagtgtccttttgaatttttctcacacagtgctactatatttcatgaactggtatataaacaaaccaaaattatttcttcaaatcaagaacttatctacgaagggcgacgcttagtcttagaacctggaaggctggcacaacatttccctaaaactactgaggaaaaccctatatttgtagtaagccgggaacctctgaataccataggattaatatatgaaaaawtttccctccctaaagtacatccacgttatgatttagacggggatgctagcatggctaaggcaataacaggggttgtgtgttatgcctgcagaattgccagtaccttactgctttatcaggaattaatgcgaaaggggatacgatggctgattgaattaattaaagatgattacaatgaaactgttcacaaaaagacagaagttgtgatcacattggatttctgtatcagaaacattgaaaaaactgtgaaagtatatgaaaagttgatgaagatcaacctggaagcggcagagttaggtgaaatttcagacatacacaccaaattgttgagactttccagktctcagggaacaatagaaaccagtcttcaggatatcgacagcagattatctccaggtggatcactggcagacgcatgggcacatcaagaaggcactcatccgaaagacagaaatgtagaaaaactacaagtcctgttaaattgcatgacagagatttactatcagttcaaaaaagacaaagcagaacgtagattagcttataatgaagaacaaatccacaaatttgataagcaaaaactgtattaccatgccacaaaagctatgacgcactttacagatgaatgtgttaaaaagtatgaggcatttttgaataagtcagaagaatggataagaaagatgcttcatcttaggaaacagttattatcgctgactaatcagtgttttgatattgaagaagaagtatcaaaatatcaagaatatactaatgagttacaagaaactctgcctcagaaaatgtttacagcttccagtgggaatcaaacataccatggaccccaatttatccaagttctaacacattagtagraatgactcttggtatgaagaaattaaaggaagagatggaaggggtggttaaagaacttgctgaaaataaccacattttagaaaggtttggctctttaaccatggatggtggccttcgcaacgttgactgtctttagctttctaatagaagtttaagaaaagtttccgtttgcacaagaaaataacgcttgggcattaaatgaatgcctttatagatagtcacttgtttctacaattcagtatttgatgtggtcgtgtaaatatgtacaatattgtaaatacataaaaaatatacaaatttttggctgctgtgaagatgtaattttatcttttaacatttataattatatgaggaaatttgacctcagtgatcacgagaagaaagccatgaccgaccaatatgttgacatactgatcctctactctgagtggggctaaataagttattttctctgaccgcctactggaaatatttttaagtggaaccaaaataggcatccttacaaatcaggaagactgacttgacacgtttgtaaatggtagaacggtggctactgtgagtggggagcagaaccgcaccactgttatactgggataacaatttttttgagaaggataaagtggcattattttattttacaaggtgcccagatcccagttatccttgtatccatgtaatttcagatgaattattaagcaaacattttaaagtgaattcattattaaaaactattcatttttttcctttggccataaatgtgtaattgtcattaaaattctaaggtcatttcaactgttttaagctgtatatttctttaattctgcttactatttcatggaaaaaaataaatttctcaattttaatgtaaaaaaaaaaaaaaccgaggggggccgnaccatcgccanaggancgatacatccggcgcgttacacgcggactggaacctgcta

SEQ ID NO: 2257 - DNA, 1385 bp, Homo sapiens
ggcacgagttatggtttaactcagcagaatttgttgaacaactacgacatgctggggatcatggcatggaatgcaacttgcaaaaactggctggcagcagaggctgccctggaaaagtactacctttccattttttatgggattgagttcgttgtgggagtccttggaaataccattgttgtttacggctacatcttctctctgaagaactggaacagcagtaatatttatctctttaacctctctgtctctgacttagcttttctgtgcaccctccccatgctgataaggagttatgccaatggaaactggatatatggagacgtgctctgcataagcaaccgatatgtgcttcatgccaacctctataccagcattctctttctcacttttatcagcatagatcgatacttgataattaagtatcctttccgagaacaccttctgcaaaagaaagagtttgctattttaatctccttggccatttgggttttagtaaccttagagttactacccatacttccccttataaatcctgttataactgacaatggcaccacctgtaatgattttgcaagttctggagaccccaactacaacctcatttacagcatgtgtctaacactgttggggttccttattcctctttttgtgatgtgtttcttttattacaagattgctctcttcctaaagcagaggaataggcaggttgctactgctctgccccttgaaaagcctctcaacttggtcatcatggcagtggtaatcttctctgtgctttttacaccctatcacgtcatgcggaatgtgaggatcgcttcacgcctggggagttggaagcagtatcagtgcactcaggtcgtcatcaactccttttacattgtgacacgcctttggcctttctgaacagtgtcatcaaccctgtcttctattttcttttgggagatcacttcagggacatgctgatgaatcaactgagacacaacttcaaatcccttacatcctttagcagatgggctcatgaactcctactttcattcagagaaaagtgaggggcttgtgaaacagattgttctacagatgaatctgtaagccagttacagtttgccttaactcatagacatcaatcagagagtgtcacagatttaaccttgatctaaagacaagttgtacccagagtatgtgaaaagaatgggacgacaagaatgtactggtttcttcctctaagaattgaaaggagttgaactgccttatgtttgggcatgtaactccaaaatactaggtagtataaggctttctcaatcagtgcaaaaatggaagatatataaagcaacaagttgtctgcatttgatcactggtcagattgtaaaaaaaaaaaaaaaaaa

SEQ ID NO: 2258 - DNA, 3787 bp, Homo sapiens
aattcccgggtcgacccacgcgtccggcattacctggtagtaataaaaataaataggtctaagccagaggccacaggttggaaatcttctgatattgcagcatgacatttctgacctggaaagatctatagaatgcaggcttcaccttgttaatttattgatgcacagacagaggcatgaaggggaggtgctttgtcagggccaacatcaatggccacaccagggctggaacccaggctcaccgactcccaggccactgtgcttggctctgccctctccctgaaccagccttagcacctcaaggcgggagttgatggtcctcattcccttccctctgtgtctccttacagcctagcagaactggagaaggaggtgggcaacctcaggaggggcctgagagcggtggaggtggagctggagtatcagaggcgccaggtacgggagcccagtgacaagtttgtccctgtcatgagcgacttcatcacggtgtccagcttcagcttctccgagctggaggaccagctaaatgaggccagggacaagttcgccaaggccttgatgcacttcggggagcatgacagcaagatgcagccagacgaattctttggcatctttgataccttcttgcaggccttctcagaggcccggcaggatctagaggccatgaggaggaggaaggaggaggaggagcggcgggcgcgcatggaagccatgctgaaggagcagagggaacgtgacaaggccggcaattaaccctcactaaagggaacaaaagctggagcccaccgcggtggcggccgctagaactagtggatcccccgggctccagggattcggcacgagggacttatgcaagctcaagcgcaccgcaagcgatcagggagccaggccctggaagttacccgggagcgggcaataaaccggctaaattattgacctggggaactagccacacaggaggccgggagacagggactggtgagaatggggctgagtggaggaggtggtgatatttaaaccatttggtgcttggtttagagccttgggctgggtcctgggatggggggctgtgtgaggctggaccaggtgtctccccacgcttaccttaaggggctcctcttatctccccttcacacgattccttctgtgccctggccccaggtattattctgaggctgccttggatggcctcaggccaggtaaccccaggctgaaggggccctgctccccatcccctaccatgggcacccatgtgctggcacagaacagttcgagatctagactggagaggtccacagccttgtccagagttcctgtgtagcacggggagcagtgatggagggagcccctgagagggaatctggtgagggaatccagactcccttctctcaaggggaggctcaacagaacattgacctgggggcaaactttcctcttgaatgggaaacagaggaggcattatatattctagttagatcagctctggtaggttccagagaacagtcaatgttggaaggatgatgcagggaccaaagccatcaggacagagtagcagtgtctgtttcccatgtcacaagtcctctggcctctccctgcatgtcttaagtatctttcccttccttctctaccctcacctccatcctgtctactaatccacagtcctagaagactcaccttgggtttccacagctatggctcactaccaggtgcttgatgaatctggcgaggggctcaagacagacctcatgcatcaccacacctcatgccttttgggcatctcccatgtccccatcttcctggacacctgccattgttgtgaagccagacagtgacctcaaatggtgccttggagtcccctacagcccctcagcagacggcagcacttgaatgcttagctccatcccatagttctctacttcatataaattgctcaagcccttccaccccttctctaacactagcttcaaggcagaagccacagcagcctctgtccagcctgcaggtggccacttggaaccatgtgtccactggcgttggggagttggttcctgagaggtctgagggccagagctgccctctacattaacatgctgtctctaagggtggcccctcctctcaggcgttcagatggtgcgaacagcagagcaggcaagggaaactggggagatggggatggaggaggaaggctgatatcctctggggagcacatcacctgaaggtgccaaggaggaaggctgagaggggggccaccccatttctggtacccaatttggttcttcagcccaacttgcaaggggttccttctggtcctcccatccactgccaccttccattttgtccatctcatgctggccttggtggatgggatggctgtatctagacaaaatttttctaaaactccatcaaggctcttattcaataccacgttccgagttggcctttcatcttctttgagactggccctgcctaacctctaccatcaatgagctcttgggccctttggcccttccctgtgtttctcactttccaacctaatccctggctcagggttattgccagtggagaactggtgagctggggcctactctcagctgcctatcttctgcctttcacttgcatccaactcctggggctgggaccgtagtagctgcgggggggaagaaacacagggtcggtgagcccagcatgtgcgttggtttgagggggcgggcggtgtgtgtgtgttctggtgggagggatctgagcaagtgcaagcctggctgacacaggtgtgaagaggccatcctggaacccaggtgagggcaagatgaaggcttccaggcagaacagctgcagagagtttggctatatgcatctgcagccccaagagctcccactgcaagacaagtgttggggaagatgggaggttgtgggtgaggcctctaaaggtcctctcccaaactgaccaggctgatgtcaacctaaccccctcagggccagggaacaggggagggctccacaagcgtgtctggcattcccacccaccatgggaagactggatacgcacctggaaacaaaaggactatggaagctgttcaagatacatttgatcttcagaaaagcagaatttggttcaactgttgacagaggacacaaatacgttgttccagagctcaaccttctcactctaaaagaaagatatttttctatttattttctacatctggccagtggctctggtgctagatgccactgtagccagatctccaacagtgccttggaccatggactcatactcaactgagtaagaaggggctggtgcccagtcggggtggctgagctggtccttaataggttgtttcttggtcttgctttcttcatgccctccccactgctcctgccacctttagataagtttctctagctaattttgtggccaatgtaaaattcgtcatcaacctaacaaacacaaccttctcagcagcatttctcccctgtgatggaaataaagtgtttagggcagtgggaggagaaaattctccaggtgaatggggaagggtctgttccagcctctccctactcccatcccatttccaccaactggggaactgtgactatctatctcccccgacttctaccagggatgccttcacgccaaggctgttctcaccagctgcctcagatgacaaatgaggctaatggacataatctacagtgtcctttttcacttgcaccttttttataagaatatattgtaatactaaaaaatattaaattcataccatccctaaaaaaaaaaaaaaaaaaa

SEQ ID NO: 2259 - DNA, 1705 bp, Homo sapiens
  SITE (170): n equals a,t,g, or c
atggggaccagcgggggccctgagcacttcccatctttggcacaagcccctgttcctagctcaccccagacttgctgatccccccatccctgcacgggccttggtcttggccatttctccaggttccctgagtggggaatggtgctgagaccctcctttgagtgattgtnttggacagtttttgttttcttgctgtctgtttarastartggttctcaaaccctgcttgggccatcccactggggarctgggacaccacctggcactgtggtggcagtgggggtgacactcagacaagggccatcgagggcccctggaccagaaagcgaagagggcgttgggggcaggaggcctgtggggccatgtgtgggggccgtctgggtggcgggagctgttggggcggggctgagcgccctcagcagcccactggagaaagcgctgctggggtcctcgtgtggggcccagggcccgacgtggaagcaatggagggctgcagggggtggcagtggggatgaatgagtaaggacagagtgcagcctgggtctcagacggggggtgggggacaggccacagagattccctatctcagcagagaggagacaggctcaggctgccacgccttgccaaaacccagcctggccaggccagcccggcaccttccacctagataagttgtgctgctccagagaaagagcctggggtcagagtggacctgcgatgcatggcacaacctgctggacagtggcgatgaggggttcagggacctgggcacccagaagcgggcacctgatattgtacccagcaaaactgctcctaataatgtcattttttctctctcttacaggcctcaggcccaggcccaaggccaagtgagagagcccaggccacaggacatgctgccattctgccaagagaggctcttctgggggccaggctgggactgggccccggaaaccaaaactccgtgccttacccagccggggccctcctggagccttcttggggtgttgtggctgggaacccgacaggcaccagtgccctgccaggcctggtgccctcctggaccgcctgcacgtgccagcctcccacctgcttcctaaaggcaaccctggcccacacccgcatgcgcccggtgcagcctgccaagggccagtcggggggtgctgcgtcctgccagtgtccaccacagctctgcctgcccttcagcccagcaaggtttaatcaaaatgcaatgctttgcaagtytttactgcttggaggtggctgagttgggggccctgggcaggggtaagctggcaggcagtgccatggcaggccagggtcccctcccatggggtctggcccccgttccagcatgtccagcccctgaagttggagtkgggggcggtctgcctttgctgccactgccaggcctctgccctgcagctgaaacttggccatcacatcaacagaaaacccctcccagtgccagctgcccagcgtgggcaggccctggggacaatacaggtccacctgaggggctgcagggtgacacccagcagccgctgccccctcactgcccacccagcgagggcagcctacccgagcctgccccctgccaggtgtgtgccctgaggctggcggctggatgcgtggccaataaaaagcagacctagaaaaaaaaaaaaaaaaaaaaagggcggccgctcgcgatctagaactagtc

SEQ ID NO: 2260 - DNA, 1067 bp, Homo sapiens
ccacgcgtccggtctactccaccgtcatcgacgtggagtagaggtcccgcagttgatgattttggtcttcttgtcccggttctcgtggaggaccgcgtttgcgcagatgaagaggaagatgccgatgcccatgatgaggggcccgaagaccttgagcttgtcagagtgcaggtagccagagaagatgcggaagaagaagcccacggacgtggaggaggaggacggggaggcggctcgtgctggaggcgtgctcctgggcgcgcccgcggaactggagttgacaccccctggagccctagggtggctcctggaccggtttttgctgccactgctactgctgttggccgtggttgggacccggtggctgctgcccgcagcggcagctgcttacccccctcccgattggtcccggtggccttgggccagtagcccaccaccgccatggctatgcccaccagcagcaccaggatcccacagagggcgatgagccctgagatggagcacagcttcagcttgcctttcaacaacaccacgtcgttcttgcgcctcttcttggctttccgcttgcgcttgggtatctggcttggggggcggagtggatcctgctttctggcggaaatccttagcaggccgcggtggcgatcatggcgagctcctggagtgcaggactagcctctgggatggaggcttgcacagggagggcgccaactgcccactagctgctcagccacctcctcctgccagggagaccgagggaggtcggggccggcgaacgggcgctcgggcgacacaaaggaaccatggagaaactttttcagcccgagccgacggcggagcgcagggacagcgccccggggccccgcatccgagcgcggctcagcagccccgcgggggcgagcgccgccccaggctcgcagtccccgccggcgctgtggcgggagccatttccaagagtttccaagaagtgtcaggtcctccgcatcccgcatcccgcctcggagccctcctctccgccgctcatctccggctcccggcgtcccctagcgcggcgctcccgggcgggccct

SEQ ID NO: 2261 - DNA, 2270 bp, Homo sapiens
aattcggcccgagtgcgcctgcacgcgtagaccgacccccccccagcgcgcccacccggtagaggacccccgcccgtgccccgaccggtccccgcctttttgtaaaacttaaagcgggcgcagcattaacgcttcccgccccggtgacctctcaggggtctccccgccaaaggtgctccgccgctaaggaacatggcgaaggtggagcaggtcctgagcctcgagccgcagcacgagctcaaattccgaggtcccttcaccgatgttgtcaccaccaacctaaagcttggcaacccgacagaccgaaatgtgtgttttaaggtgaagactacagcaccacgtaggtactgtgtgaggcccaacagcggaatcatcgatgcaggggcctcaattaatgtatctgtgatgttacagcctttcgattatgatcccaatgagaaaagtaaacacaagtttatggttcagtctatgtttgctccaactgacacttcagatatggaagcagtatggaaggaggcaaaaccggaagaccttatggattcaaaacttagatgtgtgtttgaattgccagcagagaatgataaaccacatgatgtagaaataaataaaattatatccacaactgcatcaaagacagaaacaccaatagtgtctaagtctctgagttcttctttggatgacaccgaagttaagaaggttatggaagaatgtaagaggctgcaaggtgaagttcagaggctacgggaggagaacaagcagttcaaggaagaagatggactgcggatgaggaagacagtgcagagcaacagccccatttcagcattagccccaactgggaaggaagaaggccttagcacccggctcttggctctggtggttttgttctttatcgttggtgtaattattgggaagattgccttgtagaggtagcatgcacaggatggtaaattggattggtggatccaccatatcatgggatttaaatttatcataaccatgtgtaaaaagaaattaatgtatgatgacatctcacaggtcttgcctttaaattacccctccctgcacacacatacacagatacacacacacaaatataatgtaacgatcttttagaaagttaaaaatgtatagtaactgattgagggggaaaagaatgatctttattaatgacaagggaaaccatgagtaatgccacaatggcatattgtaaatgtcattttaaacattggtaggccttggtacatgatgctggattacctctcttaaaatgacacccttcctcgcctgttggtgctggcccttggggagctggagcccagcatgctggggagtgcggtcagctccacacagtagtccccacgtggcccactcccggcccaggctgctttccgtgtcttcagttctgtccaagccatcagctccttgggactgatgaacagagtcagaagcccaaaggaattgcactgtggcagcatcagacgtactcgtcataagtgagaggcgtgtgttgactgattgacccagcgctttggaaataaatggcagtgctttgttcacttaaagggaccaagctaaatttgtattggttcatgtagtgaagtcaaactgttattcagagatgtttaatgcatatttaacttatttaatgtatttcatctcatgttttcttattgtcacaagagtacagttaatgctgcgtgctgctgaactctgttgggtgaactggtattgctgctggagggctgtgggctcctctgtctctggagagtctggtcatgtggaggtggggtttattgggatgctggagaagagctgccaggaagtgttttttctgggtcagtaaataacaactgtcatagggagggaaattctcagtagtgacagtcaactctaggttaccttttttaatgaagagtagtcagtcttctagattgttcttataccacctctcaaccattactcacacttccagcgcccaggtccaagtctgagcctgacctccccttggggacctagcctggagtcaggacaaatggatcgggctgcagagggttagaagcgagggcaccagcagttgtgggtggggagcaagggaagagagaaactcttcagcgaatccttctagtactagttgagagtttgactgtgaattaattttatgccataaaagaccaacccagttctgtttgactatgtagcatcttgaaaagaaaaattataataaagccccaaaattaagaaaaaaaaaaaaaaaaaaaactcgggggggg

SEQ ID NO: 2262 - DNA, 778 bp, Homo sapiens
ccacgcgtccgcccacgcgtccgtctagatcgcgagcggcagcccataaaaataaaaaattataacaaaccctgagaaccaaaatgaacgaaaatctgttcgcttcattcattgcccccacaatcctaggcctacccgccgcagtactgatcattctatttccccctctattgatccccacctccaaatatctcatcaacaaccgactaatcaccacccaacaatgactaatcaaactaacctcaaaacaaatgataaccatacacaacactaaaggacgaacctgatctcttatactagtatccttaatcatttttattgccacaactaacctcctcggactcctgcctcactcatttacaccaaccacccaactatctataaacctagccatggccatccccttatgagcgggcgcagtgattataggctttcgctctaagattaaaaatgccctagcccacttcttaccacaaggcacacctacaccccttatccccatactagttattatcgaaaccatcagcctactcattcaaccaatagccctggccgtacgcctaaccgctaacattactgcaggccacctactcatgcacctaattggaagcgccaccctagcaatatcaaccattaaccttccctctacacttatcatcttcacaattctaattctactgactatcctagaaatcgctgtcgccttaatccaagcctacgttttcacacttctagtaagcctctacctgcacgacaacacataaaaaaaaaaaaaaaa

SEQ ID NO: 2263 - DNA, 3268 bp, Homo sapiens
cccgggtcgacccacgcgtccggtctgcggccagcaacactggcacccccgatgggcctgaggcccccccaggcccagatgcctcccccgatgccagctttgggaagcagtggtcctcatcctcccgttcctcctactcatcccaacatggaggggctgtgtctccccagagcttgtctgagtggcgcatgcagaacattgcccgagactctgagaacagctccgaggaagagttctttgatgcccacgaaggcttctcggacagtgaggaggtcttccccaaggagatgaccaagtggaactccaatgacttcattgatgcctttgcctccccagtggaggcagagggaacgccagagcctggagccgaggcagctaaaggcattgaggatggggcccaagcacccagggactcagagggcctggatggagccggggagctgggggctgaggcatgcgcagtccacgccctcttccttatcctgcacagcggcaacatcctggactcaggccctggagacgccaactccaagcaggcggatgtgcagacgctgagctccgccttcgaggccgtcacccgcatccacttccctgaagccttgggccacgtggcgctgcgactggtgccctgtccacccatctgcgccgccgcctatgcccttgtctccaacctgagcccttacagccacgatggggacagcctgtctcgctcccaagaccacattccactggctgccctgccactgctggccacctcatcctcccgctaccagggcgccgtggccaccgtcattgcccgcaccaaccaggcctactcagccttcctgcgctcacctgagggtgccggcttctgtgggcaggtcgcactgattggagatggtgttggtggcatcctgggctttgatgcactctgccacagtgctaacgcgggcaccgggagtcggggcagcagccgccgtgggagcatgaacaatgagctgctctctccggagtttggcccagtgcgggaccccctggcagatggtgtggaaggcctgggtcggggcagcccagaaccctcggccttgcctccccagcgcatccccagcgacatggccagtcctgagcccgagggctctcagaacagccttcaggcagcccccgcaaccacctcctcctgggagccccggcgggcaagcacggccttctgcccacccgctgccagttccgaggcacctgacggccccagcagcactgcccgccttgacttcaaggtctctggcttcttcctcttcggctccccactgggcctggtgctggctctgcgcaaaactgtgatgcccgcctggagggcctggctacagaaggggaacctgaggcccagaaagaagggactcgccaaggcagcccagatgcgcccagcctgtgaacagatctacaacctcttccacgcggccgacccctgcgcctcacgcctcgagcccctgctggccccgaagttccaggccatcgccccactgaccgtgccccgctaccagaagttccccctgggagatggctcatccctgctgctggccgacactctgcagacgcactccagcctctttctggaggagctggagatgctggtgccctcaacacccacctctactagcggtgccttctggaagggcagtgagttggccactgaccccccggcccagccagccgccccagcaccaccagtgaggtggttaagatcctggagcgctggtgggggaccaagcggatcgactactcgctgtactgccccgaggcgctcaccgctttcccaccgtcacgctgcccacctcttccacgccagctactgggagtccgccgacgtggtggcgttcatcctgcgccaggtgatcgagaaggagcggccacagctggcggaatgcgaggagccgtccatctacagcccggccttccccagggagaagtggcagcgaaaacgcacgcaggtcaagatccggaacgtcacttccaaccaccgggcgagcgacacggtggtgtgcgagggccgcccccaggtgctaagcgggcgcttcatgtacgggcccctggacgtcgtcacgctcactggagagaaggtggatgtctacatcatgacgcagccgctgtcgggcaagtggatccactttggcaccgaagtcaccaatagctcgggccgctcaccttcccagttcccccagaacgcgcgctgggcattggtgtctaccccgtgcgcatggtggtcaggggcgaccacacctatgccgaatgctgcctgactgtggtggcccgcggcacggaggctgtggtcttcagcatcgacggctccttcaccgccagcgtctccatcatgggcagcgaccccaaggtgcgagctggcgccgtggacgtggtcaggccggccggatatgcagaagcaccgcgtggtggcatggctgtcgcagcacaacttcccccacggcgtcgtctccttctgcgacggcctcacccacgacccactacgccagaaggcaatgtttctgcagagcctggtgcaggaggtagaactgaacatcgtggccggttatgggtctcccaaagatgtggctgtatacgcggcgctggggctgtccccgagccagacctacatcgtgggccgtgccgtgcggaagctacaggcgcagtgccagttcctgtcagacggctatgtggcccacctgggccagctggaagcgggctcgcactcgcatgcctcctcgggacccccgagagctgccttgggcaagagcagctatggtgtggctgcccccgtggacttcctgcgcaaacagagccagctgcttcgctcgaggggccccagccaggcggagcgtgagggcccgggaacaccacccaccaccctggcacggggcaaagcacggagcatcagcctgaagctggacagcgaggagtgaggcccacaccagcctggacctgggttatttattgacacacccaaggggcccgaggggctgcgtttgggaggctggggacccagacttttggccccagcgctggcccccccagccccacaccctatatctccgtgtgctcctcggtgttacttccctttcatatgaggggacccagcgccggggggagggaggagggcgtgggcatgggcgcagaggcttttccagtgtgtataaatccatgaaaataaacgccacctgcaccccaaaaaaaaaaaaaaaaaaaaaaaaaaaaaaaaaaaaaaaaaaaaaaaaaaaaaaaaaagggcggccgctctagagga

SEQ ID NO: 2264 - DNA, 3350 bp, Homo sapiens
tctagctgtagtcgggctgcttgtcggcttggctccccctcccccctttgctctctgcctcgtctttccccaggacttcgctattttgcttttttaaaaaaaggcaagaaagaactaaactcccccctccctctcctccagtcgggctgcacctctgccttgcactttgcacagaggtagagagcgcgcgagggagagagaggaaagaaaaaaaataataaagagagccaagcagaagaggaggcgagaatggcatsagaactggcaatgagcaactccgacctgcccaccagtcccctggccatggaatatgttaatgacttcgatctgatgaagtttgaagtgaaaaaggaaccggtggagaccgaccgcatcatcagccagtgcggccgtctcatcgccgggggctcgctgtcctccacccccatgagcacgccgtgcarctcggtgccmmcttcccccagcttckcrsygcccagcccgggctcgggcagcgagcagaaggcgcacctggaagactactactggatgaccggctacccgcagcagctgaaccccgaggcgctgggcttcagccccgaggacgcggtcgaggcgctcatcagcaacagccaccagctccagggcggggggckcmtgcacccgcaccacgccgccgggccttgcacttcgacgaccgcttctccgacgagcagctggtgaccatgtctgtgcgcgactgaaccggcagctgcgcggggtcagcaaggaggaggtgatccggctgaagcagaagaggcggaccctgaaaaaccgcggctatgccmagtcctgccgcttcaagagggtgcagcagagacacgtccttggagtcggagaagaaccagctgctgcagcaagtcgaccacctcaagcaggagaaatacgagaagttggtgagmagcggcttccgagaaaacggctcgagcagcgacaacccgtcctctcccgagtttttcatgtgagtctgacacgcgattccagctagccaccctgataagtgctccgcgggggtccggctcgggtgtgggcttgctagttctagagccatgctcgccaccacctcaccacccccacccccaccgagtttggcccccttggcccctacacacacacaaacccgcacgcacacaccacacacacacacacacacacacacacacacacaccccacaccctgctygagtttgtggtggtggtggctgttttaaactggggrgggaatgggtgtctggctcatggattgccaatctgaaattctccataacttgctagcttgttttttttttttttttacacccccccgccccacccccggacttgcacaatgttcaatgatctcagcagagttcttcatgtgaaacgttgatcacctttgaagcctgcatcattcacatattttttcttcttcttccccttcagttcatgaactggtgttcattttctgtgtgtgtgtgtgttttattttgtttggatttttttttttaattttacttttagagcttgctgtgttgcccaccttttttccaacctccaccctcactccttctcaacccatctcttccgagatgaaagaaaaaaaaaagcaaagtttttttttcttctcctgagttcttcatgtgagattgagcttgcaaaggaaaaaaaaatgtgaaatgttatagacttgcagcgtgccgagttccatcgggttttttttttagcattgttatgctaaaatagagaaaaaaatsctcatgaaccttccacaatcaagcctgcatcaaccttctgggtgtgacttgtgagttttggccttgtgatgccaaatctgagagtttagtctgccattaaaaaaactcattctcatctcatgcattattatgcttgctactttgtcttagcaacaatgaactataactgtttcaaagactttatggaaaagagacattatattaataaaaaaaaaaagcctgcatgctggacatgtatggtataattattttttcctttttttttccttttggcttggaaatggacgttcgaagacttatagcatggcattcatacttttgttttattgcctcatgacttttttgagtttagaacaaaacagtgcaaccgtagagccttcttcccatgaaattttgcatctgctccaaaactgctttgagttactcagaacttcaacctcccaatgcactgaaggcattccttgtcaaagataccagaatgggttacacatttaacctggcaaacattgaagaactcttaatgttttctttttaataagaatgacgccccactttggggactaaaattgtgctattgccgagaagcagtctaaaatttattttttaaaaagagaaactgccccattatttttggtttgttttatttttattttatattttttggcttttggtcattgtcaaatgtggaatgctctgggtttctagtatataatttaattctagtttttataatctgttagcccagttaaaatgtatgctacagataaaggaatgttatagataaatttgaaagagttaggtctgtttagctgtagattttttaaacgattgatgcactaaattgtttactattgtgatgttaaggggggtagagtttgcaaggggactgtttaaaaaaagtagcttatacagcatgtgcttgcaacttaaatataagttgggtatgtgtagtctttgctataccactgactgtattgaaaaccaaagtattaagaggggaaacgcccctgtttatatctgtaggggtattttacattcaaaaatgtatgtttttttttcttttcaaaattaaagtatttgggactgaattgcactaagatataacctgcaagcatataatacaaaaaaaaattgcaaaactgtttagaacgctaataaaatttatgcagttataaaaatggcattactgcacagttttaagatgatgcagatttttttacagttgtattgtggtgcagaactggattttctgtaacttaaaaaaaaatccacagttttaaaggcaataatcagtaaatgttattttcagggactgacatcctgtctttaaaaagaaatgaaaagtaaatcttaccacaataaatataaaaaaatcttgtcagttacttttcttttacatattttgctgtgcaaaattgttttatatcttgagttactaactaaccacgcgtgttgttcctatgtgcttttctttcattttcaattctggttatatcaagaaaagaataatctacaataataaacggcatttttttttgaaaaaaaaaaaaaaaaaaaactcgaggggggcccggtacccaawtcgccctagtgatcgta

SEQ ID NO: 2265 - DNA, 3054 bp, Homo sapiens
  SITE (3040): n equals a,t,g, or c
ggcacgaggtctccagcaccatgtctggtttgtctggcccaccagcccggcgcggcccttttccgttagcgttgcctgcgcagcacctcaagatcacagattctgctggccatattctctactccaaagaggatgcaaccaaggggaaatttgcctttaccactgaagattatgacatgtttgaagtgtgttttgagagcaagggaacagggcggatacctgaccaactcgtgatcctagacatgaagcatggagtggaggcgaaaaattacgaagagattgcaaaagttgagaagctcaaaccattagaggtagagctgcgacgcctagaagacctttcagaatctattgttaatgattttgcctacatgaagaagagagaagaggagatgcgtgataccaacgagtcaacaaacactcgggtcctatacttcagcatcttttcaatgttctgtctcattggactagctacctggcaggtcttctacctgcgacgcttcttcaaggccaagaaattgattgagtaatgaatgaggcatattctcctcccaccttgtacctcagccagcagaacatcgctgggacgtgcctggcctaaggcatcctaccaacagcaccatcaaggcacgttggagctttcttgccagaactgatctcttttggtgtgggaggacatggggtaccacctacacccaacaagtcaatgagggacttctttttaatttggtaggattttgactggttttgcaacaataggtctattattagagtcacctatgacaaaaaataggggttacctagataatgccaaagtcagcatttgtcctgggttcccttgtgtgatctgtttggactatgttttcttttcttctcccacttgctcagcagcttgggcttccattctagttcttttaccaagatttttgtgtgaccatgttgacttcatttggattgccctctttcaatttccttgtgaaaacacccttaactttctctttacccttagctgaaatgtttacatagcttctggtgatatcttttcatgattttatatctcttaaaatggtgatggatgtgacacctcataaaagtgagctttgaactgtagataactcttaaagaaaatgtcattttagacaattaaaatatttgtgctcaactgcttgaacttttttcgtgtatgtgtatttaattctatgcaatattatcacatgtgtagattcatgtgaccaccatcacaagagacagaacagttctgtcacatggatcccttgcactgcccttttacagccgcagccacatccctttcttataccctcaccccaacctgtggstaccactgktctgtccyccatctctgtaattttgtcatttcaagaatgttgtatgaatggaatcatacagaatgtaatcttacraggctgatcttttttcattcagcataattcccttgaaatccatccaagttgttgcatgtatgaatagtttcttcctttttttcttttaaaaatgttttatatatttagggggtataagtacagatttcttacatgcatatattgcatcgtggtgaagtgggggcagttccttttgattgctgagtagtattccatggtatggatgtaccacagtttgcttaaccattcacccactaaaggacataagagttgttttcagttttttgccctaataaagctgctgtgaacattcatgtacaggtttttatgtgaacatacattttcattttctgggataaatgctcaaaagggcaactgttgggttgtatggtaaacacatatatttttgtaagaaactaccctactctttttccagagtggctctactttttacatacagccactcatacaattcagacagcaatgtatgattgatccagtttcttcacatcctcaccagcatttggtattactactattttttatcttaaccattcacatagatgtgtgtaatgataccacatgtggttttaatttgcatttccaatggctaatgatgttgagtatctttttgtgtgctaatttgccatctatgtatcctcttcggtgaaatgtcttcatgtcttttgtctattttctatttaggtcatttgttctttttactattgagttttgagaggttttttatatatcctagataaaattcctctgttagatatgtggttgcttgaatttttaacataacttctaccaaggaaaaataagtaaaatttccaacccttgcatggccagtcacttacttaattcctgtccttcagtgttccatctagagaattaagagatatgatgtataaaatagacatcgagggccattaagagagtaaatacttaaaaatacatgttatgaaagcaaagccaataatcactgtaggagtatgagttgcctaagggccaaaactaatgtaaataagagaaagtgtggatataaatgaccattgtttataaacagtyatgaaaaatgctgtgacttgaaatctttcccacatctcccaagaaagtaggtaggagtttatcctttccgtaatctctttttaaccctgctgactattacagggcttgtttaatcacagtggcaagaattacatgtatcttacagtaaagaaacagaatactggaatcgttagagaaccctgatgtgttgacctggataaagtacaaaggtggaagagggaatgagttatgctgttaaaatctcaggctattctgttaatgttcctgctactatgaacccaaactttttttttcccccttttgactccttgtgtcttcctctcctgtggcataaaagtagttctgtcgttaacttgtacaacattgccatctgctgttgagaattggtaggtactgcttctgagaacctggctgcagatccttagcataggcagcaaatgttgagaaagtctatctgtagtattacatatactaagttacagaggatgcatycaagtagagaaaataatatgtgggttaagatacatccttaaactttttttttttggggggggggggacggagcttgctgnacgcccagctggag

SEQ ID NO: 2266 - DNA, 1029 bp, Homo sapiens
cccgggcagatatcctttataagaattaaacattttatcctttgtaattagaacaattattttatggattttgataaaccagtttttaaattttcaatgaattttgaaacatttgtgtacttgtgtggctacattaagtcaagataaagaacatttctgtcacctcagaaagaccctttttgttcttttgtggccatactccacccatggtcctgggcatccattgacctgctttctgtccctgtagattagttttgcctgttctagaattttatgtatgtaagtggaatgatgtactatgtatgtttgtgtttggcttatttttaccagcaagtttttgaggttcatgttattgtgtgtatcagaagttagtttctatttattgctcagtagtattcatctgtgaattaccatggtctgttaatatatccatctattgatgatgaacatttagattacttttagttttgcctattaaaaataaagttagtatgaatatgcatgtacaagttgtattgtggatatactttgtgataataactagaaccaggagtggttcaaaatttaatttacacatctactccctgtgttatttgcctgctcttagtgtgccaaatgttatttagtacatttgaaaggatgaatctcagtatagactgagtttgtattgtggtccccaatgtttagatcatatatctgtatacctatctctgcgatgattttcatcatcatttcagtaactcagatttaccaagttcttattctgtatcaggtgataattgtaatccctgtatgtcttatgtcacttaaactatacaactgaggtgggttctatccccatgttgcagtgaggaagctaaagtacaaactagctgttaagtggtagagacagaattcttgattggatttctgatcctgcacatataatttaacttgtaattatgatatctcttgatatttatactattatgtaaaagtgcttctgtaaaaaattaaatttgaaatttcaaaaaaaaaaaaaaaaaaaaa

SEQ ID NO: 2267 - DNA, 2319 bp, Homo sapiens
  SITE (121): n equals a,t,g, or c
gcggcaagaagacgccatggggcaagcgtggctggaagatgttccacaccttactgcgagggatggttctctacttcctgaagggagaagaccactgtctggagggggagagcttggtggngcagatggtggatgagcccgtgggggtgcaccactcgctggccacccccgtcacgcattacaccaagaagcccacgtmttccagctgcgcacggctgactggcgcctctacctcttccaggcacccactgccaaggagatgagctcctggatcgcgcgcatcaacttggctgcggccacscactccgcgccgcccttccccgccgctgtgggctcccagcgcagattcgtgcggcccatcctgcccgtgggccccgcccagagctccctggaggagcagcatcgatcccacgagaactgcctggacgctgccgcggacgacctgctggatctacagaggaacctgccggagcggcggggccgtggccgcragctggaggagcaccgcctgcggaaggagtacctggagtacgagaaaacccgctacgagacctacgtgcagtgctggtggcccgcctgcactgcccctctgatgctctggacctgtgggaggagcagctggggarggaagctggaggcactcgggagcccaagctcagcctgaagaagtcccactcgagcccgtccctgcaccaggatgaggctcccaccacggccaaggtgaagcgcaacatctcagagcgcagaacctaccggaagatcatccctaagcggaaccgcaatcagctgtgaaccagcaccacctcagagacactgttccctgctccaggktagacctgagatgaacctccctggaggagacttatttcaatgagtccaccatgacggatgaggcacytcctttccctgctgaargacaaaccttgtttccctgtggccctcattcttgtgctcctgaagctttcctaatattgctgtgctccccaccacccccatggcagtccctccgcagccccagtccctggccacgcccaagggaagagggaggtgaggacttgactttcctcccagagctcagcccatgtcaccctccaggccccagaatccagagtggcctcatttcctagacttgctgagaactcagcacttgtttgagaaccagtgcttatgtggtgtgcccttggcttctgggggagagcttggggcagcagaggcccctgggcagcccagccaggggagccacagccccgaggatggtcttgctctgggaattaggtgaccttcctggggaggccccaggagagtgaatcagggactcttgagaaattcctaaccagcctcctgtgacccagggagcagggtcgctaaggtcctgcccactgaggggacagccttctgggcagggacctcggggggcttcaagggctctgcacggctgtggggccctgtgcctttgtctccttgtgtctcctttcccccgaagtagatgaaacagtctcacatacccaactgctcatcaacagagcagagctgatggcatgagtragggctgggcggggtggggcctccagagctttgcagggaaccctggaaccctaggaacaaggagcctttgttccaacagagcagagcaaggaggttctctatgttcagaccactggagaggatagagaggtaaaaggtggcgacagtttcccttaggggtctgcctggcaggagccacagctcaggagagttgtgagggatgggacggaggctggcgaccaggcgaggcctaggccaggctcgggagacttttctgtgctcctttctacacatgccttaaaccttccttcctgtggggtgcctggaccccttccccatctctggcagctcagagggtctctgctgctctcccctgggaaatcccctcatcctgccctctggctgcctcccagctgggcttgttctctgagggaggttccggagactcatggacttggggctctgcctgtaggaaggaggctgggccggagggaccagccaccattgtctctgttcagccaagtgtgcaagtaggctgcccgccaagagggggcctctgctacccgctgctgcctgccggctgacacactgcctccccagccttcctgctaggccaccctcctcccttcccatgcttgtaaccagctctggggcttgcacctccacaaagtaaggttggcccttggaggccatgtttgggtctccggccagggcctagggctaggccatgcacccaatgggtgcacaataaataacaggtcaacaaaaaaaaaaaaaaaaaaaaaaaaactcgag

SEQ ID NO: 2268 - DNA, 2331 bp, Homo sapiens
  SITE (121): n equals a,t,g, or c
gcggcaagaagacgccatggggcaagcgtggctggaagatgttccacaccttactgcgagggatggttctctacttcctgaagggagaagaccactgtctggagggggagagcttggtggngcagatggtggatgagcccgtgggggtgcaccactcgctggccacccccgtcacgcattacaccaagaagcccacgtmttccagctgcgcacggctgactggcgcctctacctcttccaggcacccactgccaaggagatgagctcctggatcgcgcgcatcaacttggctgcggccacscactccgcgccgcccttccccgccgctgtgggctcccagcgcagattcgtgcggcccatcctgcccgtgggccccgcccagagctccctggaggagcagcatcgatcccacgagaactgcctggacgctgccgcggacgacctgctggatctacagaggaacctgccggagcggcggggccgtggccgcgagctggaggagcaccgcctgcggaaggagtacctggagtacgagaaaacccgctacgagacctacgtgcagctgctggtggcccgcctgcactgcccctctgatgctctggacctgtgggaggagcagctggggagggaagctggaggcactcgggagcccaagctcagcctgaagaagtcccactcgagcccgtccctgcaccaggatgaggctcccaccacggccaaggtgaagcgcaacatctcagagcgcagaacctaccggaagatcatccctaagcggaaccgcaatcagctgtgaagccagcaccacctcagagacactgttccctgctccagggtagacctgagatgaacctccctggaggagacttatttcaatgagtccaccatgacggatgaggcacctcctttccctgctgaaggacaaaccttgkttccctgtggccctcattcttgtgctccctgaagctttcctaatattgctgtgctccccaccacccccatggcagtccctccgcagccccagtccctggccacgcccaagggaagagggaggtgaggacttgactttcctcccagagctcagcccatgtcaccctccaggccccagaatccagagtggcctcatttcctagacttgctgagaactcagcacttgtttgagaaccagtgcttatgtggtgtgcccttggcttctgggggagagcttggggcagcagaggcccctgggcagcccagccaggggagccacagccccgaggatggtcttgctctgggaattaggtgaccttcctggggaggccccaggagagtgaatcagggactcttgagaaattcctaaccagcctcctgtgacccagggagcagggtcgctaaggtcctgcccactgaggggacagccttctgggcagggacctcggggggcttcaagggctctgcacggctgtggggccctgtgcctttgtctccttgtgtctcctttcccccgaagtagatgaaacagtctcacatacccaactgctcatcaacagagcagagctgatggcatgagtragggctgggcggggtggggcctccagagctttgcagggaaccctggaaccctaggaacaaggagcctttgttccaacagagcagagaaggaggttctctatgttcagaccactggagaggatagagaggtaaaaggtggcgacagtttcccttaggggtctgcctggcaggagccacagctcaggagagttgtgagggatgggacggaggctggcgaccaggcgaggcctaggccaggctcgggagacttttctgtgctcctttctacacatgccttaaaccttccttcctgtggggtgcctggaccccttccccatctctggcagctcagagggtctctgctgctctcccctgggaaatcccctcatcctgccctctggctgcctcccagctgggcttgttctctgagggaggttccggagactcatggacttggggctctgcctgtaggaaggaggctgggccggagggaccagccaccattgtctctgttcagccaagtgtgcaagtaggctgcccgccaagagggggcctctgctacccgctgctgcctgccggctgacacactgcctccccagccttcctgctaggccaccctcctcccttcccatgcttgtaaccagctctggggcttgcacctccacaaagtaaggttggcccttggaggccatgtttgggtctccsgccagggcctagggctaggccatgcacccaatgggtgcacaataaataacaggtcaacaaaaaaaaaaaaaaaaaagaaaaaaaaaaaaaaaagtcgac

SEQ ID NO: 2269 - DNA, 2331 bp, Homo sapiens
  SITE (121): n equals a,t,g, or c
gcggcaagaagacgccatggggcaagcgtggctggaagatgttccacaccttactgcgagggatggttctctacttcctgaagggagaagaccactgtctggagggggagagcttggtggngcagatggtggatgagcccgtgggggtgcaccactcgctggccacccccgtcacgcattacaccaagaagcccacgtmttccagctgcgcacggctgactggcgcctctacctcttccmggcasccactgccaaggagatgagctcctggatcgcgcgcatcaacttggctgcggccacccactccgcgccgcccttccccgccgctgtgggctcccagcgcagattcgtgcggcccatcctgcccgtgggccccgcccagagctccctggaggagcagcatcgatcccacgagaactgcctggacgctgccgcggacgacctgctggatctacagaggaacctgccggagcggcggggccgtggccgcgagctggaggagcaccgcctgcggaaggagtacctggagtacgagaaaacccgctacgagacctacgtgcagctgctggtggcccgcctgcactgcccctctgatgctctggacctgtgggaggagcagctggggagggaagctggaggcactcgggagcccaagctcagcctgaagaagtcccactcgagcccgtccctgcaccaggatgaggctcccaccacggccaaggtgaagcgcaacatctcagagcgcagaacctaccggaagatcatccctaagcggaaccgcaatcagctgtgaagccagcaccacctcagagacactgttccctgctccagggtagacctgagatgaacctccctggaggagacttatttcaatgagtccaccatgacggatgaggcacctcctttccctgctgaaggacaaaccttgtttccctgtggccctcattcttgtgctccctgaagctttcctaatattgctgtgctccccaccacccccatggcagtccctccgcagccccagtccctggccacgcccaagggaagagggaggtgaggacttgactttcctcccagagctcagcccatgtcaccctccaggccccagaatccagagtggcctcatttcctagacttgctgagaactcagcacttgtttgagaaccagtgcttatgtggtgtgcccttggcttctgggggagagcttggggcagcagaggcccctgggcagcccagccaggggagccacagccccgaggatggtcttgctctgggaattaggtgaccttcctggggaggccccaggagagtgaatcagggactcttgagaaattcctaaccagcctcctgtgacccagggagcagggtcgctaaggtcctgcccactgaggggacagccttctgggcagggacctcggggggcttcaagggctctgcacggctgtggggccctgtgcctttgtctccttgtgtctcctttcccccgaagtagatgaaacagtctcacatacccaactgctcatcaacagagcagagctgatggcatgagtragggctgggcggggtggggcctccagagctttgcagggaaccctggaaccctaggaacaaggagcctttgttccaacagagcagagaaggaggttctctatgttcagaccactggagaggatagagaggtaaaaggtggcgacagtttcccttaggggtctgcctggcaggagccacagctcaggagagttgtgagggatgggacggaggctggcgaccaggcgaggcctaggccaggctcgggagacttttctgtgctcctttctacacatgccttaaaccttccttcctgtggggtgcctggaccccttccccatctctggcagctcagagggtctctgctgctctcccctgggaaatcccctcatcctgccctctggctgcctcccagctgggcttgttctctgagggaggttccggagactcatggacttggggctctgcctgtaggaaggaggctgggccggagggaccagccaccattgtctctgttcagccaagtgtgcaagtaggctgcccgccaagagggggcctctgctacccgctgctgcctgccggctgacacactgcctccccagccttcctgctaggccaccctcctcccttcccatgcttgtaaccagctctggggcttgcacctccacaaagtaaggttggcccttggaggccatgtttgggtctccggccagggcctagggctaggccatgcacccaatgggtgcacaataaataacaggtcaacaaaaaaaaaaaaaaaaaaraaaaaaaaaaaaaaaagtcgac

SEQ ID NO: 2270 - DNA, 643 bp, Homo sapiens
aattccccggggctctgagggccctccagacctgctcgggtgctggggccatgccgagtcgcggccctgctcagccggaagaggctcccggacctggatgtacagggcagtctctcttcccggggctatgggctgggcctgtcctgccgtcatggccccctgcttcctgctccttggagctggctcccggactttgcccaccatccatgcagtggctcccagggcagagcctctccttgtactttggcagccatagaaagcgtgctcattttctgttttcctgtgttaggaaaaaaccacctgttttccaaggggagagggcggggcctgagggtgggggcggggcctcttcattggcccagcttggcgaaagcgaggcacactgcttactgccttggggttgtggagatggacccgtgacctcgtggaggccgtgtgggggcagcagcctggcctgtgccatggtgggtgtcctggggcctgtgcggagggagccacctcaccctgcagcccaggttgcaggtgtggccttgtttctccttgcccagcagtgctgccttcagcggccgtgacggggccagctggacacacggtgagattttctcgtatgtaaataaaaggcaatttggtaaaaaaaaaaaaa

SEQ ID NO: 2271 - DNA, 1620 bp, Homo sapiens
ggcacgagggaaccttcattggtgctcatttactgtggactgtaagcatgagtgaattctggttgtgtttcaactgctgtattgcagaacagcctcagcctaaaaggcgacggcggattgacagaagtatgattggagagcccacaaactttgtgcatacagctcatgttggatcaggagacctgttcagtggaatgaattcagttagctccattcagaaccaaatgcagtccaagggaggttatggaggtggaatgcctgccaatgtccagatgcagctcgtggatacgaaggcgggatagccctggtcctttctccaggttattgtgaatttctatattttctctgtccactattctgtaatttttttttgtcctgtgattgcttttattttgaattacaaaaaagaagtgtgatgggcaccttgtccaccctgtcgtgattattccagtgagatgttactgttctgctctgaagaagatactgtcagacgaatcctgcatttccttcagctggcatgcatgcctttggactcaatggacagagttctttggattgtcactgaattttcaatgtttaatcagtatggatctgatcttcgcatgatcttttttgtgaatgctaacaccattttgcagttttttttttctattttaaacatttttcttttcactgccgaccccctgccttacgattttattggaaagcaaggacctgctattatttgttaatttgccatcatttatgtatattttggaaggtatgagacccacaagcacaatgatcatttttatttgtttgtttgtttgaaacttcagcagaatagatatctgcatgctttatgaagttgttgcttcggtaagagcccatgggatgccagaaattaacatttctttgctgccatgggctgatgatgctgctattagataaagtttagctgtggcaccaagtcacatcattttcatagaaaaagattacttgtagcttattttagaagtatgaccttttggtctgtttgattgattgattagaattgcaataaaagaaaagcttgcattcataaggcattcattctgtgtaaatgttcaatatatttattttgagagcaaggacctgtggttgtaaacaggtgtggttacaggtgtggttatgtatctgagtgttgcggtcatactctcctccagtccaatcctgagcatcttcatcttattaattagctgttcgtttctttgtgcactcattcttttatttttacttctttttaatgttatggtatccagttgtttccagtagcagtttcttgaacttctggcctgtactactaactgcagacctccagagtcactggcctttctgtgctctacatattattttaggggccacatcagttgccaagagcaacatacataccgacctggctgaattattgccagtgaaaacaacctgtacgaagcctttgctcaggttctaaaatatgtttgtccttgcacgaattttgtatatttcaaatatttctgtaaaggtttcttcttttctgttagagtgtggtgttaagccagagtcagtggtttgtgttctcattaaaatgtttgtttaaatcctaaaaaaaaaaaaaaaaaa

SEQ ID NO: 2272 - DNA, 1095 bp, Homo sapiens
ggcaaagaccaagatttttgtcgtgtagtcaggctcatcatgcctgcctccttcttccctttggagaattctgagggatattcctcaatctctcagaatcaaaatcttaagtgtctaaacttccaaatgactgcagcttttctcaagttaagaagccaaactaaaataggttaccatcctcttttttttaggaaagagtttatgagtgtcacaagtgcctggtgtggagtttggattatttataggattattaaatgactctctgaggcacaggtgaatacataatttttttgagggagattgcctaatgaacatttgtgcggtaaatattaagtaagcactgtttcatgtgccagggataaaagattaaagatagttcttccatctggggaggagatagcaaaacacatggacaattaaaatatggcctaattaaatactgtgataattataaatatcaggtgctcagaagtttgtaggaaggcctttgggggagaagagcaaagggtaggcaggtgctgttcaagttgttttagaaaagggaaccctgatgagtttaggatacagttggccctccatatccgtgagttttgcatttgtggattcaaccaaccgagattggaaaataagttaggcccatgatcgttgtgcctgtgctgaacaggtacagacatttttcttgctagtattccctaaacaatacagtatagcaactctttacatagcatttccactgtattaggtattaataaataatctagagtaatgatttaaagcatacaagggccaggtgtggtggctcgtgcctgtaatcccaaaacattgggggctgaagtggatcctcaaactcctggctgcttgagcccaggagtttgagaccagcctgggcaacatggtgaaaccctatctctacaaaaaagtacaaaaatcagcagggtgtggtggtgcatgccagctactcaggaggctgagatgagaggatcgcatgagcccaggaggttgaggctgcagtgagctgtgatcgtgccactgcacttcagcctgggcaacacagtgagaccctgtctgaaaaaaaaaaaaaaaaaaaaactcgag

SEQ ID NO: 2273 - DNA, 2458 bp, Homo sapiens
  SITE (1092): n equals a,t,g, or c
gggagtgaaggcctggttacctctccagtgaagattagccccatagagcttactctatggggaagaacttttctgactccttcctgtctagggagtgcgtgatcagaatggtgtctggacggttctacttgtcctgcctgctgctggggtccctgggctctatgtgcatcctcttcactatctactggatgcagtactggcgtggtggctttgcctggaatggcagcatctacatgttcaactggcacccagtgcttatggttgctggcatggtggtattctatggaggtgcgtcactggtgtaccgcctgccccagtcgtgggtggggcccaaactgccctggaaactcctccatgcagcgctgcacctgatggccttcgtcctcactgttgtggggctggttgctgtctttacgtttcacaaccatggaaggactgccaacctctactcccttcacagctggctgggcatcaccactgtcttcctcttcgcctgccagtggttcctgggctttgctgtcttcctcctgccctgggcgtccatgtggctgcgcagctcctaaaacctatccacgtcttttttggagccgccatcctctctctgtccatcgcatccgtcatttcgggcattaatgagaagcttttcttcagtttgaaaaacaccaccaggccataccacagcctgcccagtgaggcggtctttgccaacagcaccgggatgctggtggtggcctttgggctgctggtgctctacatccttctggcttcatcttggaagcgcccagagccggggatcctgaccgacagacagcccctgctgcatgatggggagtgaagcagcaggaaggggctcccaagagctcctggtggtgcagcctgtgctcccctcagaagctctgctcttcccagggctcccggctggtttcagcaggcgactttcttccaatgctgggcccagacttcttgcctgggtgctggcctgccctctccggccgcttgctgcctgtctgctttccttggtggctttgctgggtgctgggcctgccctctccggccgcttgctgcctgtctgctttccttggtggctttgcntgggtgctgggcctgccttctctggctgcttgctgcctgtctgctttccttggtggctttggcttctgcactccttggcgtcasctytcaggtcctccattcacacgaggtcctcctcgctctggccgctcttgctgctcctgtctgaagaaatcagactgatttcctcttaagactcctagggatgtggtgaagagctgggactcaagtgcagtccacggtgtgaaacatgagggaggtgaggtgtccgtccacttcccccataaaggtgtgcatttcagttaggctgccccgccacagagcaggcttcatctgctctgccatccagccccatctggatgtgaggtggggtggagacatcatggggtgattgcagaaagggggagtggcggcccacgcagcttctgctgaggagctgaccgctctgagctgttctgtttcgtattgctgctctgtgtctgcatgtattgtgaccgtgcggctccacctcttccagctgctgctacagctgaggcctggatcccggcctttccctgtgacttacgtgtctgtcaccggcaggcagccctacaaatcctggtgacctgctctcccaagaacagagcctgtccccagatgtcccagtagcgatgagtaacagaggtggctgtggacttcctctacttctccttgctggatcagggccttcctgcctcccgctgggcaggtctggccttgctctcttggcagggccccagcccctctgaccactctgcagctcaccatgcagctgatgccaaagttgtggtgtccagtgtgcagcagccctgggagccactgccaccttcagaggggttccttgctgagacccacattgcttcacctggccccaccatggctgcttgcctggcccaacctagcgttctgtgccatgctagagcttgagctgttgctcttcttcaggggaggaaatagggtggagagcgggaagggtcttgctcctaagtgttgctgctgtggcttttttgccttctccaaagacgcactgccaggtcccaagcttcagactgctgtgcttagtaagcaagtgagaagcctggggtttggagcccacctactctctggcagcatcagcatcctactcctggcaacatcaggccaacgtccaccccagcctcacattgccagatgttggcagaagggctaatattgaccgtcttgactggctggagccttcaaagccactgggatgtcctccaggcacctgggtcccatgaccagctccccgtctccataggggtaggcatttcactggtttatgaagctcgagtttcattaaatatgttaagaatcaaaaaaaaaaaaaaaaaaaaaaaaaagggcggcc

SEQ ID NO: 2274 - DNA, 1127 bp, Homo sapiens
ggcacgaggggaaccttctgaccagcctcatgggctcctcagagcaggaggatggggaggagagccccagcgacggcagccccatcgagctggactgaactggccaggccacgtggagacaccacggtcgacgacggctggagggacgtttcagaggcgagtcctgggtggctcctcgccttgggggctcctggccctgaggctggcggtggccgcatgccggcgcgtgtctgtttctgtgcggcggctcagggtggcgcggctgctgctcactgtgctgctgggacccaagagtggggcgtcgcccctgctggccgccgcgtcccccgagattgacccacaataaagcacaggccttaccgcggcgtcaccctctcccactcctttgttctgggtcctttcgggagggctgatgggcagcacaggaggcccgtcctcggggggctgcgcacatcacgctccttgccgggcgtccggcacagctgcggtcaccaaagcaggtgctggccctcggacctgagagcccagccagggcccatgtggtctgcaaatgggagcggctgtttttgaacacggggtcattctgcagtcaggacgaaccggtccccgtcgcagacggagtgcacgtgccctgcgccacatcctcacgctcggtggagggacgcgtgcggcgggacggtgcctacgggtacttgcagctgtgtcccatgtggcatcccagagctgcgccctgctggtctctgtgagcgccacgctgctgtgctggaaatgccgctttaaaaagggataccgtgggactctgcccgtctctttcataacgcaatatttatttgtattgggtgatgattgattctttcgacctaacattttgggttttaaccaaataaccggtccaggagtgagcagctccgttctgtcagatgctactccaaatgttaccagaacgatgacaaaaggggagacgctctattttttcacagttaaatgacagttgtagattgatacgcagttgtgcatgggaaggggaaacgcacagctttatttactgtaaagtggaatttcaggaaggcttgtgtgaaccgttgcgcataaataaaccctttctaccggaaaaaaaaaaaaaaaaa

SEQ ID NO: 2275 - DNA, 378 bp, Homo sapiens
ggcacgaggcaaaatcagagaggggtgcaagatcctgatttttcaggcagagagaggagaattcagccacctgaagtcagcacctacagaagcacagtctcctggctttgcctctgaattattaacagcagagcagcattaaagagcccacacactagaaggaggatatgaagaaacacccagagaatgtcacaaaaacccagaatgtcacagtattgttttcttcttgctggtgtcctatcctctctcctaacaccagccaccaaagctgatttttaaaaaatgccatgatttctcttgtttacaagaagctgtttcctataccctattcttgaaggataaagaaatagtcattcaaaaaaaaaaaaaaaaaaaaaa

SEQ ID NO: 2276 - DNA, 2056 bp, Homo sapiens
tcgcgagaatcgtctcctcgataccaagcgcctgtgtctggcagagctggtgtgagacgagacaatcctgccccgccgccgggataatcaagagttttggccggacctttgagcatacaccgagagagtgaggagccagacgacaagcacacactatggcgctgaaacggattaataaggaacttagtgatttggcccgtgaccctccagcacaatgttctgcaggtccagttggggatgatatgtttcattggcaagccacaattatgggacctaatgacagcccatatcaaggcggtgtattctttttgacaattcattttcctacagactaccccttcaaaccacctaaggttgcatttacaacaaggatttatcatccaatattaacagtaaggagctttgttcgatattctaagatcacagtggtcgcctgctttaacaatttctaaagttcttttatccatttgttcactgctatgtgatccaaacccagatgaccccctagtgccagagattgcacggatctataaaacagacagagataagtacaacagaatatctcgggaatggactcagaagtatgccatgtgatgctatgctaccttaaagtcagaataacctgcattatagctggaataaactttaaattactgttccttttttgattttcttatccggctgctcccctatcagacctcatcttttttaattttattttttgtttacctccctccattcattcacatgctcatctgagaagacttaagttcttccagctttggacaataactgcttttagaaactgtaaagtagttacaagagaacagttgcccaagactcagaatttttaaaaaaaaaaatggagcatgtgtattatgtggccaatgtcttcactctaacttggttatgagactaaaaccattcctcactgctctaacatgctgaagaaatcatctgagggggagggagatggatgctcagttgtcacatcaaaggatacagcattattctagcagcatccattcttgtttaagccttccactgttagagatttgaggttacatgatatgctttatgctcataactgatgtggctggagaattggtattgaatttatagcatcagcagaacagaaaatgtgatgtattttatgcatgtcaataaaggaatgacctgttcttgttctacagagaatggaaattggaagtcaaacaccctttgtattccaaaatagggtctcaaacattttgtaattttcatttaaattgttaggaggcttggagctattagttaatctatcttccaatacactgtttaatatagcactgaataaatgatgcaagttgtcaatggatgagtgatcaactaatagctctgctagtaattgatttatttttcttcaataaagttgcataaacccaatgagttagctgcctggattaatcagtatgggaaacaatcttttgtaaatgcaaagctgttttttgtatatactgttgggatttgcttcattgtttgacatcaaatgatgatgtaaagttcgaaagagtgaatattttgccatgttcagttaaagtgcacagtctgtaacaggttgacacattgcttgacctgatttatgcagaattaataagctatttggatagtgtagctttaatgtgctgcacatgatactggcagccctagagttcatagatggacttttgggacccagcagttttgaaatgtgtttatggagtttaagaaatttattttccaggtgcagcccctgtctaactgaaatttctcttcaccttgtacacttgacagctgaaaaaaaacaacatgggagtaataatgggtcaaaatttgcaaaataaagtactgttttggtgtgggagttgtcatgaggctgtgttgaagtgacttatctatgtgggatattgagtatccattgaaatggatttgttcagccatttacattaatgagcatttaaatgcaacagatatcatttcaggtgacttaacatgaatgaataaaagtcaatgctattggaaaaaaaaaaaaaaaaaa

SEQ ID NO: 2277 - DNA, 2366 bp, Homo sapiens
tttcaatcaatttatactgagtgtattaggatttctgctattaaatgcgtgatccctcttctgcttcagtttctggcttggctttgtctgtttcaaaatatgtagcttcctctttggcacaacaaaaaactcattttcacttttattaaatatacggtgttatcattgattttattttctcttatgtatctgtaaagatttttggcacataaatgtaatataaagtcagtggatgctataacttgcaatgtttgcatcatgtccaccttttttaaggagtgaaaaagccctagtatgtttttaaagaatagccagtgcaagctcagtactagagtgactacacacactgcatgttttcatatgtgggcactttgatgtaccgtgttgggttattgttctagattggactgttaaatactatgttcaaggctgggttgtcatttttataaaggtcttggtgttttatggccattagttattacttttgatatagagaatgagctacgtgcatttctaaagccaataaggaggatgtatttaatgtgccttgtttttgaaactgaataaggaaccggtaagcatggaatcaatgaagaacctgattaaaatggtcaaaaaaaaaaaaaaaaaaaagtggtgaagtatttatgttttcctttaaaacacatgcagaacacatatacgcatgcttgcgtgcacgcacacacacaacttacacacacgactctcacacacacacacacaccagccaaacagtccacctaaatggcgctgtggtggtgagagctctgggcaatggaatcttaccaaacgtgcagtgctctgttttggagacagggacaccctttttgtttatttcagatataaaacaatgcaggctttgtcctgaatatcattatccaaacaagaaaagggaacataccttctcaaataggagaccttcctggcctatgatgaaactttgggcctgactctggcatgcacagccttgttctactctgtcctctctgttctgatccttgtggagtttgtgtggcaccaaaacactcccatagtcaaggccagcaaccagactctgagctacaccctccttgtctccctcacactctgctttctctcttcctcgctcttcatcggccgccccagccctgccacctgcctcctctcacagaccacctttgcagctgtgttcacagtggctgtgttttctgcagggccttccaggctataaggccagaaagcaggatccgaaagtggatgggtccccaaaaaacaaattctgttgtcttcctttgctcctttacccaagtgaccctctgtggaatctggctggggacagagcctcccttcgtaaacaaggaccctcagttcatgcctggctacatcattatccagtgtaatgagggctccgtcactgccttctactctgtcttgggctacttgggcttcttggttttagggtcccttgctgtagcctttctggcaaggaacctgcctgatgctttcaacgaagccaagttcctgaccttcagcatgctggtgtcctgcagtgtctgggtggccttcctcccgagttactaaagcacccagggcaaggccagagtggccgtgagatcttctccatcgtgggctccagcactgggttacttggctgcatctttgctcccaagtgctatgtgatcctccttcatctagaaaggaacactattcaatgtttaaagaagcctagtccaggcatggtggctcacacctgtaatcccagcactctggaggccaaggcggctggatcgcttgagcccaggagttcgagaccagcctgggcaatgtggcaaaaccccatctctacaaaatatacagaaattagctgcaggtggtggcatgcgcctgtagtccccagctactcaggtggcggaggtgggaggattgcttaagccccaggaggtcaaggctacagtgagcccaagatcacaccactgcactctagcctggaaaacagagcatgactctgtctaaataaataaataagaagcctgagaaaccataaacagaccaaacaataaacaggctgagaagaggaattgtaatgatcattagtggcagagaatttgtaacctgattgtggaaagcacatctgaaaacaaagattgaatgaactatttgaaaaaaatggcaatgaaagaaaatttacagaggcaaaacctgaatatccagtgaataataaaaagattctggctggctcaaaggtagtgagttctaccaatgtattgtccacagtcagttacagaccaaattccttgttctactctttcccccctcctcactaatgcacttgactagtctttaacgaagaaaaaaaaaaaaaaaaa

SEQ ID NO: 2278 - DNA, 2761 bp, Homo sapiens
cacgagtgaccttcaaaattgcttccacttctaattttgttttaagacactattgactacacttctcctaaaaattgatctttttgacgtgattgggctcttgagacttttttaccctttgtcctgatctgattctctccatgaatcaattttgttcatctcatctgtcactcttcctctgtatgctttgtaacctgcatttcctctacttctggcacttttttgccaatggaacctgcaattctactctgcaaatagctagggttgtttcctccctcactcccagccaaaatacagcttttatagtagtatctctgagtagggagttgggctattgaaaaaacatgctatagcccaaagtccctattttaaaagagatagagattggaatgatatgttctttttagggtgtggatgttttaggctccaatgaccataatcaaaatagatctataaccaagccgtaaaagggtaatatatgtgaattttctcataatatgaatcctaacacaaaagcagttacaatactttaagcgtaaattacatagtctgcaccatgattttttcaaaatttgtcttacgaacctcaaggaggaaaatgtaccccactggttaggaaagaattattttctctaggttccataacatagaaggagtgttttatttcctcactgccttgtgcctgggaatactgaaatgatagattcagccatgttttaataaaattcctctgtaagaatattagcatggagagagattggtataaatacatgaatgtgcctggattttgaaggtaaatcctatagctatcagattgctattcacttaattgccacaatctaaaatttatctgttagtgtttcttttctaattgttactagtgtgataaaaagaaaaactcttatttatatatagattatttgtttcaggacattaactgagaatatagtattgaaatgacttgaaattgaaggaatcagattttctactgcttatttattcagaatataacttacccaacaaggtctgatttaatttattttgaggagtagtatttagaagcaggattactcttatttaggaaaagaatctggatcttagatatacagtgacttgcccagagtcacctagtaaatgaaagaactataagtcaccacttgggcgtgtgattcatgatcttgactatgaattgataccagtactttacatgaaatggccatactctgaaaattatatttttagatataaccttaataaatatacttgcctttcacagaatattagaaccaattcctccttatcttcatggaggagcatacttaatgatatatgtactgatgagatttcgtcttatttttaaaaacttccaagaaagaatgtttcatagctcccttcattcatctactctggtgcttaattagatttgatacgagaacgctttctttcttatctaacttgaatccctcatgctgtagcttaagtctggtttctctcactctgcctaaggatgccaaaagcagctaatcaccattatccatagtaatattcacaaagtcctccttatgtttgaaatgttagcgctataactgacagtaaacataacccccaagtatcagcaaattataaactagagaagagggactagcttgtagtaaatatagatgacatattagtatttagttgtgatgaatgaataacactaaataacgtgacttaagcattaagcagactaaatgaaaggcattcttctggtaactcattcacttaaatatttattaggcacctactttgtgatgctatgctacattcaagactttcaatgaaaatgatttttaaaaagtaaaacttattaagtatatttctcaaaatgtgaatgtacaatagcctaatattaacaagataaccctgtgccttatctaatcatcctgtggaatttacccatattttggaggtggggctgaaaaatagtctgattattagaacatttgtgtttatatttacagctgccctattactaaaatatgcagttggcatcaaaattttaccatacacagtcactgagcccttcacctggaagcctctttatttcagcattactgctgaagagttacctgtgtctttctgtgtgcatttgaacatgtgtgagcatgcagccagtgtagcactacaagatgcttatcgctagaaataaattatagagtcgtgcagcatgaaaattatatgcccgggaatgcagaacacagggttaccttctgcctcctttctttgtcatggacagcagaggcagaaaggagaaagagatttattctaaagccatttgaagctgaccaagcaatttataacagatgaaatgctgatttattgctgcagagaaaataatgggtgttcttgctaaaatgccattaatagctttattgtttaaagtgcaaattatattcagcaatttgttagtcctcttttgaggcaaagttgaagtaattcaatgtaggcttttagcagaaaaaaggacaaagtaattaacaaatcgtaaaagaattcattcaccaagattggctgatagttgaattctctgtctgaactataaagacatagggaaaatttgcacttaagaaatacaagatgactcaagtatttgtttaaaactgaaaagccataaggaagttggagttgggacactacagatttaggagtatgccttctgttggtgtccactgtgtctgcaagatgtggtagtcaaccagagaaaaaaaaaaaaaaaaaa

SEQ ID NO: 2279 - DNA, 1601 bp, Homo sapiens
  SITE (22): n equals a,t,g, or c
ggtcacgagctgggcctcccgnaaggtaaaactattttaaagtgtacagttcagtggcaataagtatattcatgatgttgtgcaactgttaccactattggaattccagaacattttcatcaccccaaagagaaaccccacaaccatcaggaaccagtcctcattctcccctttcctcagcccctggcgatctctaacctactttttgtttgttttccaattctggacatttcctgtaaatgggatctaataatatgtggccttttgtgtctgcttctttcactaaggaaaaatgatttgcattttactcttgcatgttctgtgttgtttgtgtgggcgtattcatctaggagaaatcttcctgaagttccttctgtaactaattctgcactgtccatggagtcatgttattgtcagactggtggccttagagacatgctgttttctgcaacatcgtgacacaaaagggtgcaccctgtaagaatcatttgggaatttttgttctcttttcacaaacactacatctcaaatttttaatttgatcaaatttgactctcggtgtctgcaattttctttagaaattaagctaacaaacattatgacattgtaatattgtgaaccatgataaaatcttaaatagtgacaaatgaagcatgtgataacacaatattttctactttttacataatgcagagatggcaaaattacacatttaaaataagtagatatatttttccatccattaaatggttctaatttgcttactgcttctgcctgtatttacttccaaaccaggtatctgcgagcttttcctgcggstactttggaacagaagaagccatagtaacatagaggtgaaaaaggggtaaaaggtttcaggagcacctaggatttcagscccagtgagaaatcacttcamccaaattgcagcaggggagctggtctcaggttgggaggagagaggggagacttattycatgatcttttctctattycccatacagggaagagatagtattttattattttttatgkattattttgkatttacttatttatttattaaaatagagacsggggtctcaatattttgcttaggctgatctaaaactcccgagctcaagccaccctcctgccccagcctcctgaataggtgggattacagatgtgtaccaccactcctggcactgggaagatattttaatatgttttagaccaatttagaaaatgaagctaaaagaggtcatctaagggaaatcgtttcctaacattttgatcccgcatgcctatcagcagagaatgttttgagcatgtactcctaatgtgtgtacatttatttaaacattctatgatgkaaaattcttaatttgtatactatttactgttctactttttaaaactttttaaaatyaattttattgaggtatgatttacatacaataaaatgtacccatttaaagtgtatggaggccgggcgccatggctcatgctgtaatcctagcactttgggaggccaaggcaggcggctcacttgaggtcaggaatttcaccagagatggtggaaccccatctctactaaaaaaaaaaaaaaaaaactcgag

SEQ ID NO: 2280 - DNA, 1514 bp, Homo sapiens
  SITE (453): n equals a,t,g, or c
  SITE (1107): n equals a,t,g, or c
ggaactgatgcctggctgtggattgaaatggcttcctggccaactcctcttggctgtttaaaatgtttgtgaccccacctagacttaccttcaatttatttacactacgctcctggttctacgtttgtgactgtttattgtctttactcctttcaccttctggaaggtaaatgatagctattattaatatattaaagaggactagatccaaaagtttgtagtatatgtgtggtggggggggctttccctcatagggaagaaaaagtattagctttttcccacctgtcactaggttcgtggctragtcacctttaacagactacagattaagaagagaaaatamcmcaawtttatttaataaaagtttcacatgmcatgaagttttcagaaatgaagacccaaagatmcagggaamcctgtgtatttcagtgcttggatttgatgaagaatagncagtggtggggaaatgtgattggtcaaagcaggtaggatctaatggtaataaactggaggggagcttamcaaggcctgtttgtgcagattcttaatgttcctgtgttttcagagataasgacatttcctttcctcagggaatagcgagggcacctctggaatgagggtcttatgacttactttaggggaaggtcagaaaattgttttatggcctgtttcaggggagaagggtgggaggaggtcagaaaccttcctgcttctgctactttctcaaataccaaggtaccatattttggggtagcatttactgaaccctatcaccctcaatgttttcttcctttcactcttcactagcaacactcaagcatttttcccaactcatcattatgtctgaggcaggactttctcctcagaaagtggttcctgatgacctggttgataatccatgctttacatactcatcttcagcagtcatccactctgacattatctcccgtcactcactctggataggatttccaggtgtccattatttttatagacttttagcccttggcttccattttcagtcacctgtggaactcttcctcgtggatgtttagtaagtacttctaattaaatatgtctaaaatggaactcatccagttttccctncatcctcccaccaataagaaagcctgttgctattctgatgcaccgcctcccccggccccccactcctccccacagacacacacttaaatttttaatccttggccaggcacagtggctcacacctgtaatcccagcactttgggaggccgaggtgggcggatcgcctgaggtcgggagttcgggaccagcttggccaacatggtgaagacccgtctttactaaaaatacagaattagctgggggtggtggcacatgcctgtagtcccagctgctcgggatgctgaggcgggagaatcacttgagcctgggaggcggagtttgcggtgagccgagatcgcaccactgtactccagcctgggtgacaagcgaaactccatctcaaaaaaaaaaaaaaaaaaaaactcgag

SEQ ID NO: 2281 - DNA, 1079 bp, Homo sapiens
ccacgcgtccgctttagcctcccgagtagctggtactataggcacgcaccactacgcctagctaatttttgtatttttttgtggagatggggtttcaccgtatctcctaggctggatagttaccaatattaactgtcaatatttgatagcaaaatctgtcttaaaaatgtctttttacagattggttcattcaaatcaggatctaaacagtttaaggggtttgctcatggaatttgtttttctctttcatctgtttcagtctaaagcagtctttccttctttttcttttccttgctgttgccttgtagaaatccagtcatccatccagtagaatgtccagcattctaaggacattctaaggcttttttttttttaatcctctttgtagcgagcttcttcctctatctcctgcattttctataaaatgaaagtttattatataggcttgattcagttcaggtccttttttgaggaagaatagaatacttcataggtagtggtttattcatcagactgttagaagatacaaaaggtttcgttgtccttcttttagttatactaagataaattgctggattcaagtaataagcctaatactgccattgtggaattctccatcagattttaatcatccattgataatcattgctggaatttattatttcatttaggattacaaaagggtaatatttatttatttgtttgtttgttttttattttttttgagacagtgtctcattctgtcacccaggctggagtgctgtggagcaatctgagatcactgtascctccacctcccgggtacaagcagttctcctgcctcagcttcccgagtagctgggactacaggcatgtgccacaacgcctggctgatttttgtagttttagtaagagaccgggtttcgccatgttggccaggctggtgttgaactcctgacgtcaggtgatctacctgccttggcctcccaaagtgctgggattacaggcatgagccaccatgcccggccaaaaggataatattttaaatctgtgattccttccccagttactagctgcaattctgtaaaaaaaaaaaaaaa

SEQ ID NO: 2282 - DNA, 2814 bp, Homo sapiens
  SITE (1565): n equals a,t,g, or c
ggaaagggtggccgagcgcgggcggaggacggagaagggggcggcgagggccggaatctcgagcttgttttcacttgctttttaaakacagaaagctcatggtgcaaattgttatttccagggaatccctgtgctgatcgtggggcatcatatcctgtatgggaaaatcatccacctggagaaaccttttgcagtccttgtcaaacacactcctggggatcaggactgtgatgagcttggccgcgagactggcacccggtacctggtgacagcactcatcaaagacaagatccttttcaaaacccgccccaagcccattatcaccagcgtccccaagaaagtatgaaagaacctcggattttccctagagagcggccaactccttggactcgtgctccgctgccacctcgaggacggctcgacggttccctgggaccacaggggggtcctgttctgaacacaggccacccactgggtgtgaactcggatcccttccttatggcggccggttctcttggtggaaatctgaccccatttccaaggaacccatctccttttccagcttcatcaggctcattggcttcaaatccagcacctttcccggctggtgctcgtgacccaagtatggcttcttttccaagagggatgaatcccactggcacaggtgcagtttctttcccaaggcctggtggcctcttggggccaggcccaggcccaggccccaccctaaaccctaggacaggggctctgccaggcccagggcctctgtctaaccccaggttagggggtctcccaggaccaggtcctatgtccaacccaagggcaggtggtctcctgggagcaggtcctgaccccagaggtggtggtcccatgggccctggatctkgacctaacctgagagccggtgttctgttaacctctgggaatggtcctcccaatcctaggccagttggctgggcccaggaccaaaccccaatctgagatcaggctttttagggacaaaccctgcccccaggtcaggtgtgtttccaggcccaggccttgggcccaacccaagaccaagtggcctgggcccaggccctaatctagatgccagagcaggtggcctcttgggcacaggatctggtcttaacttaagaatggctggacctcaaggcctcgatcttgcccccattctaagagcagcaggtcttttaggagcaaattcagcttctttctcacaggcttctggaaacatgggcacaagcccatcctccatggcaagagtacctggccccatgggcccaaactcgggtcctagctctcggggaattggccttccagggccaaatccatctcccatgtcaagggctcctggccccataggccctaattcagctcatttctcaaggccagttggccccatgggggtaaatgccaatccctttcccaggggagcaggttcatctgccttttctcagtcttctggcacattggcatcaaacccagctaccttccaaaggtccgctggcctccagggctcaaatccaaccattttcccaagagcctctgggccacttggcccnaacccagctaacttcccaagggccactggcctgcagggtccaagtccaactaccttcccaaggtctactggcccattaggccctggtcaagttactttccccaggccagctgccgggcatctgggcccttctccagctggccctgtgggtatcaacccagctcctttcacaaggccaactgggaccctgggtctcaacccagcttcctttccaaggatgaatggccctgcaggcaagagtttcgtcccatttcctagagtggggagcctccctggcacaaacccagctgctttccccagaccagggggtccaatggctgcaatgtacccaaatggaatgttgcccccttaaacaccattttccctccaggaccaccttggtttctaggcactgtggttcttggcaggggctgtcttaggtaaaagggtagttgtggagctacagtctgaagaacatagcttgggctcaagttcaaatgagccatctttttcctttgcgtttttcttgactgaaggtgagatgttatttgtggcatgtgaactgtggcaggtgggaataatcctgcccttgagagaaaggatctccagcctcccagaagcctgctgtgctttcgtcccacagctttctgcccattgtttcttactagtttcttgaattgttcttgtggacttttcctcagggatacattggcctgcaggtcccagttcacatgtagtcccctgctcaccattggagaatcagctcactgctctctagaaacgtggcgttggtgaacggaccatgcttccgtagctctgacctgggcagcttggacctggtcatcctctactgccatacctttccctgggggcttgaacacagaacagggagatggacaaccacttcaaagaaagacccaccgaatgcagtttctgcttgactgactgggcctgcagctcccttctcctgggacttagaggtggccagatttaaggcccctctactcatccaactccctcttcactggtactcccaatcaatcaaagaacctcaaaatttaaactgatgtggatgggaatatgggaattagggtgggggtgggggatgaagggaagaaatcactgtgctttgttcggcctggtgtgcaaggatggttggtggttttcctgcattgtatcttttcttactgtttctttaataaatgggatgagagggcaaaaaaaaaaaaaaaaaaaaaaaaaaaaaaaawaaaaaaaaaaaaaaaaaaaaa

SEQ ID NO: 2283 - DNA, 2200 bp, Homo sapiens
ggcacgaggaaacttctagcttggaatagcttgtacacatatacatatgatcaaatactcctgcccatgatccattcccttttgttattgttgttgttgttgctgttgttgttaattttgttaagaatttcaatatcaagactgactggcaccaacactttggtattcaatttgattctatgactgaagtactggaatttattatgtggctaaagtgctctatttattaagaactatatttaataccaccaacaaatataggggttaaggaaaaaaaacgttgagctacatgtgtaagaaggccctgcatgtgtatgagtcctattctgggcaaatagattcttaaagtggctttcaacttcaagatgaaggagcttaataatggttactcattttatcaggggaatttcagggaacgtaggcgtcaaagagccagttatctttagcagatattaaaaattgaaaactttggagaactcatttcaagttatgattcagtgcattttcaacattgatttttgatagactgaagtgccagatcaaaattgttacccatttgaaagaatattagttgtatataaaattagattagaaagactttctaaatctctatctctttatatatgtcctattcattcacaatggattatacaaaaaaaagtgtattgcaagtgaaataatattgatttctgccctcagcttcaaataaagtaaattgaaatgggaacaatatcaatatggtgtcttgatatatttataaatatgtgattatcatttatttttaaaataatttatcaaaaaacaagtctttagtgttcaaatacttcaaatcatatcctcagatatatttttagcccatggttttatataatctttaagaactaattttaccactgttataggttcaccattaaatataattggctaataaaaattttaaggttgactaaattaagaagaaattatttaacattttaatgtgccataaaagagtaaatgataaataattaaatgccactatgtgttctattccggatgttctagctagaagtcattttaagattttgataaacaactttggttgaagaaattccttaagtattcaacacaaacctttctaatatcttttgttagggttataccatgaataaaatgcttctttagcttccaagctatgcaagctcccagaggtaatagagtgacacatgatttaacttatatgtaaggtttaaaaaagtatttatcattataaacatacataccatttgggagcaggtttattaaccttgagagccaaaggtttccttaggccctgtaacattcagaacctttggtgtttcaagtggtattatagctcaaatagtgacaggacagggaatgcgttccaaaggaatattggagcaattttaacattgcagaaacctgctctgggtgtgtctctctgtagagataacctgatgattattaaatgtaaaattaaggcaactcatgaatatttttatttacaaagtgcttgaaactcagccaaggagagaaagctaagtacttcctatataattcatcacttttctggctacagcaggacagaatatgaccatcttcgtttgaaggcaccaaatcgtcgcagtgtctttgccataagttgcagggttaaatgcgggaatctctcctcgcgttcctgtctggcgtattctgaagaaaagaacagaattcttgtgcctacctaagaatttgagtagtgtctaaacaaacaaagcagttaggtcattttaactgacttgattatccaactggtctttgacagatttgactgttcatatttagtttatgtttgtctgatcatccagtttgctttattttgctgtgttttattttgttgtttgttttgttttgtaccagtgtactaaaactagtcaaaatacttgaattagtttgtttgtgcaaagtgtacaagcttagtaaagtgtccatgaagcaatagccatgaatgctaattatttctaaatagggccacatggttttaaactaatgatggtgaaagaaatacgatgactgagaaagtcatttcgcatgtttactattgttatattcgtgctttacttcaagagtgcagaaatcataataaataacaaactatttttgtgttttctcaaaaaaaaaaaaaaaaaaaaaaaaaaaaaaaaaaaaaaaaaaaaaaaaa

SEQ ID NO: 2284 - DNA, 966 bp, Homo sapiens
caagcggcggcggccactgccacgtattcccggcagtggtggcggcggcggcggcggcgcccgcgggcaggaataactcaagtcacctgtactggaaatcagtttgctgaaattaatcaacgattcttgaagttgaagaaaaggaggttccagccttggcaagaggagtgtggcccttcctggaatccctctggacacaccctcctagcatcctctaggaaagatgcggcagctcaaagggaagcccaagaaggagacctccaaggacaagaaggagcggaagcaagccatgcaggaggcccggcagcagatcactacagtggtactgcccacgctggccgtggtcgtgctcttgatcgtggtgtttgtgtacgtggccacgcgccccaccatcaccgagtgagccccgcagccggccgcggaccccatcggcagggagaggaggcgcgggagggggacgcaaacaaaaaatggctttcatattcagagatgttcatgttgctgagctgtaagcaggagcaccctgtcttctctggtctttgacttgattaaagtatctccgctttcttgggagggaataggggatgttttatcagtgaatgtgccatacaccttatggtccacttcatgtgcctttcagacttcaaarcgcgcgcgcatgtgtgtgtgtgtgtgtgtgtgtgtgtgtgtgtgcttctttttctctcctaaaaatcgataagtagctccacctgaagagggatggaacctctgggtcaggaaacagctggaatccacactcacctcattcccattgtttggatcatgcctctttccaacacgtgttcacaatctccaaagggactgtatttcttctctgtgcttaatgtgatttgaaatatgttgaatcaaagtgaaatatttattttttgaataaaggagataatagccttaaaaaaaaaaaaaaaaaaaaaaagggcgggccgc

SEQ ID NO: 2285 - DNA, 1512 bp, Homo sapiens
ggcacgagcttccttggagcctgagtgtgagaggaagctaatgtcagccgggctagacaccgtttaaagtctaatccatgaaaccctaagccgcaaatgacacttggggctttgcagacacccgcagactcagcagatactcctgcggtaacacactgtgctggaaaacgcctggagccatgacacattatgtatttttattattatttatggtaggaagaggagatgagggaaaatcgggctgaatctaagcagcctgacaattcagctagttaatatttagccagttaagaaaggtggttgtaatccctgcaaggcagtgagctctcctttgatttctctaatagcttaaaaaataatttcttacaagacaattagaaattctgcctatggatgcaaatttcatagaaaacaatgttaagccttgaaagtgggtaaaatgtgccttcgattgaagtcatttattctgttgatacacttctacaacatatatattttaaacctgctcagataaagtgaaatttagcaaaaggatatcccctcccacccccaaatctaacatgccattttaaaaacagcacaaaggaacaaggaaactaaatattattttgagccatcattacttagtgaaatacaaacatccaaatagaaacgattgttgttccaccagaagattagaagttaaattatttccacacaataggaatttcacttcgtgtcatcggggatgtagtaggagttgcattatttgtcaaaccaaatagaaatgcgtgggctgactgctgaaatacaaaagaattgaaccttatctgaaggcgttttctaagtggcccctcccatagaagccgggaagttgtccacccctagcagaagccacattaatatttacaaaatggttataaatccttgaagacatttttgcccattttgtataagaaacaggagtaaacaaggtgtttatacttgttatgtttcattaatgaaatattattactttacatcttggggaatgtttgttttctttagaaatgaactaatgatcactacaaaggaagaattcctgacagcatttcctagagaaaaagcttaggtacgcgtctccaaatgatggtttctttttctacaccttagctttttcatagctcaattcttcttacaacttctcttgtgttttttctttgattgtcagttttctttcaaagtttattttttgttacttaatgcagaaaagtgagctctggtctccccagtgtaaaagtcgattgtgtctagaaagaaggcagtaaaaacagcaaagcaggcgctgctttcaaaaagccctgcccaaatcatcccgcccagaaccttcttaggtttgcatcctcatttccccctcccctaatttcaatagctggaaagtaatcaagtatcccgaggaccaatttatgcactagactccaaataaataaaatatttttttcaaagtgtcaaaaaaaaaaaaaaaaaaaaaaaaaaaaaaaaaaaaaaaaaaaa

SEQ ID NO: 2286 - DNA, 946 bp, Homo sapiens
ggcacgagtgcagacgctggtctggttcctgctcaccctgctgctggcgctcttcatccctgacatcggcaaggtgatctcagtcattggaggcctggccgcctgcttcatcttcgtcttcccagggctgtgctcattcaagccaaactctctgagatggaagaggtcaaaccagccagctggtgggtgctggtcagctacggagtcctcttggtcaccctgggagccttcatcttcggccagaccacagccaacgccatctttgtggatctcttggcataaccactgcctcccagggaacacaaggcctttgccattggtcgcaggaacccatctcttagagctatggggccattcttagtccacgatcattccaactggtgggatgacatccggacatcctcttccagggactggggcaaactcaggccccacacctctggacagctcaaatccagtcccctctcctgctccccagtcctggcagtgccgtggatggcggcaggaagtctcacatcaaggaggacccctcctcctctcccagttctcaactttctcatgcctggaatccacgggtgaagagagtcggtagatctcataagaaagaatccagtctgacttccctctggagaatgactatggacagaaggccaccatcctccacagagcaccctgtcctgagtaggggttgtgctcattaccccaggccagtggtagcttcctcaggagcctggccacttccaacggtagcactgaagtcatgcaaatgcatagtcaggtagattcagaccttgtccacaccttcctgggcaacccccaccatgaacctgtcagcctctttcccatagctaatagacatttcccaggccttaaaaaaaaaaaaaaaaaaaaaaaaaaaaaaaaaaaaaaaaaaaaaaaaaaaaaaaaaaaaaaaaaaaaaaaaaaa

SEQ ID NO: 2287 - DNA, 1570 bp, Homo sapiens
  SITE (412): n equals a,t,g, or c
  SITE (502): n equals a,t,g, or c
gaattcggcacgagcagataaccaaaccagactggaagaggataacaagatcccaaagaggaaaaaaaattgttcttccaggatgtcaaacctatctttgagatattcatcatccaaagggtcctggggttctctttttccaaatattaggataatgcaaatattcctgctcatggtggacgcacactgtgtttacatcagtcaacccttcaaacatgagtcagagaaatctttctctaaatgaaggtgccatttctattgacagctcaacttcgtaaaggtatgactttgagttgttttgactagtagaaagaaacatttgcccytttttgctctgtttctgtatttaggctttcacttgtcctagccaagattatttagatccccatacggraggtcaaatatgttaaangctaaataattagattctcttgatttacacaaaaaacataactaactaaaatagaaacttttaattatctgtattgttgtataaaatgtnttatatattaggaatctaaaaatttgttttttgcttgtatcctctgtcataggaagaaactcatgtctctgtttactgtaaccattaataaaggctaataacagacagtacatgatgatacttttaactagggcaaacaaaagtaatattttaacaatgaggtttggtctttgctatctatacctcatgtctaattttccctacaatgtaaatgtcattcctcctctctacccatttgtaagggtctcagttttctgctcttgcatgacttattttaaagggtcacaataaggccaggtaattcatattttaaaaattccatttagaataattacatctaaaaattcacaagaaagacaatttcaatataaaataataaattactaatattggaatttcaagcatkagtcatggcaaaaaagagataatttgtagcagaatattttaatggcaactttcttattctatcacttattgtgttctatttgttatgaccaaagaaattactctatatccactacaattcataaaacaggcatgaggaagtctttttttcttggtgctcatgtctaagaagatgamcctcagaggtatgtcatttttcaatactatgttctgaacagacagcacacattatttttgaatggacaacaaaatctcaaaacatatatagagaggtatggtttgaggtgtgtccagtatgaggataatatgacccagcggatgtwaaattggattttattattaaaggaaaatggggtgtcttcaaaaagataaaacagcgggagttgggatgagtactgagaaaagagcacaaaaacaggcttgtagaggaggaagatctcaacagagctgactcttatctgtgctcacattcaaaactgacttttgaacaaaagctgcatcctttgccctatactatagtcccaactactctggaggccaaggcaggagaatcacttgaacctgggaggtggaggttgcagtgagccgagatcgtgccactgcactccagcccgcgcaacagagcaagactctatctcaaaaaaaaaaaaaaaaaaaactcga

SEQ ID NO: 2288 - DNA, 2418 bp, Homo sapiens
  SITE (138): n equals a,t,g, or c
  SITE (171): n equals a,t,g, or c
gctcgtgccgctgttgaccccactgagcagtgctaagtgttggtttagtggatgttcgtggaattgctgacccatccaagggcgtcctttggagccagtggagcctgccggcgcatctraggggcagaatgctgctancacttgaatctgggatctcgccttattctcaantagcaaggcatctcgacaagcatggtctargtctggtggccagcttgccartacctgagccggtcgggtcatctgcctctgagggaccgtcctcaccgagctcctgcatcccttgagtgttgatcaggaggcgtccacagcattgttctcgcctctgaatgatgcttctttctgtgttggagcctggcgaagttgtgttttcaagccctttactttttttttccaagtggggtaggagcttttggcagtgtttactttacctagatggcttatataatccagtaagagatgcaaagataaaattgctgcggttgttacagaagcatggcggcctccagactgacccattggttgccctttagattttgtaaggatgcggtgctggggaggtggtgcttccctaccccctagaaatgctgccttccaactaccactctcccagatgtgacccttgcgattatttcctctgaggtttgaggatgaagataagttggagggaaagagagtaactaataggggatgaaatatagcagaagctagaagaaagcggtgaggtgagagagatgcatctgcacgttttcttcaacagcaccaggtgattcagcatattcctaattacctttcactattcgtgtatataagatcgtttacttgcataatatatcatcaatttgacatattcttaaaactagagggtgtgagaagcacagcaataggaagtctctccacaaactaggggaacacaaatggggtcattcacgtgcctggactgtcactatgtggctgtcacgtgaagtgctggtgttgatttccatttcagccagtgggtagctgataagccagtgccagcatccagcatgagcagatgtcggggagactgggaagtctccagcgttactgctctccttcccttcatgataagccagtgccagcatccagcgtgascagacgtcggggagactgggaagtctccgatgttactgcctgccttcctttcgtgtgaggggctgcacttgcttttcttgtgatctgttagtggacgaggtcttccaaggaagtgctttgcacactttctttgctcctttttacagtctttgtctttgcagcaagcaaatgaaattaagccactttgggataatgaacattcagtataattctactttgtctcattttggatctcactgttgtctttataaaaatggcacattttacaaagtagtttattcttattatactttctgctggagagtgccttgaaataaaatgtgagagtattctggtactctgtgttccagatgcatgaaattgggtgaggaataacccctagtctggaatctttgtgaagcatagggttattgcaaggcaaatgggaactaacacatcttgccatttgaatcagggtctccagtttctagaaaaggcagacactggttgggaccaaagtctccatggcacatgactgaagactggtggtcgtgtgtgtgcggagtccacrgaagcctcggggaggtggagctgctccttccattccgtcaggacgtgatctgaaaacatgtagagaagatgagttgaggacagcttttctaaggcaatgtgatgtctttgctttcttatttctctttctctgcgttgttagttttgaagagtggaggagctaggggctccagaaagaatcttacacatgtgttgaagacattgatgtcatagggagcggggagctgcattcccttctgggctgttactgctaaatctcagtatgaacagaccaggcggaaagcttggtggccaagcagtctgtgtgcttccccgctgatggagaacgttgcgttgttcacaatagggcctcatgggtgtagccgcatggcagacccatggctggcgcagctgcctgttgccgtctgtcttcagtaactgctgctctgttaactgttctattctgatactacgcgtgttgttttttacaacaggtatgtttttgtttcagaaatatgtattgcttttctcatattttttgcaaattgtattgtcaacatgggtcatttaaagtcctgtatgaaccataacctgctgtggtacctttgtacatgtttgattctgtattctttattccagtgtggcatatgtgcccctctgtatcttttgagaagtgcggaataggttgcttctaccacctgttcttaatgtaacagtaaaagttttcacatttttctcagaaaaaaaaaaaaaaaaaaaaaaaaaaaactcgag

SEQ ID NO: 2289 - DNA, 2220 bp, Homo sapiens
gaattcggcacgagagaaaatccaactgagtttcggcctaagagtactcttgagggtcaattgaatgaatccatgtttcttctcagttctcgtcctactcccagaactagcactgcagtggaagtaagtcctggtgaggatatgactcactgttcaccacagaagacttctcctctgaccaagattacaagtggacacctgagtcagcaggacctggaatcccagatgagagagcttatctacacggactcagatcttgttgtcacccccattatcgacaatccaaagataatgaaacagccaccagttaaatttgatgcaaaaatattgcatctaccaacatattcagtggataagttattatttctgaaagatcaagattggaatgactttttgcaacaagtgtgctcgcagatcgactccactgagagagcatgggggcctcccgagccaagctgaatctcctttgctatttgtgcgtggtggctggtcaccaggaggtggccaccaggctcctccattcccccctgttccaattgctaatccagcatttgcggatagctccaaactgggatatacgggccaaggttgctcacgtgattggtttactggcttcgcacacaactgagctccaggaaaatacacctgttgttgaggcaattgttctcttaactgaattaattagggaaaacttcaggaacagcaaattaaaacagtgccttttaccaacccttggggagctgatctatcttgtagccacccaggaagaaaaaaaaaagaaccctagagagtgctgggctgttcccttggctgcatacacagtgctaatgaggtgccttcgggaaggggaagagcgtgttgtgaatcacatggcagcaaaaattattgaaaatgtctgtaccaccttttctgctcagtcccagggctttattacaggagaaataggacccattttgtggtacctattcagacactccactgctgattctcttaggataacagcagtatcggccttgtgtagaatcactcgccattctcctactgccttccagaatgttattgaaaaggtgggactgaactcagtaataaactccctggcctctgccatctgcaaagttcagcagtacatgttgaccttattcgctgccatgttgtcctgtgggattcatcttcaaagactaatccaagaaaagggttttgtctccacaattatccgtttacttgacagcccctcaacatgcattagagcaaaagccttcctggttcttctatatattttgatttataaccgtgagatgttgctgctcagttgccaagcaagactggtgatgtacatcgagagagacagcagaaagaccactccaggcaaggagcagcaaagtggcaatgaatacctgtccaaatgcctggatcttctcatctgtcacattgtgcaggagctgccacgaatcctgggtgacattcttaactccttggctaatgtttctggacgtaaacacccatcaacagttcaagtgaaacagctgaagttgtgtctccccctgatgcctgtagtgcttcacctcgtaacttcacaggtatttcgacctcaagttgtgacagaagagtttcttttcagctatggaactattcttagtcatattaaatctgtagactcaggagaaacgaacatagatggagccataggactgacagcatcagaagaatttatcaagatcacattgtcagcttttgaagcaataatacagtatcctattttattgaaagactatcgctccacggttgttgactatatactgccacccttggtgtccttggttcaaagccaaaatgtggagtggagactctttagcttgcggttgctctcagaaaccacatctctactcgtgaaccaggagtttggggatggcaaggagaaggccagtgttgattctgacagcaatcttctggctctcattcgagatgtcttacttccccagtatgagcacattcttttagaacctgacccagtaccagcatatgctctgaaactgctagtcgcgatgactgaacacaacccaactttcacaaggtactggaagttcaaatttctttttcttgtgtctcacctctaaaatgaattttatgtgttgtgaaaatgttattaaagatgagattccaaaagaaaaaaaaaaaaaaaaaaaaaaaaaaaaaaaaaaaaaaaaaaaaaaaaaaaaaaaa

SEQ ID NO: 2290 - DNA, 1721 bp, Homo sapiens
ggcacgagcaaaagatgaatttgaggagcgagcaaaggctattattgtagaatttgcacagcagggtttgaatgctgctttgttttatgagaataaagatccccgcacttttgtgtctttggtacctacctctgcacatactggtgatggcatgggaagtctgatctaccttcttgtagagttaactcagaccatgttgagcaagagacttgcacactgtgaagagctgagagcacaggtgatggaggttaaagctctcccggggatgggcaccactatagatgtcatcttgatcaatgggcgtttgaaggaaggagatacaatcattgtgcctggagtagaagggcccattgtaactcagattcgaggcctcctgttacctcctcctatgaaggaattacgagtgaagaaccagtatgaaaagcataaagaagtagaagcagctcagggggtaaagattcttggaaaagacctggagaaaacattggctggtttacccctccttgtggcttataaagaagatgaaatccctgttcttaaagatgaattgatccatgagttaaagcagacactaaatgctatcaaattagaagaaaaaggagtctatgtccaggcatctacactgggttctttggaagctctactggaatttctgaaaacatcagaagtgccctatgcaggaattaacattggcccagtgcataaaaaagatgttatgaaggcttcagtgatgttggaacatgaccctcagtatgcagtaattttggccttcgatgtgagaattgaacgagatgcacaagaaatggctgatagtttaggagttagaatttttagtgcagaaattatttatcatttatttgatgcctttacaaaatatagacaagactacaagaaacagaaacaagaagaatttaagcacatagcagtatttccctgcaagataaaaatcctccctcagtacatttttaattctcgagatccgatagtgatgggggtgacggtggaagcaggtcaggtgaaacaggggacacccatgtgtgtcccaagcaaaaattttgttgacatcggaatagtaacaagtattgaaataaaccataaacaagtggatgttgcaaaaaaaggacaagaagtttgtgtaaaaatagaacctatccctggtgagtcacccaaaatgtttggaagacattttgaagctacagatattcttgttagtaagatcagccggcagtccattgatgcactcaaagactggttcagagatgaaatgcagaagagtgactggcagcttattgtggagctgaagaaagtatttgaaatcatctaattttttcacatggagcaggaactggagtaaatgcaatactgtgttgtaatatcccaacaaaaatcagacaaaaaatggaacagacgtatttggacactgatggacttaagtatggaaggaagaaaaataggtgtataaaatgttttccatgagaaaccaagaaacttacactggtttgacagtggtcagttacatgtccccacagttccaatgtgcctgttcactcacctctcccttcccaacccttctctacttggctgctgttttaaagtttgcccttccccaaatttggatttttattacagatctaaagctctttcgattttatactgattaaatcagtactgcagtatttgattaaaaaaaaaaaaaaaaaaaaaaaaaaaaaaaaaaaaaa

SEQ ID NO: 2291 - DNA, 2267 bp, Homo sapiens
gggtcgacccacgcgtccgcccacgcgtccggaaggctttgggcacagaccacacaaggatctatgggcaagcaaaaatgaaaacgaagagattttggagagaccagcccagcttgcaaatgcaagggagacccctcacagcccaggggtagaagatgcccctattgctaaggtgggtgtcctggctgcaagtatggaagccaaggcctcctctcagcaggagaaggaagacaagccagctgaaaccaagaagctgaggatcgcctggccaccccccactgaacttggaagttcaggaagtgccttggaggaagggatcaaaatgtcaaagcccaaatggcctcctgaagacgaaatcagcaagcccgaagttcctgaggatgtcgatctagatctgaagaagctaagacgatcttcttcactgaaggaaagaagccgcccattcactgtagcagcttcatttcaaagcacctctgtcaagagcccaaaaactgtgtccccacctatcaggaaaggctggagcatgtcagagcagagtgaagagtctgtgggtggaagagttgcagaaaggaaacaagtggaaaatgccaaggcttctaagaagaatgggaatgtgggaaaaacaacctggcaaaacaaagaatctaaaggagagacagggaagagaagtaaggaaggtcatagtttggagatggagaatgagaatcttgtagaaaatggtgcagactccgatgaagatgataacagcttcctcaaacaacaatctccacaagaacccaagtctctgaattggtcgagttttgtagacaacacctttgctgaagaattcactactcagaatcagaaatcccaggatgtggaactctgggagggagaagtggtcaaagagctctctgtggaagaacagataaagagaaatcggtattatgatgaggatgaggatgaagagtgacaaattgcaatgatgctgggccttaaattcatgttagtgttagcgagccactgccctttgtcaaaatgtgatgcacataagcaggtatcccagcatgaaatgtaatttacttggaagtaactttggaaaagaattccttcttaaaatcaaaaacaaaacaaaaaaacacaaaaaacacattctaaatactagagataactttacttaaattcttcattttagcagtgatgatatgcataagtgctgtaaggcttgtaactggggaaatattccacctgataatagcccagattctactgtattcccaaaaggcaatattaaggtagayagatgattagtagtatattgttacacactattttggaattagagaacatacagaaggaatttaggggcttaaacattacgactgaatgcactttagtataaagggcacagtttgtatatttttaaatgaataccaatttaattttttagtatttacctgttaagagattatttagtctttaaattttttaggttaattttcttgctgtgatatatatgaggaatttactactttatgtcctgctctctaaactacatcctgaactcgacgtcctgaggtataatacaacagagcactttttgaggcaattgaaaaaccaacctacactcttcggtgcttagagagatctgctgtctcccaaataagcttttgtatctgccagtgaatttacygtactccaaatgattgctttcttttctggtgatatctgtgcttctcataattactgaaagctgcaatattttagtaataccttcgggatcactgtcccccatcttccgtgttagagcaaagtgaagagtttaaaggaggaagaagaaagaactgtcttacaccacttgagctcagacctctaaaccctgtatttcccttatgatgtcccctttttgagacactaatttttaaatacttactagctctgaaatatattgatttttatcacagtattctcagggtgaaattaaaccaactataggcctttttcttgggatgattttctagtcttaaggtttggggacattataaacttgagtacatttgttgtacacagttgatattccaaattgtatggatgggagggagaggtgtcttaagctgtaggcttttctttgtactgcatttatagagatttagctttaatattttttagagatgtaaaacattctgctttcttagtcttacctagtctgaaacatttttattcaataaagattttaattaaaatttraaaaaaaaaaaaaaaaactcgagggggggcccgtacccaac

SEQ ID NO: 2292 - DNA, 2158 bp, Homo sapiens
gagattttggagagaccagcccagcttgcaaatgcaagggagacccctcacagcccaggggtagaagatgcccctattgctaaggtgggtgtcctggctgcaagtatggaagccaaggcctcctctcagcaggagaaggaagacaagccagctgaaaccaagaagctgaggatcgcctggccaccccccactgaacttggaagttcaggaagtgccttggaggaagggatcaaaatgtcaaagcccaaatggcctcctgaagacgaaatcagcaagcccgaagttcctgaggatgtcgatctagatctgaagaagctaagacgatcttcttcactgaaggaaagaagccgcccattcactgtagcagcttcatttcaaagcacctctgtcaagagcccaaaaactgtgtccccacctatcaggaaaggctggagcatgtcagagcagagtgaagagtctgtgggtggaagagttgcagaaaggaaacaagtggaaaatgccaaggcttctaagaagaatgggaatgtgggaaaaacaacctggcaaaacaaagaatctaaaggagagacagggaagagaagtaaggaaggtcatagtttggagatggagaatgagaatcttgtagaaaatggtgcagactccgatgaagatgataacagcttcctcaaacaacaatctccaccaaggaacccaagtctctgaattggtcgagttttgttagacaacacctttggctgaagaatttcactactcagaatcagaaatcccaggatgtggaactctgggagggagaagtggtcaaagagctctctgtggaagaacagataaagagaaatcggtattatgatgaggatgaggatgaagagtgacaaattgcaatgatgctgggccttaaattcatgttagtgttagcgagccactgccctttgtcaaaatgtgatgcacataagcaggtatcccagcatgaaatgtaatttacttggaagtaactttggaaaagaattccttcttaaaatcaaaaacaaaacaaaaaaacacaaaaaacacattctaaatactagagataactttacttaaattcttcattttagcagtgatgatatgcataagtgctgtaaggcttgtaactggggaaatattccacctgataatagcccagattctactgtattcccaaaaggcaatattaaggtagacagatgattagtagtatattgttacacactattttggaattagagaacatacagaaggaatttaggggcttaaacattacgactgaatgcactttagtataaagggcacagtttgtatatttttaaatgaataccaatttaattttatagtatttacctgttaagagattatttagtctttaaattttttaggttaattttcttgctgtgatatatatgaggaatttactactttatgtcctgctctctaaactacatcctgaactcgacgtcctgaggtataatacaacagagcactttttgaggcaattgaaaaaccaacctacactcttcggtgcttagagagatctgctgtctcccaaataagcttttgtatctgccagtgaatttaccgtactccaaatgattgctttcttttctggtgatatctgtgcttctcataattactgaaagctgcaatattttagtaatacttcgggatcactgtcccccatcttccgtgttagagcaaagtgaagagtttaaaggaggaagaagaaagaactgtcttacaccacttgagctcagacctctaaaccctgtatttcccttatgatgtcccctttttgagacactaatttttaaatacttactagctctgaaatatattgatttttatcacagtattctcagggtgaaattaaaccaactataggcctttttcttgggatgattttctagtcttaaggtttggggacattataaacttgagtacatttgttgtacacagttgatattccaaattgtatggatgggagggagaggtgtcttaagctgtaggcttttctttgtactgcatttatagagatttagctttaatattttttagagatgtaaaacattctgctttcttagtcttacctagtctgaaacatttttattcaataaagattttaattaaaaaaaaaaaaaaaaaaaaaaaa

SEQ ID NO: 2293 - DNA, 763 bp, Homo sapiens
gctgcaggaattcggcacgagcagaggccaagatgaaatctccaccgacagaccttgctggattttcccactcagtctgtgactattagattatacccctttgtccaattgcatttgtacacagttgttcatgcttcagtcatgcctattcaatgaaatttccatagaaggcccaagaggaaagagtttgaagagcttccagaaaacggaacatgtggaggttcctggaagatagcaaggccggagagaacattgaagctttgtgagccttccctcatacctttccctatgcatctcttcatctgcaccctttggaatatcttttgtaataaacccgtttcctggagttcagtaagctgctctaacaagtttatcaaacccaaggagggggttgtgggaataccaatttacaggcggttggttagaagcacaagttaaacaacctggggcttgtgattgacattggaagtgggggcagtcttgtgcgactgggcctgtggaatctgatgctatccccagagaaatagtcagaagacaaatggaggacagcaagctggtgttggctgaataattgattgcttgcttgctggtagggagagatccctacacatcttgtcatataagtcttatgttgattgctgtgatgtgagagtcagaggaaaaacagctggagttgtttttttttttcctaaccgtagtataaaatgtattcaaaatacaataaaaatattgctgaattaaaaaaaaaaaaaaaaaactcgta

SEQ ID NO: 2294 - DNA, 1134 bp, Homo sapiens
cggcacgagaaaagttccacaggaatagtttaagcatgatcctgagcacaaatttatttacagatttgttcatactctttttagtgctgcacagctaacagctgaatgtgcaacagtaactctggtttacttagaaaggcttttaacttatgctgaaatcgacatttgccccactaactagaaaaggattgttctgggagccactcttcttgcctccaaggtttgggatgatcaggctgtatggaatgtggactactgccagatcctcaaggacattacagttgaggacatgaatgaaatggaaaggcatttttcggagcttcttcagtttaatattaatgttcctgctagtgtttatgccaaacactaccttgaccatcgctccttagcagatgacaacctgaattttctatttgctcctcttagcaaagaaagagcacagaacctagaggctatttctagattatgtgaagacaaagacttgtgtggagcagctgtaagaaggtctttcagcgctgatcaacttcattggtattcagcactctaaagccatcctctcttaaagggagaaatgaggggttataatgtcacgggaccttcatctacaaagactggagaaataccacctttcctgctcaaaaaccagcaaaattagtgttttcatcaaaaggaaagatctcaaattcaagagacgcacggacaacaaggatcatactccatagaaaagaatggaaccttgtcaatgcaacaaaacactcttctgtcctttttaatgtaaacagagtcaccaaaaccactccaaagtgaaggctcccatcccacacacagatatttgcttacaatgtgggccagtaactgaactatgttaggttttttaaacaatagtttaaatttttagactttaaagacattaaccatataacttttatgtttcttccagtttttctccccctgctcattttgctgcatatgcctttagaatcaatgcagtattgcccttaaaacaagggactctaactaaagccacttaggagcagactgcagcattgttaggtattgaagggttcttcctccctactgttaccattaaagctgctagtcattggcaatcattttaaaaaaaaaaaaaaaaaa

SEQ ID NO: 2295 - DNA, 963 bp, Homo sapiens
ggcacgaggctgaatggccttttattaaaaatgtaagacattttaaataaaagaagttaaaaagtctgtggaagtattgagggtgagaatctctgctagctagatctctatattaagtgatgagataagctttattaaaaatgagaatcagttcatacttaacctaagcctgacagtgctgggcagagagtcctgctgtaccactaccaatggagccaggcaaggatgcctctctgctagacacagcacatatggacaaagccacaagctatggctcatcccaatagaatcttactagttccctggtaaggttagctataatgtcttctaactcacatcatttgcattaaaaaaagaaagaaacagatgatgactgatacacatgttggttggtagagctttcaggttcctctttccatgtagttgaggaaattcctcagcccattgtcacctcggatctcatgctgcaactccatccttagctcaacacccactggsccctgstttcaaactgttgctggtcttcaggtagagcaggttctgcagatcaaaggacatttttcactaaaaatctctgacatcagagacagagactacatatctataatgaacctttccgaaacctgtccattagaaagccacttctcagtacagaggtggaccttggagactttccaggattttcacatccatctgcgaagaggaaaagaactcctgaaactgggctgacttcataaccagtttaatttcacacatctcacctttctggagctgccttgtttttcccttcttgcatcactgcagagaaaattcatggacttcctaaaggtgagactctgacccattagtaagaaagtcttgctttatgttaagttggctttctctggagatctcctaactgctttataaacattctttcacacctccaaaaaaaaaaaaaaaaaaaaaaaaaaaaaactcgag

SEQ ID NO: 2296 - DNA, 1876 bp, Homo sapiens
ggcacgaggtggttggggcagggaggggaggaggaggagcttggcaagttatcttctccttccgtgaaacagagcactttaaagtgcttactttctttatcacttactttctcatattggccttccaggtatatgctcgtatgtcagaagtcttaggaataacagatgacaaccacgttctagagacgttcatgacaaaaatagtgaacacttcccttttcttggcatcagtgacaatcatagtctcagcgacttcaggtgtcgaacaaccttctacacagcgctcactcgccttctgatggtagatctgggtgaagatgaggatgaatttgagaatttcatgctgcctcttacagttgcttttgaaacagtattacaaatattcaacaacaactttaaacaagaagatgtaaagcgtatgttgatcgggctggcaagagatcttcgagggattgcctttgcactgaacacaaagaccagctacaccatgctgtttgactggatgtacccaacgtaccttccccttcttcagaatgctgttgaacggtggtatggagagccaacatgtmcaactcccatcttgaaacttatggcagaacttatgcaaaacagatcccagcgtttgaattttgatgtatcatctcctaatggaattcttctcttcagagaagctagtaaaatggtttgcacttatggtaatcagatcctgtcccttgggagcctctcaaaagatcagatttatccaatgaaactcaagggcatctccatctgctattcagctctcaagtctgccttgtgtggaaattatgtcagctttggcgtcttcaagttgtatggggacaaccattttgacaatgtactccaggcttttgtcaaaatgctgctgtcagtgtcccacagtgacttgctacaataccggaaactgagccagtcttattatccactcctggaatgtctcactcaggaccatatgagcttcatcatcaacttagagcctcctgtactcatgtatgttctcacatctatctcagagggactcactactcttgatacagttgtctcctccagctgctgtaccagtttagactacatcgtcacctacctcttcaagcacatagcaaaagagggcaagaagccacttcgatgcagagaggctacccaggctggtcagagactattacattttatgcagcaaaacccagatgtcctgcagcagatgatgtctgtcctcatgaacaccattgtctttgaagactgtcggaaccagtggtcagtatccaggcctctcctggggctcatcctgctcaatgagaagtatttcagtgaactgagagcaagtttgataaacagccagcccctccccaagcaggaggtccttgcccagtgcttcagaaacctaatggaaggagtggagcagaacctgtccgtcaagaacagagacaggttcacccaaaatctgtctgtattcagaagagatgtggcagaggcgttgcgcagtgatggcaacactgaaccatgcagtctcgacatgatgagctgacccgacttttctgaccatgtgcggagcagcctttatcaagagactcctgaaggtctgggtctcaggacagtgatgttggctagcccaggggaatgtatttttcaaaacatacaagcaacagcaaaagccctaacttcttatacgtctagcctaattataagaatttctaacagtaccagtgtaaattcagtcttttctctgaaaagcaaaggatgtgttttcagtctttctatcaaatattatctttgttctcctaatgctctgaaaggatgtagaaacaatatttaaccaaagaacgtaataaaccaggtttgcacctaagtgtgtactagttta

SEQ ID NO: 2297 - DNA, 2202 bp, Homo sapiens
ggcacgagcttaaaagcaatggtgaaaggataacctcgatgatgtaaatccacccaaagatactgttctacaaaaagtagggtgtggacgcaaacctgtgacagcagagggggacgacttcacactcactgcctcatgtggcccctttcccagtggcagctggtgacactaacgattgctactcggttcacttgcccagatgtcttcatatgatgagcaaggccagaagcaaggctagattcgaagtttctgacaccatttccagtttgcacaaaagtcagtattttatcttaaagtggcttgatttccaatagctgaacttgggcagaaaacagcaggccaatgttcctatgtggtttctttgttgttgtttttgtttggggtgggggcaagtacagggtaattcatgagcaagacatttcactgctgtcgaagtctctgggatcccgctgtgggtctgagatggcctgggaaggaccttgtggacaatggttttatctgttctttttgtcactgttaatttctgggctgctgaggttctagaatagaagggctgccaaatgaggtttgctgcaggaggaaagtttaatcccccattccaaaagtccaggccaaatggtgggcttagcctctttgaaaagttctgccttgcccccacaggtgggcacatcctgtgtctcattcaccatgatgcttcctgagggtgttctagaagcccgttccccagtggctgtatccagcctttccttgcatcatcttcctcttgaaggtgaggaagtgaaaactacagacctcccccggacagcccactctctatcacgagcctaacccgcgggaggcggaagagacatccattcgagaactgaagcggcctccgggatgaggtcagaggccccacctgattttcctggtggtggtatccaaaatcttcagtaactaggaaggaaaccagggtctcatggtttaaaagactttgaagcaggaatgttgcatttgacgcctttaaaactacctttttgctgttgggaggagtcgggggcgagccttagcagctgcaccgccatccccatgctggttggtgctgccctgcctctcgtgccgggtgttgcttcagcccagagccagagggctgggtcccgggtcctccacaggtgaccccggtggacacacgcgttcccatcctggcctccgtctctgcttttccacttctacctgcgtgtgggtttgccgccttgtcatcggttgtgtgagtgtcgcagacctttccagagctccggttcactctttccaaacaggcctccctgtcggtggcactgcactcctagaaccttcagtttctacgatggtttgtttggtccttttgaaccaccccaaagaactcaacatggcaaagcaaatggtaaaagcttcccgactgttctactttgggtccgcgcgaagccccactcacgtgtgatctgtgttgcccctctcggtggtcccaggcgatccagccatgccccctgcccctctgcccagatgcttcaggggcccggcttttcaggcttgccctcaccagcggccgtcagccgacactcagggatgtagctaacaccactccgccagtgctttcagtaggaagagctgaggctgcctgggaggcccggggcgaccggaaaagggctctctcaagttctgaaaagagaatctgccaccagatcgaatttcgacccctgagcttgttcggacgtatggtccaaattcagattaaggtggtcacccaacccgagatgtcaggaaaggccttctgcagagaaaatgtccccccacccgccatctgcagccaggtgtgtgccacacggcagccttcccgaaacatagtatggattttaaaaatgtgtttatttttgtttctcaaccactttataacgtatttttttaatttattttgtaatgtcttgttttgaagtattgctgctatccttgttatccttcccactgtttttatcactgattttattttgtgaaagttgtacactaatgttctatgtcaaaatcaaaaagtatttaaatggaaatactagttctatttaatgtggttatggaaccagctggaaacacaaaacaaacagtgattgtacagcaggctgggcccaggaggtcaggttcattttgttacatatgcaataaactcacgactttaaaaaaaaaaaaaaaaaaagg

SEQ ID NO: 2298 - DNA, 1316 bp, Homo sapiens
ctatgtgcgtttgctgtccatgttgtacatggcagagatgttgtcctcagttatgctcctgtctgtgctgcaagttcatcttcacctcagagcggaactgcacctgcttcccctgcccttacaaagatgagcggaactgccagttctgccactgcacctgttctgagagccccaactgccattggtgttgctgctcttgggccaatgatcccaactgtaagtgctgctgcacagccagcagcaatctcaactgctactactatgagagccgctgctgccgcaataccatcatcactttccacaagggccgcctcaggagcatccatacctcctccaagactgccctgcgcactgggagcagcgatacccaggtggatgaagtaaagtcaataccagccaacagtcacctggtgaaccacctcaattgccccatgtgcagccggctgcgcctgcactcattcatgctgccctgcaaccacagcctgtgcgagaagtgcctgcggcagctgcagaagcacgccgaggtcaccgagaacttcttcatcctcatctgcccagtgtgcgaccgctcgcactgcatgccctacagcaacaagatgcagctgcccgagaactacctgcacgggcgtctcaccaagcgctacatgcaggagcacggctacctcaagtggcgctttgaccgctcctccgggcccatcctctgccaggtctgccgcaacaggcgcatcgcttacaagcgctgcatcacctgccgcctcaacctgtgcaacgactgcctcaaggccttccactcggatgtggccatgcaagaccacgtctttgtggacaccagcgccgaggaacaggacgagaagatctgcatccaccacccatccagccgcatcatcgagtactgccgcaatgacaacaaattgctctgcaccttctgcaagttctctttccacaatggccacgacaccattagcctcatcgacgcctgctccgagagggccgcctcactcttcagcgccatcgccaagttcaaagcaggtggtaacaccagatggacatgggaagaaccgagctaagtggggcctgctgaagaatatccagtctgccctccagaagcacttctgagccccttcagagcaggaaacaacctcagactcatcacaaagtagacatatacacacacatatatgtatgtatatttttctcaccacattcttcaaggaggttgtagacaaatgtttccatgacctctcagctttccaacaggaatcttgtaagagctaataaaaggaaatacctgaaaaaaaaaaaaaaaaaaaaaaaaa

SEQ ID NO: 2299 - DNA, 1167 bp, Homo sapiens
ggcacgagtgtgtttgtatttaattagtaaagatgttcatctcaccccattatatcatgatgtacttgatgccaacatggcttataactcataatgttaaccttgatcatttagttaaggtagtgtttgccaggtttcttcactataaagttaatatttttccatttccatactattttctttgaaagtgagtcattgtaattccataccacaaccaaaaggacaggattaatctctatctcctagagaggagtgtctacatatattctttagaattcttttttttttttttttgagatggagtcttgctctgtcacccaggctggagtgcaatggcgtgatctcggctcactgcaacctccacctcccgggttcaagcgatcctccatgcctcagcctcctgagcagctaggattacaggcacctgccacagtgcccagctaatttttgtatttttagtagagacagggtttcatcatgttggccaggctggtttcgaactcctgacctcaggtgatccgcctgccttggcatctcaggttgctgggattacagacgtgaatcactgcgccaagcctagaattcttctataagataaatttctccctttatcacttaagtatttattcaataatacttatatcattatggactcatggatatttattttactctctgaattataatccaatactatcactgttttgttggtttttttgggtttttttgtttttgtttttgtttttttgctgaaattgttccagctttggccactggggaactctttccaattgcctctggtgtccttttgacctctctcctacttttataattttcttttttttttttttttttttttttagcactataagatgttccagactcgtcttgcgttttccctcctttaattggaaatggtatttagaaactaagatttgtgaactggtcatgcttgttgttactgtggtgtcactatgtgttaggctgttcttgtattgctataaagaaacacctggccaggtgccgtggctcatgcctgtaatcccagcactttgggaggccgaggcaggtggatcatgaggtcaagagatcgagatcatgctggccaacatggtgaaaccctgactctactaaaaatacaaaaaaaaaaaaaaaaaaaaaaaaaaa

SEQ ID NO: 2300 - DNA, 1436 bp, Homo sapiens
gaaaacctgggcacaaaattgggttgactgtgaatcattgtgatgcctgatcactctcctgagacacccaccatcattggtactggttgcctgctcttgacaccggaggccactttgtgtacttagcagttagaaaggtgatgtgtgaggcccggcagctgttggtgttacagctattgtgtgggaaacaaaagccattctgttctgttccccagcctgcctttgtatcacggatagaggagctgtttcataaatgagatgagttatgctttaaaccatacaaacagaaaactaacattggaacctaaaattactgtcaatgccaagatcattgtggttggtgcatccagtgttggaatttccttcctagagacattggtattttgaatcttttgaagagcctgtaatggcactagaaaaatgcttactggagtcatggatgacagtgactgaaagcagcccagctggtgtccccgcgaccctccgtgtgactagagagaaacactgattcataggaagcaccggtgggcactggaaagcccgggttccccttgtcttccacttccaccactcagaagagttttctcgaaaactgaccaaatcatccagcaaaagatgcagcctcagactttcagcctagacactgatcccctcatctggttgaatgtgtcgaggtaactaagaatagcttggaccaagcagggcatgtttctaaagctgcaattgtggcaatgaccacaactcctgttatcgggccgtgcagttccgcacaatatccggcacagctgtgggctctggcagcagccagcctagcgctggcggcttaattaggctttttatctttacatttgtctgaggacatctgaaaccttcagtgtggcctgtcactaattaggtgactaattaaatagtcagtgcttccttgctgatctcagagctcaaccgcaatggacaggtttgtgattgtgactccccgtcctgtcggtctctgcacgtgtgcgcctcgcaattgccctgttcattgcgctgtgcaaaaacggcatgggagcgaggcccagggcatgtgcagggccgtcctccgatgtgcccaagcagcaggcagcacggacatccacaggggggcatatgggagatggacatccacagggcatacgggacatcagttctggtgcagaggctggtctggtggccagagcagaggggacggtggaaggagctttacctgccaggctcagagtctcagtctccccaggcagcaagagttgacattctgccaccagagaataaggatccagaactcaccctggtgtcactaatcacaatggggtttcctattcgactccaatatttaaatgtaattaatgttaaataaaagcaccttcatttactgaaaaaaaaaaaaaaaaaaaaaaaaaaaaaaaaaaaaaaaactcgag

SEQ ID NO: 2301 - DNA, 2593 bp, Homo sapiens
  SITE (2583): n equals a,t,g, or c
  SITE (2589): n equals a,t,g, or c
  SITE (2592): n equals a,t,g, or c
gggaaaacgtctatttacgttgaagttttaaaaatgcctaccccaggagggaaggaacaccgttattacctctctttggaatgttggaaaggaatggtccgtgtggccaaactcaggctctgaattggttttgtctgaagatgaaaaaagtgacaatgaagataaggaagagacggaattgggcgtcatggaggatcagcgtagtataattcttcatctcatttcacaactcaaacttggaatggatttgaccaaggtggtgcttcccacctttatcctggagaagcgatctttgctggagatgtatgcagatttcatggcgcacccagacctactgctggccatcaccgctggggccacaccagaggagagagtcatttgcttcgttgagtattatctcacagcctttcacgagggccgcaagggcgctttagccaagaagccctacaaccccatcataggcgagacatttcactgctcctgggaagttcccaaggacagggtcaagcctaagaggactgcttcccgctctcctgccagctgtcacgaacacccaatggccgatgacccttccaaaagctacaaactaaggtttgtggctgagcaagtgtcccatcacccacccatctcctgcttctactgtgagtgcgaggagaagagactgtgcgtcaacactcatgtatggaccaaaagcaagttcatgggcatgtccgtgggggtctctatgataggggaaggtgtgttgaggctcctggaacacggggaggagtacgtattcaccctgcctagtgcctacgcccggtccattctcaccatcccrtgggtggagctcggaggaaaagtcagcatcaactgtgccaagactgggtactcagcgacagtgatattccacacgaagcctttctatggagggaaagtccacagggttaccgcagaagtgaagcacaacccaaccaacaccattgtttgtaaagcccatggggaatggaatggtactttagagttcacctacaacaatggagaaaccaaagtcatcgacacaaccacactgccagtgtatcccaagaagatcagacctcttgagaagcagggacccatggagtccaggaacctctggcgggaggtgacccgatacctgcggctgggggacattgacgcagccaccgagcagaagcggcacctggaggagaagcaacgggtggaggaacggaagcgcgagaacctccgcacaccatggaagcccaaatattttatccaggagggcgatggctgggtatacttcaatcccctctggaaagcacactgatggggtggaggtgcagagctttccagtatagccctgtttttgtaggaatattaaagtagtagagtatcagggttttgttggcattcactgagaccttgtattagcatccaagaaatgatgagagagagagaaattatatactatgaaaagtgcacccccacactctgctagaggaatgaatttattcaagagccattcggggcacgtgtgtgtacacaccgtatacgttcacacacatgcactatgtaaacatctgagtatgattacacatttaaatactgcactcaccaaggttaaagtgggtaatcataagctcctttttatcaatgaagtttgaagtttttctatttttcactttgccaaaaatgttttacactcacaaagatattctcacttagtcaactcctgtcaaaatgaaggtgaactggcatggcccgatcactgtccataagggagaaagtggctcattcctggtagaagtatgggtggttatcatttcaaaattattgtgattctcacctccctccccacctcagtgttttgtctgtccgcgcccaagaaagataagcaagtatttcctgctggatgggggttggcaggaagctgttaaagatttatgccagagccttgcaggatggagcacctctgggacaactaagagccaaggcccaccaaggagttttccacccgtctctcatggtcacagcgctagtcattcatttttgagaagttgcttcttttacatcagaaaaccagtcaatcatatggagacttcttttgtgatgaaaaagggctttagaagttaaatacatgcatgcacatgaaaacatgcacaaccacagcctcaatcttgtatttagtttgggggaaagagaagagaatttcctgkggattattttttcctcaagtgcacctctctggttaacccaaactctgcaagaaagcactgtgactaaaacatacataacgcctgcataaatattccatggtttcagttaaatttcagtttttagcctttacacatgaggtcaaaggagtgacgaaaatacaaagcaaggaaaaaatgaaatatctggtttttgctgaatgcttaatttattttttactgtgccactccaatatttatcaaatccaaatagcatgaatgcttctctgtagtaatactaattttgtgccttttgtctgctttcttaagaccagttgttcacactttgtagatattagacaaatatatttcgattgaatacaaaaaaaaaaaaaaaarggggggccgcccnaggggnccna

SEQ ID NO: 2302 - DNA, 673 bp, Homo sapiens
  SITE (245): n equals a,t,g, or c
gcggcacgaggttacttgggaggctgaggcaggagaatggcttgaactggggaagcagagcttgcagtgagccaagatggtgccattgcactccagcctgggcgtgacagagtgagactccatctgattgtaaagcatctagtacagtgtacagtgccttggaaatgataggtatggaataaatggtaattatttttatattatatatattatgtattcctgttattaagtgtagagttttatgnagtataatttgattttattaccttcttttttacaagctgttttctcagtatttttcttggatgggatgacgctaggctggaaagtttttttcatcactatgattttataaaacaakkttttctatgarcctttacttacttgactggattggactaaaagcactgatcagaggccacgacataaaaattcagtccctttgtccttccccgtgcctcccaaagttactttaaratccttasaatatttctttaaatattttatagacaaaaaatttaaagactatctgtattgcaaaattaaactatttctttaatgaatatattgcttattttaagttccaaaggtgaagtctttaagaataaaacattaccaactcctgcttttatatgtaarmaaaaaaaaaaaaaactcgagggggggcccgaaa

SEQ ID NO: 2303 - DNA, 1051 bp, Homo sapiens
ggcagaggtgagaggtgacaacgtgctggcagccctcgctcactctcagcgccttctctgcctcggcgtccggtctggccatgcttgaggagcccttcagccctccactgcgctgtgggggcccctctctgggctggccgaggccggagccggctccctctgcttgcagcccttcctctgacgtgcacaggatatgaaaatgtctgatagtgttgtggctgcagtgagacctgggagtggcagtttctttcactgcagttgtctgtccaaagcgaagtgaactagcaagtctcttacaaaagggcaagctctgaactgcgcacagtttttctcagtgggagaaatcttctgtgtccttggatgaagacttactcagtaaattactttatgatcactgatagctctgtggargtctccaatgtctcctctggamtgstataccagccacctgacagccatcctgcctccctcatccctctactacagtacgtactctaccagtactctgagccatctttcacagagttagtttgagcattccctagctcaaaactctcccattgcttcctgttgcactgagaattaaatctaaagacttcacagagtccctcaaggccctacagactcttggtccccatgctgcccctctgactcacctcctccctaccactcttgccttcctttctcatccccgtcactttggcccacttgatgttctttgaacacacacatctggctatctccccaagtctttgcaattgcttaaaccactcttcccagatacccagaagacttgctttctcattttcttaaattatctctgtattcaaatatcaccccctcaagaggtctatcctgactttctctctcaccttctccttttctttatgatatttagccataattcgccccccatacacatgcatttgtttattcatctgttggtttattgtctgtctcctcactaaaatgtaattactccaaaatgtaatttccacaatagcaataaatttatctttttattttaaaaaaaaaaaaaaaaaaactcgag

SEQ ID NO: 2304 - DNA, 743 bp, Homo sapiens
ggcacgagcctacgccctgcgtgcgctgtgctgactacctctccagcatgggaggcttccagatgagcagacacccgaatcccagcgggagcccgtcaaaaatggagatttctgccgtcactctgggactcttaattcggtccgtctggggtggggcccaggaatctgcatttctgataaggtcacccgctcccctcccccattattccagtgcaaagaggtcctaggcccagtgcccatcagctcctcaagacaggaattactatatctttttctgacaactgttaactttgtacaaggttagcaaataaatccaggaatgaatggaatcttaaaactcgtaaaacaacaatgaaaggtaattcacacaaaagatacaaaatccaaaattgtcaaaaaagatacagggaaaagtaaacatccatgttattcctatagtccagccttgcaattctctccacaagccattagtggtaatggtttcttggaaatattttcagatttwtttwgcccatatcagcatttttaacatcttttgtcataaatatgtcgtaaataacaatgttattgatacatatccttttaaaaacacaatggtagtatgctatactggcttgttttacttwtgaatatatgtagrgctgcctcgttccattgtaaaaaaaaaaaaaaaaaaaaaaaaaaaaaaaaaaaaaaaaaaaaaaaaaaaaaaaaaaaaaaaaaaaaaaaaaaaaaaaaaaaaa

SEQ ID NO: 2305 - DNA, 429 bp, Homo sapiens
ggcacgagcgccgcttggccctgctcggcctgcagcccgctccccgcttcgcccactcggggcccccgcgccagcggcccctgtctgccgcggaaatggctgttggacttgtggtgttttttacgaccttcttaacaccagctgcatatgtgctaggcaacctgaagcagttcagaaggaattagatggaagatgatgttgaacagctgttaacgtccaaaaaactttcagaaaaagctgtgtttttgttaacgagcaaaattgcctagttgagttgatgcaaccattgtggtattcactttcctcatgtttatgatgaatattttgcacttttttagtactgtgcattatatagatgtatagtcaaaaatgttctgcttaagtgttaaataaaacggaaacacttattcgtgaaaaaaaaaaaaaaaa

SEQ ID NO: 2306 - DNA, 1471 bp, Homo sapiens
ggcacgagttttttttcacattggaaattgggtgtaattgcatctcaagataggcataagcagagcttagactggggccccccagtggtatagtggtacaagtggttgactcacacacagcacctccactatgttttggccattagtcttcctcgttgactctggaacaacattgcctccacagcaaaggacttcatagtaaatttggtttataatgcagctgtattcaaaaatgggagagctagggaactaggatatgggaaaaaggcacagaggaaaacgtatggtttgaatgaataaggctcctacgactgtctcagcttctccacagcagccaggacgcccttttcactgctaaagcagtcctacctgaggcccaggggctgccagattgacccataaataatctccggcgcctcagatccagaagctgctgagcctgatcttagtgccttctcctttctctgtgtggccccccagcccctttccccactgccttgtgtccaaggccctttccttcatgtatccatggaggagagacaaaaatacacatcaataaaataagatagggaatccataaatagacattcagaagtatggccaacggatttatcttaaaaccaatggaggaagaagagtttcaataaatgttgtggacttccatttgtcaaagaccaaaacaaaggaaccccaaccttacatgtaatacaaacttaactcaaaatggatcatatatctaaatgtaaaatggaaagctataaaactgaaaacagactatctttacaacctaggcgtaggtatagtttttagacattacaccaaaagcacatgccgtaaaagaaaaaatagataaattggtggatttcattaaaattaaaaaactttttctctctgaaaaatcctgttaagctgggcgctgtggttcatgcctgtaatcccagcactttgggaggctgagttgggaagaaattaatagcttgaggccaggagttcaagatcatcctgggcagcaaagtcatacactcttgagggaagagagagaccttctcatattgttttatattgttttatactcagtacctgttttaagaaaaaaacaaggaagtgaaatcaaagacaggcagcccggcaccaggcctgaaaccagccctgggcctgcctggcctaaacctagtagttaaaaatcaacttacgacttagaacctgatgttatccgtagattccaagcattgtataaaaaaattgtgaaactccctgttgtgttctgtaccagtgcatgaaacccctgtcacatatcccctagattgctcaatcaatcacgaccctttcatgtgaaatctttagtgttgtgagcccttaaaagggacagaaattgtgcacttgaggagctcagattttaaggctgtagcttgccgatgctcccagctgaataaagcccttccttctacaaaaaaaaaaaaaaaaaaaaaaa

SEQ ID NO: 2307 - DNA, 1154 bp, Homo sapiens
ggcacgagaatttgcaggcccaaggaaaattccagaaagcttggaaccactttaccattgccatagatactgatccaaagaactacctagcctatgaaggaagagctgtggtctgtcttcagatgggtaataattttgctgcaatgcaggatattaatgctgccatgaagatcagtactacagcagaattcttaacaaatcgtggggtgattcatgagtttatgggccacaaacagaatgcaatgaaagactaccaagatgcaattactctaaaccccaagtactcgctggcttactttaatgcaggaaatatctactttcaccacaggcagttttcccaggccagtgactacttctcaaaagctttaaaatttgatccagaaaatgatatgttctcatgaatcgagctattacaaatacaatattaaagaaatatgaagaagcaaaagaagattttgcaaatgtaattgaaagctgtcccttttgggctgcagtatattttaatagagcacatttctactactgcttaaagcaatatgaactagctgaggaagaccttaataaagccctgtctttgaagcctaatgatgctctagtatataattttagagcaaaagttcgtggtaaaataggtctgattgaggaagctatggctgactataaccaagcacttgatcttgaagactatgcctcagttatatgattacatagactgtggttgctatagtagtttacacagctgttctctctgaaacggaaacatatttgttgtctaaaaggttctaccattttcattattgtattcgttatgcttagtcttccatataaccttctatgcattttaataaaatgtttgttatacattaattataaaacatatatcatttgctgcatatttggaataccttgagaactgaatttttccaaggttgcagaatctcaaggaaaatgtttcttaaggaattaaataggaatgtctcttaacatttaaaatattttctttaattctttttgaaataatactatacattgtagaaaaagtgtcattgaccttttcatcagtccttgctgacaatgtattaaacagtatacagattaaaaaataaacaaaccgatgactataaaaaactgaactcaaaaaaaaaaaaaaaaaa

SEQ ID NO: 2308 - DNA, 395 bp, Homo sapiens
ggaattcggcacgagcgagacctctaccaactgaaggtttcgtgagcgcactcctttgccaagatcttggtgaatagtctttcactgtgcaattttatcttagaaattgttttacgtttgatcatgattgtgcttggctggatgttttttgttggacttgtgtgttacatgggcacgtttccagagttgatggaaccatgtggaagggatataaatatcccccaggagggactccagtggaagtaagcaaggatgatcctggtgaagtaatgcagctgtgaagctcacctgaccagctgtacagttcctgttgttggtttcacataaagtaattgcacattaaaaaaaaaaaaaaaaaaaaaaaaaaaaaaaaaaaaaaaaaaaaaaaaaaaaaa

SEQ ID NO: 2309 - DNA, 975 bp, Homo sapiens
ggcagagtcaacggctcgcccagttatgcctccattttcctctgctgcatggccccaggagagattttaattagctttctaaccttggtccagattgcacatgcaaatggtagaggatgcaacacccccgcttgtggagctgccgcttgtgtctggcatgaaaattcacaagaagagaggaaatactgaggagaaaatggcagattgtgtttgctgaatttgattgacgargaagtcaccatgaaaatcacagtgaaccatttggaaagcaaactgccaaaaaaataatagttagtcatgctctcaggctggttgttttggctgttgtgggkttcttgcatttccagatgattgcaaagagctgtttctcaatttctgcaacaagtgccagctgaaattttggtaccagtttcattaaatatgtagaacaatttgagcctgagtgagttctgtggagcccatactacctgcgattcaagccagcaaccttggaatctccctgaacaatttctatggtgtccaatcacatttgcaatcactccccacactcagactgtgtatttttggctgctctccaagcccttgaggaaaacacttggagtcaatctcatccttttgatgcagtgctgagtaatgagagattttagaagatggaaaaaagaaaaatacattgcactctgaaacattctacataaaaatggaatgtgtggtcattagattaactcaggctttggacctcggggcataaaacccatttcctcttacaccagtctctgaagcttaaaggattcgttatttccagttgcaaatgccatcagaaaaggattgtttttctttctagtaccaccaagaatgtagtttaccattgtgaataaactgtcttaagctttccccgaataaaataaatacaaatgctcctcaacttaaaaaaaaaaaaaaaaaaaaaaaaaaaaaaaaaaaaaaaaaaaactcgag

SEQ ID NO: 2310 - DNA, 1158 bp, Homo sapiens
gatggaactaaaatttattatggtatgttccttaaagaaatggtcaaagggatgggaaggtcaggttgaaatcatatttcttcagactgataaagtgttttcattagagtccctcgttcatacgtgttgtctttgatgtttcttgctgttctactgctgattcttatgcttttcttaatattagtgtatcaccaagtatatatcagtcatggrgagaaaaaaataggtttgatgtaccaagggccttaaaatcacactgacctgatgaatcaaaattcacctcattgccaggacttggacctatatcgatggacacaattggtaacagcttccgaaagtcccacagctttgtaaccccacaggcatcacaggatgctatcatgtgacccctgggatcaaaaatggcatcatgatagaatgcmtgtgaccataaagtgactgctcamatwtaccctaggaagmcaaagcmgaaacagrgtcaaataaatttattacatttcatcattagacagtgctgagctaggrgaatcataggagatgttgtcagaagaaaagcggaggagcagatcatgtaggtcactggaaggacattagcttctatttgaataaaatgaaaatcctttcttgagactggccataggagtgactgatcagagtcacatgttgcaagaatcactctgttttaccatgtcgagattaaactataagagagcagagatgttcttgcatcccatatagacagggtcttgtctgcagagcttgtgagaagagtattggagaaaggaaaaaactcaatgctgttcacagaatctgtatgtccatacaaagtacatctgcatctttcactattaacatcccaaattttgctagttttatccagtgaggaggaagccacaaaattgccgcaggagtgccatgtgcaggaccacactgcgcggctgtgtccttcaaaggtcaaaatgcaatcgcctgtacatagatcccataatttaactgtagtgtcaccacttgaagtagccaatttgtcgccatagagcttccagcccagttgttccacttctgtgtaaattcagctgcaggatacagcctcctgatgtcccgggaaacactcaggtggcaggaggctgcacatgaccccacccacttttgcggcacgag

SEQ ID NO: 2311 - DNA, 754 bp, Homo sapiens
ggcacgagtcgggatcgggagagtccaccacgcctgcctgctcggctgagaatcgccatgccagctaaagggaaaaaaggaaaaggccagggcaagtctcatgggaagaaacagaagaaaccagaagtggacattctcagccccgcggccatgctgaacctctactacatcgcccacaacgtcgctgactgcctgcatctgcgaggcttccattggccgggtgctcccaaaggaaagaaagggagaagcaagtgacagcatttcacaacacatctctgttacagacaacaggacctggggaagagaagtcaggataacacaactgttgccagcaacatagactttactccagacgacttgagatgcaaattaagtgtgcttttctgtgatggtggaagatcaggaaatgcaccttacttcctctgttatgccagatatggttagccactttggttttttaggagctataggatgggaaaagcctgagtaattcctacacagtgtgctgaaattaatagaactttcagaaattattataattctgggtcaggattaaactttgctctcagaaggcagttctagttgcattaattgttttcttttgccaaagagcgtttgtcatttagagaagacacggcaagaaacactgggtttccttaggaacattcctctcttgggcaccatttccttttttttttttaatggaaaataataaatactttgtttctataaaaaaaaaaaaaaaaaaaaaaaa

SEQ ID NO: 2312 - DNA, 2908 bp, Homo sapiens
  SITE (1616): n equals a,t,g, or c
ggcacgagggcttttaaataaagatgttattcctttaaaatggtgggcttaccatcattgaagatgtcactcaggtggccttgtttgatcaaaacgccttttttaaaaaccaagctttaaaaacatgtttataatttcatgaagtacatatatattgttcccatagtcttcagctttaaaactataaatatgcccaaattttgttatttgccctactttaagtaggtttattgtgtttgttttttcagtacttgtttttctctgataagactcaggaattctgaaatgtgaaattgtctcaattctttctcttgtagcatgaatcaaatgtatttattaatagcacttatgactatagaatataatttggcatatgattcatattacatatgtattcrttttatttttaaaatagtttataaacttaatgatttttttttacaaatgaggttatagatattaatgcaaattttctggtaggtatctctttttttgctatgatgattccaacttatcagagacctcccatttgccttttcattacggtgaaagctttgccctcatctactaaagtacaaaggaattctttggaagcagattattctagtcttatgctagagatgaatttgatcattttaatgtgtgatctttttgctctatcaggtataattgttttcctttcctttataatgcgtaagttttctcacctttgagtaacagtaaagttcatttatatgtccatacctagaagaccagtgcaaatactttgagagcacctgggtctacaggacataattggcatctaaatcctcatttcttgctattagtaggaaaacagatatagtattgtaatacccttattctttttgaatcctaattactcatttcggttttttttctctcttttgaatctagttgctggttttcgtttaatgattttagtttaacaatcccaaccaacaatacatttgatttatttttttctgtctaacctgacaacctttttcttgtgcttcttgtttgttggttagtttttgtgaaaggaatcattgtttaagatcactgttttcatacttgttttacacttcacgtattttgaagtacatttatttactaagcatttgtgacttgaataatttcaccaaatgaatacattttggtagtttgtaatgagttcttctaattgttacactttgcttggtacttaacaataaatatgtaaaggtaaaagaaataattttctgtattctgccaatcttaattttatataataaatcatccatttttttcttaaaawartatggattgactgtttctaaaataccaatctgtggctgtggttttycttttcttcagcatttccagcatccaagtaaacaatagtcccttatagtcctgctacttgatgggtaaatttggttgctgggtttttaagttgcactcacaataaatcgtgcaaagcattgtgcatgccttatttactccatttttaatcctgcatcccagatttatggcagcaacacatatctacaggatacttttatgttgtccaaatattgctgtcagtgcatatgtacttataaaatgtctccactcatgtatatttatagaaatgnatcaaatttctcagactgttaaagtgcagtataaagttgcttaatgcacacttaaaaatgatatataatttctgaatcctatgaaatatgtgttcttttttaattctttgggagttttcttaagttttacatgttttttggtttattgttaatgattttgtttactctttgccaaattttgtcatgtaggttattttacaatagcacctttaaaaaaaatgtatatgctaatttactaagcatattcatgtccatttttatttgatcatctgatttgtgaaataacttgaaatttgtactgtttggtttgtgaaaataatattaccaaatctctgtcattagaatgtgtactttatgttcagaagtgactgtgggtttattcagagccagccattctctcccttgatgcactttgtaaccagctacacatgcttttaggtggcttttccctgatagggtcaagtatatgactataaaacatttttcttgtgaagctattaagttcattagttactcttatttccccttgttgtaactaagtggtgcaggtataagcatatccccagcattcctgtgtgtgtgaatgtgcactgctgatttggactgttcttgagaaaggtgctgtgacatatgtcaatatttgttagctctggggatatctttagaatgcttgagaaagttgctaggtgtgtgccacattggtgcaggtaaatccatgctgttcacagccaagcagcatttgcagagaaaaggagagttttacatagaccccaggaaaaacagtactaacctggttgatggccttggtggtggaattttgtttcagccagaggctactcattatatcagaatgatgttcagtataacactatctgatttttagattggtcgatttctgttgtaatcaagtatttaggatgtaatctttttaaagtcattgctttaatctgaaaagccattagaagggagaggaatcactgttccacaggatatttaaaactcaggagttcaaataacctcacatattgaacataaactgttaacttattccacaactaaattctaacctgatacttatgaattgcaaagtgattgctgcaaactttttctaaggtggctgaagatttaaaatagatcattctaaagggaaatcagtaaaatgtcttgataattggtatccaaatcacttgtgtgcctgagaaaataaaaggtaatattttactttcaaaaaaaaaaaaaaaaaaaaaaaaaaaaaaaaaaaaaaaaaaaaaaaaaaaaaaaaaaaactcgag

SEQ ID NO: 2313 - DNA, 688 bp, Homo sapiens
ggcagaggtcttacttacctacctagcatggtgcctggcaatgttctgcgtggtggtcctctcactggaagctacaggttacggcaggttcaccttcactgggggtccgctgatgaccacggctccgagcacatagtagatggagtgagctatgctgcagagctccatgttgttcactggaattcagacaaataccccagctttgtttaggcagctcatgaaccagatggactggctgtcttgggagtgtttttacagattggtgaacctaattcccaactgcaaaagattactgacactttggattccattaaagaaaagggtaaacaaactcgattcacaaattttgacctattgtctctgcttccaccatcctgggactactggacatatcctggttctcttacagttccacctcttcttgagagtgtcacatggattgttttaaagcaacctataaacatcagctctcaacagctggccaaatttcgcagtctcctgtgcacagcggagggtgaagcagcagcttttctggtgagcaatcaccgcccaccacagcctctaaagggccgcaaagtgagagcctctttccattaaaaattgtcaccaatgaactcccccaaacatggctgtggagagacaacaaaacaaaaccaaagcaccaaaagtcttctggccaaaaaaaaaa

SEQ ID NO: 2314 - DNA, 930 bp, Homo sapiens
  SITE (12): n equals a,t,g, or c
  SITE (27): n equals a,t,g, or c
  SITE (57): n equals a,t,g, or c
  SITE (63): n equals a,t,g, or c
  SITE (97): n equals a,t,g, or c
  SITE (925): n equals a,t,g, or c
gcttttgccccntgatttccgccaagnctcgaaatttaacccttcacttaagggganccaaangctgggagcttccaaccgcggtggcggcccgctnttagaacttagtggatccccccggggctgcaggaatttcggcacggagggataactacccttttggaacatgtcaacagaggaaactttttcctcacttccatcccccgaatttgattgggaacaagtttgtccctcttaggggatcaccccacagagggcctgggtgttatttttcagatggatatggcttggcatacgacttatctaagatcccaaccagtataaaaggatatactttgggagccagaacagctgtgaggtttaagccaatacagaaggaaatgacacctcatgcaggcaggtaccagaaagtaagtcctcagcaggaaaaacacaaacaaaattttgctccatttaatgtcttggtgcctcgatttaagaactacccaaaggacacttactatcccagccctggtgcatacaacccagagaagaagccaccgccaaaaattgcctggccaatgaaatttggatctccagactgggctcaggttccatgtctacagaaaagaaccctaaaagctgagctgtccacagacaaagactttagaaagcatcggaaccgtgtggcctacctaagcctgtattataattgagcggctgtaactaccttcacgtgctcctcttatacacagactctccaggactgaggacagagctgctcttcttcttctacgttactgtggccctcttgtctggcagcctggagcccagggagggacaggggcttatagctgctgtatgagaacataaagactagtgcacagtgctatctccaaaaaaaaaaaaaaaaaaacggcacgagggggggcccggacccaatcgncctaa

SEQ ID NO: 2315 - DNA, 1663 bp, Homo sapiens
tggcacgagctgggccgctcccgggccagcgagggctgcgaaagaagttgtagcatgcataccacagaatcaaaaaatgaacatttggaggatgaaaacttccaaacatctacaactcctcagagtctcattgatcctaataatactgcacatgaagaaactaaaactgtcttatcagatacagaagaaataaaaccacagacaaaaaaggagacatacatttcttgtcctctaagaggagtattgaatgtaattattacaaatggagttatactgtttgtgatatggtgtatgacctggtcaatcttaggctctgaagctctccctggtggaaatttatttgggttgttcattattttttatagtgccattattgggggaaaaattttacaactcattagaatacctttagtgcctccacttccacctcttcttgggatgttactggctggttttacgattaggaatgttccattcatcaatgaacatgtccatgttcctaacacatggtcttcaattttaagaagcattgcccttaccattattctaataagagctgggcttggactcgatccacaggctttgaggcatttgaaggtcgtttgtttcagattggctgtaggtccatgccttatggaggcaagtgcagctgctgttttttcacacttcattatgaaatttccctggcaatgggcatttctattaggttttgttctaggtgctgtctctcctgctgttgttgtcccttacatgatggtgctgcaagaaaatggatatggtgttgaggaaggcattccaaccttattaatggctgctagcagtatggatgacattctggctatcactggattcaatacatgcttgagcatagtcttttcctcaggtggtatacttaataacgccatagcctctataaggaacgtatgtattagtctgctggcaggaattgttttgggattttttgttcgatattttccaagtgaagaccagaaaaaacttacattgaagagaggattccttgttttgactatgtgtgtttctgccgtcttaggcagccaacgtattggtttacatggatctggaggattatgcacactagtgttgagtttcattgcagggacaaaatggtcccaagaaaagatgaaagtccaaaagattattacgactgtatgggatatttttcaaccacttctttttggtttagttggagcagaagtatctgtttcatcgcttgaatcaaatattgttggcatatctgttgccactctaagtttggcattatgtgttcgaattttaaccacatatctattgatgtgctttgctggttttagttttaaggagaaaatatttattgctttagcatggatgcccaaagctacagtacaggctgtgttaggtcctctggctctagaaacagcaagagtctccgcaccccacttggaaccatatgcgaaggatgtgatgacagtagcatttttagccatcttgatcacagctccaaatggagctctacttatgggcattctggggcctaaaatgcttacacgccattatgatccaagcaaaataaaactgcagttgtcaacattagaacatcattaaaaagtttacctgtcaaaaaaaaaaaaaaaaaaaaaaaaaaaaaaaaaaaaaaaaaaaaaaa

SEQ ID NO: 2316 - DNA, 288 bp, Homo sapiens
ggaattcggcacgaggtctttacttttcaccagaggtttgtggcacacacatgtcctgtactactgtatcagattgtgaattccttacatgttaaagactgcttcaaatctgtccggaagtctcggctaataaacatttaaataaatgaacttcaaattcccatgtgccaccactgttttcattctgactactctcaagcctgtagtgtcatctttttgttactgtgaagtagacactcaataaatacttgtcaaatgaaaaaaaaaaaaaaaaaaaaaaaaaaaaaa

SEQ ID NO: 2317 - DNA, 1719 bp, Homo sapiens
ttaatttcttttgtaggaagagcagtttgaactatatggaatccttcaaaattctaagaaagtgtttgccctgttctgtatatattctgccaaaagttgttcctaatagtctagatattgattctttatgtaagtagggtctttttaatcaaaagtgaagtgggaccaaattgttcagtggcttgttctcttctaaattgtttttagctgataagatttgggaaactttctgggcttccacaaataatatacaatacatccttgaatacttgatgcttaaaaagtgttgttactgcatgcaatcagggagctccagagctttttgcaggctccttgttcctgagaagcaatattgttttcatattatctcggttatacattttatggttgtgacattgctttctttttgtttttgctgttgttttctgctgctgctgatttagaaatgaaataagctaactcttaattttaacctgtttgctacctaaaatggtaatcatcttgatgttctttcaagcaggtcccagagatcttaaaatgatccggaatcactgagtccacagttctcttttctcttggttatgtatagatggagagtggtcttggcgttatattagtgtatgattcgtatttgtttcataattaacttcgaagtgaaaaattgatgcgagagcaaaggtttatttggcttccataactatttactaattttatgcttgccagattttaagattaaactgtttgccatctcttgtaatttttcttcccataaaacctttggccatctacagtcacttttcctcaaatcttatgctgtaattcaaactgtatattctttttgctgattgcttctgtacctcttctgcttccagtgttcttttgcaagagtgtccacacagtgggaagaaaacctgaacttgactcatgaagtgctgggcattcaaaacagtgaatccttgcaaaggatcttgggagtagacccctgtgaattggctctttcaatttgtccacttaaagggcgtaatagattatgcagctgtttgggcttcagcagggtattgctccatattcatgcctagttgcaattatgtgaattttcagtttgttacaaagacttccctttgtattcaaaacaattttgttggctttgtgttctaatatttgagttttctctgaggaaaaatagttgcaagattttgaactttgaaaacttcaaattaaaatgtttaaaggttttgtcactttttattttctgatgcaaaccatacattgaaagcatattttaagaagaagtcactctaataagctttaatttcgagtttatgaatcacaggatttttggtagaggtaaaaactatacttacaccgtaaattagacattaaatgccatttaatcagtcagataatgattaatgttagagtaatgtttgatgggccaagctgctaaaacataagcagttctaatttaaatatataaacttatcacgtaaaaatagcaaacttagtaatgtataaagtgacagtaggtcttttttgcttaaaaatcagagttcctgtgtagtgtctctttatgatctctgtagtaaaaatattatttaacgtagcttagtgagaagtttaagaggagtataccttttactttagggtgcccatgccactttgaagttatggagtgcaaagtagtttccacacattaaaaaaaaaaaaaaaacggcacga

SEQ ID NO: 2318 - DNA, 3299 bp, Homo sapiens
gcgttggagctcccggaaagttgccggacccggaacgcaggcggagcgcaagtctgtcagccagtcagtccgccagtccgccagcccagtacctctctctcctcggccctcgtaagctgtccgcggtctgtttggcccgaacggcggcggaggcgctgatcatggcgacattcatctcggtgcagctgaaaaagacctcagaggtggacctggccaagccgctggtgaagttcatccagcagacttacccaagcggcggggaagagcaggcccagtactgccgcgcggcggaggagctcagcaagctgcgccgcgccgcagtcggtcgtccgctggacaagcacgagggcgcgctcgagacgctcctgagatattatgatcagatttgttctattgaacccaaattcccattttctgaaaatcagatctgcttgacatttacctggaaggatgctttcgataaaggttcactttttggaggctctgtaaaactggctcttgcaagcttaggatatgaaaagagctgtgtgttgttcaattgtgcagccttagctagccaaattgcagcagaacagaacctggataatgatgaaggattgaaaatcgctgctaaacattaccagtttgctagtggtgcctttttacatattaaagagacggttttatctgccttaagtcgagagccgaccgtggacatatctccagatactgttgggaccctcagtcttattatgctggcacrggctcaagaagtattttttttaaaagccacaagagataaaatgaaagatgccatcatagctaaattggctaatcaggctgcagattattttggtgatgctttcaaacagtgtcaatacaaagatactctccccaaggaggtgttccctgtcttggctgcaaagcactgtatcatgcaggccaatgctgagtaccatcagtctatcctggcaaaacagcagaagaaatttggagaagaaattgcaaggttacagcatgcagcagaactgattaaaacagtggcatctcgctatgatgaatatgttaatgtgaaggatttttctgacaaaatcaatcgtgcccttrctgcagcaaagaaggataatgacttcatttatcatgatcgagttccagaccttaaagatctagatcctattggcaaagccacacttgtgaaatctaccccggtcaatgtacccatcagtcagaaatttactgatctgtttgagaagatggttcccgtgtcagtacagcagtctttggctgcctataatcagaggaaagccgatttggttaacagatcaattgctcagatgagagaagccaccactttggcaaatggggtgctagcttcccttaatcttccagcagcaattgaagatgtgtctggagacactgtacctcagtctatattgactaaatccagatctgtgattgaacagggaggcatccagactgttgatcagttgattaaagaactgcctgaattactgcaacgaaatagagaaatcctagatgagtcattaaggttgttggatgaagaagaagcaaccgataatgatttaagagcaaaatttaaggaacgttggcaaaggacaccatccaatgaactgtataagcctttaagagcagagggaaccaacttcagaacagttttagataaagctgtgcaggcagatggacaagtgaaagaatgttaccagtctcatcgtgacaccatcgtgcttttgtgtaagccagagcctgagctgaatgctgccatcccttctgctaatccagcaaagaccatgcagggcagtgaggttgtaaatgtcttaaaatccttattgtcaaatcttgatgaagtaaagaaggaaagagagggtctggagaatgacttgaaatctgtgaattttgacatgacaagcaagtttttgacagccctggctcaagatggtgtgataaatgaagaagctctttctgttactgaactagatcgagtctatggaggtcttacaactaaagtccaagaatctctaaagaaacaggagggacttcttaaaaatattcaggtctcacatcaggaattttcaaaaatgaaacaatctaataatgaagctaacttaagagaagaagttttgaagaatttagctactgcatatgacaactttgttgaacttgtagctaatttgaaggaaggcacaaagttttacaatgagttgactgaaatcctggtcaggttccagaacaaatgcagtgatatagtttttgcacggaagacagaaagagatgaactcttaaaggacttgcaacaaagcattgccagagaacctagtgctccttcaattcctacacctgcgtatcagtcctcaccagcaggaggacatgcaccaactcctccaactccagcgccaagaaccatgccgcctactaagccccagcccccagccaggcctccaccacctgtgcttccagcaaatcgagctccttctgctactgctccatctccagtgggggctgggactgctgcgccagctccatcacaaacgcctggctcagctcctcctccacaggcgcagggaccaccctatcccacctatccaggatatcctgggtattgccaaatgcccatgcccatgggctataatccttatgcgtatggccagtataatatgccatatccaccagtgtatcaccagagtcctggacaggctccrtacccgggaccccagcagccttcataccccttccctcagcccccacagcagtcttactatccacagcagtaatatgtctgctcagcagctcagctgattcagatcagagggaaagaaataccaaccctgcaataagtgtactaaactctacgctctggttaatgtaatgtactctcctggactgaatgcagtgtataatttctgtctacagctagaagctgtgccccagttccacatttgattacacatgtgagatttgctgctgttgcagtataaacactaggtataataggatttgaaattgcattacagttcataaaaattgaaaatgagaaattaaacctgcaagtgaaacatttgaaacgattatactttctacataagacatggttgggacatcagatacttacaaagatggtttaagtatggatactagagaaaattaagttttctttctctttggtttattgatttggtttaatttccattatgctattttgcataatcaaggcactgtaaatcttataattttaaaataaattacttaagaacaaaaaaaaaaaaaaaaaaaaaaaaaaaaaaaaaaaaaaaaaaaaaaaaagg

SEQ ID NO: 2319 - DNA, 1633 bp, Homo sapiens
  SITE (22): n equals a,t,g, or c
  SITE (38): n equals a,t,g, or c
tgggctttatcgaattatggcnctttgacccctctaantcagactcacgcyaatgtcttaatggagagtgaaataactaagaggagttacagcaagcttgtccggcctacagcccacatgcaacccaggaaggctttgaatgtaacccaacacaaatttgtaaacattcttaaaacattatgagatttttttgtgtgatttttgttttttagctcatcagctattgttagtgttagtatattttatgtgtggcccaagmcaattcttctaccagtgtggcccagggaagccaaaagattggmcacctctgagttatagtgttgagccttaagatcaatcttatgatttcacctttccaatttttttattccaatggcttgtggataatataagcattcatttgcaaaaacaatactgagtactagtatatgattagtatcagccctcttccaaaagacaaagagagataagtagctagccatgcaggtctgtaaaaagttgacagtgatggtatcaaatatggagtcaaatctgggttttcattttaggtgttacttttgagaaatgcagattactgtaggcattgaacattatagcctagtcttgctgcttgaatttcctaacttactatctggcccaactgcttcctctcctaacacccctctccacaaccttctaggttttcaaggacattagtaacaatgacttttgtcattaataaaagctgtaaaaagggacatctatacaattgagaaacaacagagaggaaaggaagctacttttaggaacctatatgtggcctactcattactggcccagtttcttcaaggaaagcttactccattctaagggtgaagattttagtcaagagcttgattagtgtttgacactttgatagaaaaagcagagtggtgactgcttatttattcaaagttttcktttcccaacaacgttcacatctgtgggtcataagcatgaagatgcccagcataggttattatcgaaagaagaggcccccttcmcaaacctgcccagttattacatatgctacctgttcatttaccatagaaagatgtaccmayttttccagaattatttkgaaaaaataaytgctaattttggacacttaataaaatggaaagtaccactgagataagtttaataccagaataaatgcatattatactygaatgcttacaatatgagaatatagcaacagcctgttttgccttaccaggacatcaagaatctgatcagtttcacaccttttactggcakatagtaatagaggatggaaagataaggtctcaaatactgtgatctggccaggcacagtggctcatatctgaatcccagcactttgggaggctggggcggacagatcacctgaagctggcagatcgcctgaggccaagagttcaagaccagcctagccaacatgatgaaaccctgtctctactaataatacaaaaaattagccgagcatggtggcacacgcctgtaatcccagctactcaagaggctaaggcaggagaatcgcttgaacccgggaggcagaggttgcagtgagccgagatcgcgtcattgcactgcagcctgggcgacaagagcaaaactccatctcaaaaaaaaa

SEQ ID NO: 2320 - DNA, 890 bp, Homo sapiens
ggcacaggaaatgaggcatctgttgttggcttccctgtggagtttgtgtccctccctgagctcccgcctctgtggggccagccccagtgtggacttgtggccccctgtgctgctgggcctcaggtttgggtctgcggagtacatgggtgtgagtgctctgaccactggactcttaaaacatgcagccctctttgactgtgacactggacatgtgcaaagcttggggactgatcaaaaagtataaagaggccattgaaaaagaccttgactcctgcacccagaggtagcaccaagaacatggcatgcatttcatctccacgtctcccttctctcctttcctcccctgttcattcattcagccaatctatcagccaaccagtaagcactcacggacacccacgtgcgcaggtgccatggaggcagccgagtgtggggactgctgtggcaaagctggcagccttgtgtgcttcctgcacttgtgacattttattgcagccagtgcctgtgccattaagcattccttgaaaataaaatcttttttggctgtacgatgtttcttcgtgtagacataccaaaagtaaactcttggccggctgcggtggctcatgcctgtaaccctagcactttgggaggctgagacgggtggattgcctgagctcaggagttcggaccagcctgggcaacacggtgaaaccccgtctctactaaaatacaaaaaattagttgggcgtggtggtgtgtgcctgtagtcccacctactcaggaggctgaggcaggagaatcgcttgaacccgggagacaaaggttgctgtgagcctagatcacaccattgcactccagcctgggcgacagcgaactccgtctccaaaaaaaaaaaaaaaaaactcgag

SEQ ID NO: 2321 - DNA, 1074 bp, Homo sapiens
gatttaagaatcatcattctaggttatrtacctgggagtggaattactgtgatatatagggtatgtatatctcaatttctaatgtaacagggtttcagagatcctcttcacattcttgccaaaactttggagtattattttgccagcctaatcagcttgaaaagttatctcattgttttaatttgcatgtttctgatttccagtgaggttatgcatgtattcttaacatttattggcctttcaggaactttctgtgagttacctgttacattcctttgctgaatatttaatcgtttgttttttcatatttatttatagggattattttaaaattctgcatatgaatcctttctgttgtttagcaaatatctttgcccagtggatgacttaccttttaactttgttcctgatgtcttttgttgagcaaaagtctttcattttaatgttatcagattatcggtattttattcaatggtttgtgctttttgaatcattttaaggagatccttccctacaaatcaataagaaaaatacaaacaacacaataaaaataaaagtgtttataaaaacagacataacrggcagttcacrgaggcaaaaacaccagtggcctatagacttaagaaatctcattagtawtcaataaatgcmaaataaatctatactatgatatatacatttagtacttagaatgctggcatatatttaaaggcctgacaatgccaastattggtgaacatacgaaacaataagaactctatgtaacctcagcactttgggaggccgaggccagcagatcacctgaggtcaggagttcgagaccagcctggccaatgtggcaaaaccccgtctctactaaaaatactaaaaattagccgagtttgatggcacacacttgtaatcgcagctgctcaggaggctgaggcatgagaatctcttgaacccaggaggtggaggttgcagtgacccaagatcatgccactgcactccaacactccagcctgggtgacagagcgagactctgtctcaaaaaaaaaaaaaaaaaaaaaaaaagaaaaaaaaaaaaaaaaaaaa

SEQ ID NO: 2322 - DNA, 631 bp, Homo sapiens
ggcacgagagaatgagcagagcagcatctaacaaaggacggggtcccctctcagcttctctgtcttcacaagtgaatgtcacacattttaaactagaactctttctacttatttagcacctaacagatgctacgagagttctggttactttttcttttctgtttgggtcgggagcacatgtctaagtgtgacaaatgtgagcagattatttggagaggtgaggaaatacaggaaagaggggggccagtcttttctctcttttggaaaaataatcatttttcgtagaaaccagatactttcataatactctttttttttaaagaaatgttttaacatgaaaaaaatttcaaagatacatacaagtagagataatagtgtaataagtccccatgtactttttgtccagctttaacaattagcagcatgtggcctgattttgttttacacatatcctctctcctgtattattttggagcaaatttgatacgttatttctttctttctttctttttttttttccttagacagggtcttgctctgtcacccaggctggagtgcagtgagccaagatcgcaccacttcagcttgggcaacaaagcaagattctatctcaaaaaaaaaaaaaaaaaaa

SEQ ID NO: 2323 - DNA, 1104 bp, Homo sapiens
tgcaggaattcggcacgagcttcacatttttctattccactcccagcccaaaaatactaaaaacagaaagaacaaagtccatacaaagagtatttcatgaaaaatttaacccacttttttctttcgctttcttccctctcctcttttctttttcttgtctcctcttctttctcacgcagggcagggccgggccagggttagcgggccagggtaaggtcggagctgctccaacttctggtgtgtacttgttagtctttatgatattcttgtagattcaatcatgaaacatgagtttgatgctggtgtgattgtaggtggtcttgcagtcaggtgaacagttgctcccaaagagaactgacggctcagcctcagcctggaggggatgtagacctctcgtgacataactcagtgctgggagggaagtcaacagagtgaatcaaggacagaaccaacactcaaaatgatggcaagagttgcagccaaagccagccagatgacacaccaacaaaatacagtaaagcccataaaggtcagtccttggcttcagagaaaaccatagtgggcagtgatgcatttggaaaatatctggaaaccttgcctgctggcagacactgtgggttatctatgggatccagctgctaactccatcaatgtgaccttacacttcattaatggaagtgtctacctaactggatgtaacagcctcctcactaacttatatttacagtgctgcccctgagtcagcagtaaaagttcaaattatattcagaatcttctgcttaataaattagaaaagtgctggccaggcgcggtggctcatgcctgtaatcccagcactttgggaggccgaggctggtggatcacttgaggtcgggggttcgagaccagcctggccgacatggtgaaaccccgtctctgctagggatacaagggttggctgggcgtggtggcgggcacctgtggtcccagctactcgggaggctgaggcaggagaattgctcaaacccaggaggtggaggttgcagtgagtcgagatcgcgccactgcactccagcctgttgatacagcgagactccatctcaaaaaaaaaaaaaaaaaactcga

SEQ ID NO: 2324 - DNA, 1803 bp, Homo sapiens
gccgattcattaatgcagcttggcacgacaggtttgccgactggaaagcggacagtgagcgcaacgcaattaatgtgagttagctcactcattaggcaccgcaggctttacactttatgcttccggctcgtatgttgtgtggaattgtgagcggatacaatttcacacaggaaacagctatgaccatgattacgccaagctcgaaattaaccctcactaaagggaacaaaagctggagctccaccgcggtggcggccgctctagaactagtggatcccccgggctgcaggtgcgccgcaactacagccgcgaacagcacggcgtggccgcctcctgcctcgaagacctgaggagcaaggcctgtgacattctggccattgataagtccctgacaccagtcaccctggtcctggcagaggatggcaccatagtggatgatgacgattactttctgtgtctaccttccaatactaagtttgtggcattggctagtaatgagaaatgggcatacaacaattcagatggaggtacagcttggatttcccaagagtcctttgatgtagatgaaacagacagcggggcagggttgaagtggaagaatgtggccaggcagctgaaagaagatctgtccagcatcatcctcctatcagaggaggacctccagatgcttgttgacgctccctgctcagacctggctcaggaactacgtcagagttgtgccaccgtccagcggctgcagcacacactccaacaggtgcttgaccaaagagaggaagtgcgtcagtccaagcagctcctgcagctgtacctccaggctttggagaaagagggcagcctcttgtcaaagcaggaagagtccaaagctgcctttggtgaggaggtggatgcagtagacacgggtatcagcagagagacctcctcggacgttgcgctggcgagccacatccttactgcactgagggagaagcaggctccagagctgagcttatctagtcaggatttggagttggttaccaaggaagaccccaaagcactggctgttgccttgaactgggacataaagaagacggagactgttcaggaggcctgtgagcgggagctcgccctgcgcctgcagcagacgcagagcttgcattctctccggagcatctcagcaagcaaggcctcaccacctggtgacctgcagaatcctaagcgagccagacaggatcccacatagcagcagcgggaagtgtgccaaggaagctctgtggcgttgtgttattggtagacaccctcagcctcatcatttgactacctatgtactactctaccccctgccttagagcaccttccagagaagctattccaggtctcaacatacgccgttccaccaattttttttttagccccaccagcttcaggacttctgccaattttgaatgatatagctgcaccaacaatatcccgcctcctctaattacatatgatgttctctgttcaaaagtaattggcagtgattggccgggcgcggtggctcacgcctgtaatcccagcactgggaggccgaggggggcggatcgtgaagtcaggagatcgagaccatcctggctaacatggtgaaaccctgtctctactaaaaatacaaaaaaaattagccagccatggtggcgggcgcctgtaatcccagctacttgggaggctgaggcaggagaatggcatgaacctgggaggcagagcttgcagtgagctgagattgcgccactgcactccagcctgggcaacagagcgagactccgtctcaaaaaaaaaaaaaaaaaaaaa

SEQ ID NO: 2325 - DNA, 1610 bp, Homo sapiens
gatttatcaaggtaatgccactttgatgtgtcttggttaggaatctttgttcacttgagggaatacatggtatatgataggaacagtaagcacagaatagagatgggaaagggagaaccctgtcataacagttaacatttcatatttgccaaacatgaatggcttatgcatattaacacatttaattctctcaaccattttatgacgtctgaggccactgaagcagctagaggttaaaccacttccctaaagtcattagtaagtggcagagccaggattaaaaatttaagtccttaactactttgccatcctgccacactctgcacatgcagacaagagtaagagccttaatcttgggaaaagatatttcacaagatctttgacaatttccatatccacagacaccatccagcttattagtgaccaccactcctatttgttactttctcctttaaggctgcccctacctgaactctggatcccagtaccatcactttctcaaggacctcccttctccagtgttgccctctcttgactcccctaccagcatctaaacatgctcagatctattgcatcttaagtcctctcctaactccacattcctttctacctactgccctagcttttccacttcacaactagaataccctcattgtatccaccttgggcctcctatttactcagtacatctggttcttaccaagatcactgataaccttcttgatactgtttaatagatccttttcaaccctcatcttatttgctcaatctttggcatttggcactgttgaccatcttgtctccttgaagcttccataatagcatatttaaaatttttctgtcttttcttctatcctcagcttcctttgggagctctccctccttcttctgtatgtccgttaaatgttgctgctcttcagtcttatgtcgcaggcccttaaatcttctcactgaaccaccttcctgtggcctcagttaccatccattgagctctgtgccgttggccgctagttcaacagtcaaaatgaaccaattatcttaaccccatacttcctcttcctataaaatctgtcctaggaaatttcacctctttgccaggccagaaatcagggcataatattaataaaatagttagcacatattgkgtactttcttcaatgccaggcactcttctaaccactttatatgtattagctcatcagactcagcctgataatatgagatgagtcctgtcattatccacatattagataacaaatctgagacatagaaaagtaatctgccttaggkcattcaactgataaaggatagagttgggatttgaatgagggcactctggtttgagcttgtaatcattatatcataaaggacatgatgcttgacttctctttctctcaccctaattcaacctattgccaagtattgtacattctccatgcttaaaatctctaggcggtgtccctgaagtataaatccaaagccttcatgcctgtggtccgagtgctttgggaggccaaggcaggaggactgcttgagcccaggagtttgagaccagcctggacaacaaagtgagattcatctctacaaaaaaaaaaaaaaaacggcacgag

SEQ ID NO: 2326 - DNA, 1228 bp, Homo sapiens
  SITE (636): n equals a,t,g, or c
ggcacaggagatttttactttaaaaagcttctctcttaatctgggttttatattaaggggctcctcttattttacttctttgttcattgcactataaatatgaatataatgagagatctagtcttaaaaattgtatttttttacaacttcttaggcataacttgtttcacagttgctggaacaaacctcatcaacccagtttttgaacagtagaatattctctttgagaaaaagataggtaattagcattttgttctttctcatgtcattttccttggaaactatactgccttccttctccagttttcccaaatcagagaacaaaagaaggagggttgctgaaatgaaccttgttctttctggctgtcttcttacccattcctcagtgctgaactttttggggtgagagtgggggaatagggttggcagttgtctgccacggccccttacttgtttctggggaagacattcgaggtactcaccaagagatagagtgaagatggaattctttttagaagggaatacagttgacccaggaacagtgcgggggtgtggttagaagcactgaccttcttccctctgcagtcgaaaatcctcacgtgactttttttttttaaggctctgtcgcccaggccngagtgcagtggtgaaatcatagcttgctgcagcctctattgcccgggccaaagcaatcttcccacctcagcctcctctagctgggacaacaggtgttcacccttcctggctaagttttttgatttttagtagagatggagaatttcccaggatggtctcaaacttctaagcttaagcaatcctcctgcctcagcctcccaaggtgctgggattacaggcatgagccactatgcccggccactgtataactttgattctccaaaaatttaactactaatagtctactgttgaccagaagccttaccaataaaataagttgattaacacatttttaaaatatgtattattactgtgttcttacaatcaagtaagctagagaaaggaaaatgttatgatgaaaatcataaaaaaaaaaaaaagcccggcatggtggtgtgtgcctgtagtcttctgttactcaggaggctgaggtgagaggattgcttgagtccagaaattcaggctgtagtgagctatgatcgtgccgctgtactgcacccctggtgacagagcaagaccttgtctcttgaaaaaaaaaaaaaaaaaactcgag

SEQ ID NO: 2327 - DNA, 787 bp, Homo sapiens
  SITE (293): n equals a,t,g, or c
gaattcggcacgagctgaaacacattttttccctaaagcctcaagctccttcatacctctgtccccattcactcctctccccagaaccttacccacgttgaagggaaatggggaaggagagaggaragtttaccatattctgtgactattttataccaaaattatgccatgctttctaagcaaaattatgatatcctttataagatatcagttgtttcttcactwaataaaaataattttacactggctcattctaatattttgctggtccagccacttccctggtagtcatngaccccactctgscccagccaaggtyaaagtaggcaacctctggcyttggaaacagagccaggtcacttggcccacattkgagatggaacccatggccttgcctatgcatctctgatctcccagaaaacttttcttctagagatccaggactgagtgattcaggcaaccattacatgatgagaaatgtctctaaatccatctcatccccaagtatgttttcctaggctccaacatggcaataccctgcagtcctacagcaatcaagttagctttcatttcacgtgaaatagatgtgcgagtatctttttacataacggggaatacctccttatcattaaaaatattccactaccggctgggcccggtggctcacgccagtaatcccagcactttgggaggccgaggcgggcggatcacgatgtcaggagatcgataccacggtgaaaccctgtctctactaaaactaccaaaaaaaaaaaaaaaaaactcgtag

SEQ ID NO: 2328 - DNA, 1131 bp, Homo sapiens
gcaggatcacagctcacggcagcctcaacctccctggctcaagcgatccctcccctcagcctcctgagtagctgagactacaggtgagtgccaccacactcagctaatttttaaattttttgtagacagggtctccctatgttgcccaggctggtcttgaactcctagactcaagtgatcctcctgtcttggcctcccaaagtgctgagattacaggtgtgagccactgtgcccagcagtttcccagaatatatttaaatgcaaagttacatgaggggaaaacatgtatgtttgctcctgttgttactgggtaggttctgaacagcagaaacccatgtgcagggtgggctggtgaaggcccctctccgcaaggtggtagcaggaaaaggtccttgacttgatgaatttggtctgcctctgagccactggaggaagctgttttgagccagggttttttggcctaaagccagcatttcctcagtctccctttgtggttcgaaggatatggactattgcaatacatttcttccttcaaatcctgccactgttttgttggcccacaactaataggacctcaaaataagccatgctgctttgcacacacactagccttcttttgtacttttcattctggatgggcttggccaaaacaggctcaggccaaagacctcccaagctgtatgtacttccagtatcctgaaacagtgtttggtgacataatgccaagggtaaacaagcctgatttaggcactgctttatccaggggcttcacccatgaaattaataaaacttatctgagtcacttgaaacttggttcccagaaaacacatttctggtttataatctccttttatgctcacctgacattaattatctatccttgatgatgtgtttaaactgagtagcagaaaacagaggccacactttctgggaaattttaaaggaagaaaccatttttaatgagatgaaaatatttaacgaatttaaaaagctaatgacaattttgagaaaaggtttgggatgtatattgctatgtaatttaataaactgattttatggatataaaaaaaaaaaaaaaaaaaaaaaaaaaaaaaaaaaaaaaaaaaaaaaaaaaaaaaaaaaaaaaggtgc

SEQ ID NO: 2329 - DNA, 1133 bp, Homo sapiens
ggcacgagtgagtttcgaggctttgtatttgttctgtaaacaggcatataagacatgatggagttagtcctaatggcctctgaggtaagtggacaatctgctcaaatcctagcctccttcctggcactggtctctttataaatagggaatttgtagtggtgtagcagtagaatttgagaggcatatgagttggggctgtgctgctagaaacacagagttctgtctgccctttagtcagttttaaagagataatgttttgagacaaagggaggggcagttgtaataagctttatcatgaatctctttgggacctttcaagtcctatctcaccttggctggtgagagccccttggagccggctctactctttggtgtattctgacatatcccattattcttcaagcatttccttaaatttggtacggtaaacattccaggtttatcttgtgttttctccaccccagccatggcattagcatgtttcttaagagccgtgtcttctttaagtggaaaatggtatttaaaaatcaagctctgggtgctaagtgtagtacttcttgcttccggagagtcagtagttctactgggttctttcagctgatagaaatcgatctgtatgtgttatacacacatgcatccatagacttatctatatttagagctgtatatatgttgaagaccgtgaaatcaaactgatacttctaattctatccaaacaccaaagaatttactctagccttcttcctttccatattatgtatataactttcatcatcaatgagaaaccttactgccataatctttaagatatttacttaaatctcccctgtagggctgggtgtggtggctcatgcctgtaatcccagcactttgggaggccgaggtggttggatcacctgaggtcaggagttcaaaaccagcctggccaacatggtgaaaccctgtctctactaaaaatacaaaaattagctgggcatggtggaatgcatctgtaatcctagctacttaggaggctgaggcaggagaatcgcttgaacctggatggcggaggttgcagtgagccgagatcatgccactgcactccagcctggggacagagcaagactgtgtctcaaaaaaaaaaaaaaaaaaaa

SEQ ID NO: 2330 - DNA, 962 bp, Homo sapiens
  SITE (9): n equals a,t,g, or c
  SITE (13): n equals a,t,g, or c
  SITE (28): n equals a,t,g, or c
  SITE (41): n equals a,t,g, or c
cgggccatnaatnttaaaccccccctanagggcaattgggnccgggccccccccgarttttttttttttttttttgattgaacagaatttattggctgtctttgagtgtctttggtatggctttggcagggctgtctgggttcctccgctttgcttgtttttgggctgctgctgcagcctttaaggctcttcttcgcttcttcagcttttgagtctcctggaaaacccgaatgcacagagccttcttggtcacgaatcggcggtgggctcttcggtaatacagaggggggaaggtgtactcaattcccagcccccagcatatcttctcaaagacatcatagttggtgttacggaggtttttgagcatctttttcctctggtcaatgctcattagcagatagcgtttgtgggctttgtcctttcgatgtttctccaagtgttcttcataactgcggatcttgacagacaaggcaataattcgagcctccagggatctggtgtcctctgggtttgcaacaatcttcttcataaactgttcttgcttgatttttagcatctccttcttgttggccatttccaaagacaagagtcttttcacgacatcatcaaccttctcaattccagggacattctggtagtctttgagcagcgtagaaggaggtgggtcatcatccagcctagactgggctggtttccggacgacatatccgcgcgcggcctggaggaggagacttcgaggctgcaggccccactggttgaaaggaaacttggcgctcccaccgcccggcagcccgggtactaggacctgggtaactgcccgggtccgaatcaaactcagcgtcctccacgcgaccctcagcatggtgacctctaacccccgcggggccgcgccgcggccgccgttcgctttgcggcacggaccgggttacatgggcgccgccatgctggcccaggmtcgtgcc

SEQ ID NO: 2331 - DNA, 950 bp, Homo sapiens
gggctgcctgagcaggaaagcaggtaaaggaccaggggagaaacacctggggatgatgagaaaatcattttatgatacataagtgtgccagaaccaataaaatcggccctagtcacatttaagttactacgagtctgcttgaatataaacacagattttagcatagagttggaaggaatttttactttctagttaagagcatcctgctccagcagagtgaaatccatacggttatgcctttgataatattgtgtaaagcgattcattctgatgtcactcattttgtttcttttaataaacataaggtgggacttatctttggtactttctcagaggtagaaaggatgttttctttttttttttaattccacttcagaatgacaggccttgtattagttaatgtatatattttcactcttaaaatacatagtaagtacaaataaatacaattttctttgacctgaagagggagattgagttatatttcaagtcccctgtaaataaagatgccttggaaattatcatagtattttaaatagttaggacctaatgcttaatgaatgacaacatttacaagttgcaatatttcttcaggatgctaaaatcagtgctaaagtgaatcatttatttaagtaaaatgcattgagtatctccaggtttcctgttacgtgggaagatgttgtatttaaatgcattcctatcattttagcctctgaaagcacccatgaggacagaaacgtggaacacatggctgaagtgcacatagatattaggaagctcctacagtttcttgctggacaacaagtaaatcccacaaaggccttatgcagtgagtgtgcttctctgttttgtttttcatattctttcatattctaaatactgcagtcaactctagtctaacagattgcatatagtctcataaatccaaaaaaaaaaaaaaaaaactcgag

SEQ ID NO: 2332 - DNA, 1325 bp, Homo sapiens
gagacaaaatgaaatgcaaacatgctttgaaagagcacagtcttgtcctgtccctctgcatcccctctcctcatttctaatgaaaaaaatagtcttccctttccctggttccttcaacagtctcttccttaggttatttttttcctctctcctttcctactccatccagacttccccctgcctaatcttaaagagatgaattggaagaatatgcagtcgtgtcagaaggatgccattgtcagttcacacaggcagacactaataggataaagtattatctgacttcctttaagtccagaaattaagtcttcttgcaatggcaatagattataacttataaccactgtggctggcaggctgcagaaacaggctgttagtatctgaggcctcagctccatttctgggcctattgtgagggatgcactcagcattcctccaaacacagctgcatgatccagggaactggcacttggctcctggatggaactgcctctgtggagagctgcctataactcattcagttcacctgccgtgggagaagctgtctgaatggtcttaatgaacctggatgagtgggcaggtaaagggaggaagccagggtcttgaagactgggaagaagtagcccgaggcaaggaaaccaaactttgcacagggaacacttagtgtgtgaaagctcttctcagtcatccttgctgactcattgagcaggtagtaacttatctagtgactaaatcagcaccagcttagagacacagggaaatgagggttgagaccttaaaggaactgtaaaagagactacaaattaaggagttgccctggagaggaaatatcatgagaaatgttaggaagaaagagccatcattcttcaaaatggagggcctcatgcaggatttcctaggtcctgttatggcagatgagtgtactcaaatggggaatatgggacaggaaacctgatacaataattaattgaagggtatttttttattagtggggctataagaaggtaggtgggggctgggtacagtggctgacgcctgtaatcccagcactttgtgagcccaaggtgggcggcggattgcctgaggtcgggagtttcagaccagcctggccagcatggtgaaaccccgtgtctactaaaaatacaaaaattagccaggcgtggtggtgcgcacctgtaatcccagcaactcgggaagtgacgccaggagaatcgcttgaacccgggaggcggaggttgcagtgagccgagatcacaccactgcactccagcctgggcaacagagcaagactctctctcaaaaaaaaaaaaaaaaaaaaaaaaaaa

SEQ ID NO: 2333 - DNA, 2301 bp, Homo sapiens
gatttatgtaaaatgcgaaggcagccgctagccctacgctctctcctgtgtaccctgcccctggtcccaggtgtggccatctatctggtagggcccaggcctctgtcctcccggaaggcttcagtcctgagttctgccctttgctgacttctcaccttatcctctttccaagtctctcttctcttctctcctaaatttccttctcttttctcctccaaactcctcgccctgtgtttgctccaaaatacataaaacaaaaggtatgtggaaaaaagaatcagtagacttaaaggtagaaaattagagatttctctattgccgcaagtcacaagagttgtgagtcctgttaggatggagtgtgtcattttcatcacatcacattgataaatatgtctaggggctgataagccagtagggcatctaatttatgtaattttgatactatcttatatcttgtctggttgttacattcagtttcagtgaaaaaaaattgactttttttctttttctgtctttgaggggaggttgacaggaagggtccttgctaaaaggggagtcctggtactgaggtcagttgtgggtgtttatttgggggcagatgctgtcgctggggggttgtgatgcttccacctatgaaccgaccctggtctcctggtgactggagtgtgagtgattatgtcttcgtttctaggatcactataagaatagtagaattgtcctatccagagaattctgcagatgttcatgttccagttaatagaggtttgctttgaactggtgccttcgggagaagctttccagaaggagggagttttgtgcagtcttttgcctcgcaggcattactagataattgtggtgaagggagactgtatctgagccaatgttgctgcctgtcatggctaataaatgacaataaggaaaccatctttcactgaaccgttggtagaaggactacatttaaaaggcagaatttgtgagtgaaatgataggaactccatttccctgacacattttctgctttcttcccttttactcttttagcagtctgtccttaaagacttctgaagcctgacaagacccagcagtgaaagtgatctaatatattagccatcttttcctaaattaaaaatgaagcaaaataagagaacaagcatacaagctgagctcatgaatacaaatgtaggcttgcaagcccggtgagctgaagttcctgtggccctggtgtaatttttgatcttccaatgtctgtatctacctgaggattaaaaatatttaggttgttgcaaaagggcctgaggaatgcagggagggagttttctcattggcgaggctgataagaagttttaatatttatagttcacttttgttgttgttgttaaagtaaagccactctaaaaatggtagtttctacaaatcattagccaggaagcctgtctaaagctccagggaaggaccagaactcaaggtgggggtgctttgcaagctctcttgtcagggaaccgtgatgactagagttatggattactggctgtagaggtgccggcaaaataaccctgggcccaggagtcacatttagagcagggtgccccagaattgttctggagatacctttagctagctcgacttttatttcggaactgttggaagaatctaaagccatttcatcgtgagggtatatgaatctcaaatagttactgagtacctaccaggtattgggttctctgatggctcttgggtgagagttagaacagagtggatagctagatattagacaagttccttagatgaagcccaaacttgccacccgcatcctgagccgtgcaggtgccacctgtactttattttctgtgtgattgggttgtctattattttgtgtctgtatccattggagtaagaccctggggagagggcagggaccagacacgaagtccgcaggagctgggttcttaccctgattccaaggccgaagactttaaaaaattctacaagtcctggccgggtgtggtggctcacacttgtaatcccagcactttgggaggccgaggcaggtggatcacctgaggttgggagttcgtgacccgcctgaccaacatggagaaaccctgcctctactaaaaacacaaaattagccaggtgtggtgtcgtgtgcctgtaatcccagctactcaggagactgaggcaggagaattgcttgaacccgggaggtggaggttgcggtgagccaagatcgcgccattgcactctagcctgagcaacaagagcaaaactctgtctcaaaaaaaaaaaaaaaaaaaaaaaaaa

SEQ ID NO: 2334 - DNA, 2057 bp, Homo sapiens
ggcacgagcagggaagtacagtcctttctatgtgtctgcaaggaggactcacatctttggtgagcagcactgatgcctgctgcaacctggcatcccctttcctgtctcctttctttcctggtctgtgcagtagtagggtgtattagtccatttttgcactgcaataaaggcatacctgagattgggtaatttataaagaaaagaggtttaattggcttatggttctgcaggctgtacaggtttctgcttctggagaggcctcaggaaacttacaatcatggcagaaggtgaaggggaaacaggcacatctccacatggctggcaagaaaagggaagagcaaagggagaggtgctacacacttttaaacaaccagatctcatgagaactctatcatgagaacagtaagggggaagtctgcccccatgattcagtcgccttccaccaggcccctcctccaacactggggatttgggtggggacacagagccaaaccatatcataggggataggatccttcttatctggtttctttgctaccgtaattaatccatccttataggttcaattctaaaccctgaagacattagtatttcccattgcccttgggatacaaactatttcccttggaccataaggctctctccttatcagacaccaccctcccatgtatgccagcctctctcatactccaggaggtaaaaagctctcacttctgcctggaataatcatgacccctggccacccctctcagttgccaggccactctctctggcctttgaaactgtactcgcatgtcctggcctatccacccaaactaaagcatgcactgcctgttcctttcctttgaccacttatcacaatttatttatttatttatttttgtacatttgcttaatgtctttttccctccctggactgttggttcaccgtggttttcgcagggcctggtgcatagcaggggctcagtcatattttttggatgaatgaacaaaccctgaagatgctacatctgactctatatcttcattttatccttttcgtatttcctattacctctaatttctcttccctgcacccatttctatttatttcatcccagtttacctcctgctgccagattaattttcctaatgcacaggctctatcatatcatgagtttctcattgctacatatgactaatttgccaatatttttgcacatcagaatgtgtatcactttgaggctggttctgtgtttgttttagtttaggaaaagctgttcagattgtctgtaaatccgtatggggatctttgcataggattttaaagcagccacacatcttgtacaaaatgtataagattaattttctatgttaggaccatttgttttcaccaattccatagagctccaatgtgtaaaagaagacactgatctaactcttgtgttaaatatttagtaactcatttatctggaagaaagcaaaacaaaacaaaaatacaaggaataaaaatcactgggagtgcttttcattcactgaataatgagttttgcaaggagcacgtggatggtgacattatatcttttacatctttattttctgtttcttttttgactccttatcagtgaatttatcttattttatacttttactttctatttctttcttgactctttgttggtgaattggtagcaagagacttactgtctgatcagaactttgaatcttcctgcctctctttctttgaggttgacagggataaagataattaagatagcgcttgggtgtgatgacactggaagacaggctgggtcagggcctgtagtagagacttcccccctctattgaatgttaatctgaaagtgaatctgaaagcagatggtcatgaactacccagggtctccattaagcccatgaagtttattttaaaactcttaaaatagattgagattcaaattgagattcatgtctattttttaaacattgtgtcttaacaaagtagatgttcagtcatacagttaggcaaatgttctaaggaaagatgtttaccatgctaagttaaaaaaaaaaaaaaaaaa

SEQ ID NO: 2335 - DNA, 1927 bp, Homo sapiens
ggcacgagtctttacctgggtgatctatcattgcgcactctatgtccatgtgcagacattatttagctcccactttaagtgagcacatgctgtatttatctttccgtgtctgactactgatcacaagcctttagaagcccctattgcctatagaaaacaatccaaactccaccttagtctgatagtaaaggttccttatgctaaaacctcagtttaactttctagcatactctcctatttctctccttctacactgtcccaaaatagattattcattattttgctttcaatgtttcccatgcttttctgtgttcttggtcatttaatgcacttttcccgtgcttcatgctttccatctgtcagaattccatagctttcaaggccccttcaaatgtccctggtctcttcctctgcccctccctacccccaacaagcggtgtgtatacacatagtcccctggtggtgtgtgatcctctgtccagtacgtcggttctggtctggcttctgtcttttgcagacacacctcactatgcagtcacgaggcccttgaggacaggaaccatctctttcttcgaatgcacctttcccagtaggcacacggctgttattgaataaacacagatcctggacacttgctcaaattgacaaaatttgcaggagattcaaagtggaaacattttactgaagggaattcggcaaatacatcttgattcttgtataggtggtcagtttgtaaaggatcatcaagtattttgaagactcattggctctgccagtggcttagataaataaatttgggcaagttattgatctctctcctcagagaaaaaaattgatgtgttttcttttatataaagagaaaaagaaaaagaaaaaatgtgatctgtaactcattatgtttccttgctagaaagctcaaagatatgttatttgcctgtttttagttgctatccagttttcttacaataatctctctgcctcagtctcctcatcggattacttgtcacatgtgttaaatccttcttttaattgatggttctgttgtatatatcttttatatttatataggtagcctcaactctcctttttttggagagtggtaatagaaatataaataataaatagttgccctttggtttccccaacctgtggtgacaacaagataataaaacagatacttatcctatataaaacaggcaaaaaggctttgggacaatatgggaatcatgatgtgggtttggtggaaagcgagcaaagcaccttgtaaggatcttgtagtctgaagattaaggtgtgcttggggtaggtcatgtcctcccagctctgtgggatttgtagcacatcatcccacgtggggaggagagtgggcatgggcatgagactatttattagcttttactgtgtcagttgttgggttatgtattttgcatttgatatttaatttaatctttgtaatagccagagacttggatcttattggcatcattttccagatgagcagagctaataaatggcagaactagaattcaaatctgaggctctctggcattgaaaacaacaacaaaacatgtttctactcttcaaagagactttttctcctggattgtcacttgtccttttctttctctttctctcctgacattggtatttaaaatgagaacctaggaaacttgtttcttctaacctaatgtttttgaagcagttttaggtccttggagatgtgccttgatgtgtctatacaatatagtatttggtattgttagatataaagaagacctgaggccgagtgcggtcgctcatgcctataatcccagcacattgggaggccaaggcaggcagatcacttgaggtcaggagttcaagaccagcctggccaacacggtgaaaccccatctcttctaaaaatacgaaaaaaaaaaaaaaaaaa

SEQ ID NO: 2336 - DNA, 793 bp, Homo sapiens
gtgtggaagacaaatggtcacaacttgggagctcagtgcacgtatctaggtgactgggaagagggtggcaccaataccagcaacagagcaatgaggaagaggaaccggtttgcagcagaagaraaattttaaacgggttgcatttgagcagctttggaacatccacatggagataacaacagagagttggaaatgctagtctgaaccttaaggaggaaagctctacttttggcagaagaactggaacgtatcccctcttcctggagtgcctttccctcagctgtctcctttccggtcctcagtaaggtctctgctcaagtaccccttcatgccctttcctgccaccctacaatggtgcccctgtcacacacaccaccgccctcgctctgctcagttcttctctgcacctacctgagattttgcttattacctgctyccctyctcgagcatcacctttagagttgggacactagtctcaacttcctgtttgaaaaactgaacattaaaaggcaaccatgtcaagaatattcagaatttgagaccagcctggccaatatggcagggccccatctctactaaaaatacaaaaattagtcaggcatggtggtacatgcctgtaatcccacctacttaggaggctgaggcaggagaatcggttgaagccaggaggcagagggtgcagtgagccaggaaatgtcgccactgcactccagcctgggcaactgagtaagactttgtctcaaaaaaaaaaaaaaaaaaaaaaaactcgagggggggcccggtacccaattcg

SEQ ID NO: 2337 - DNA, 1943 bp, Homo sapiens
ggcacgagctagtctcaagtttttttttttttttttttttcaaaacagatttgtaaaaattgtatttgttaacactgtgcacaaacgttttatactaaataaatatcaaactacattcttctgaaagatgtttctattatttcttaggtcacttccatatatattatgtatagtgaaaccatttttaaaaagcaatgacttaggcaaaccaaccctagtttgttaaaccatttccctgtttttatttaaaaatgataaggttgtgcttctgtataaagtttgtacatctagcaatgtaaaatactgacacattaaaaaaaacaaaaagtagaaactcaattcttttgattcagtgctcttgtgtttttaaaaaaggaacaaaaagtaatgcaagactcaaaattttggagtggttggcatgcctctcttcattttactttttgactggctgcctgtatgccgatgatgatgtactgagctgtttgtgctgctgctgctgccatagccattcaaaaagtttgaaagctaccagggttagaaaaggacaacatagaaaatgaaataatagaaaagttagcagtatgattaatcttaagtatcaaatcatagacatttcagaataaatttagtatatggtctcctgttagttgggggtaccactgataatggaactttctggacacaaaaagagaaggagtgcattatgtatcaaagcactgaacctctcttctcttgcatctgtataaaatttgatattgatgctattttgtttagaagagtatattatttttgaaataaaaccaacaaagtaggagaagggagatggaagaaatccaaactattgtacaacaaagctggtagacagacaattgctttaaacaaaagatgctgcaatgaatatcagactactctactaacaataaaggtggtgaactgagactaagcattgtttgttatttttttagctgaatgggaccacagtaatcagttcaacactcattttacatatggggaagtttgaaggccaacatgatttaagtgactcagactcaaagttaatatggcagtctgtggctaagaacattctcatgatttttttcagactagagttgtttccactaaattatactacagctattttcggaaattcacaattggtctgataaaggtatatgattatataaacttctatttggaaattcactacctctaaattggaactttatatgtaaggataactgacttccaaaataaagattatcattctaaaagacttctaaaggcatcatagtaagcccacagtgataagatgctgacaacacagtcactcattcaatcctcaaactcttatcatagttttcttatacatatggcttactcttttaattaagtgtgaagttagaattatcgtcttcaactgacaggaagttagaattatcgtcttcaactgacaggaagttagaattatcgtcttcaactgacaggataatcattaagagtaatctttagttcaccatttactgctggaagtgttgagaagtaatttaatctttttttttaaatgataaaagtgacttacagaagttatgctattgaccattaagacttaagtcatttatgcaactacaagttaccagaacgagacaaaagattatgcaatctagaaaaattcagtcttaacccaggaaaacaaaaaagttattaattaagataactattggcaaacactgaaaacagctctggtaacctagtaaagtggataattattttgccagtaaactgtaacaaggaaacacaactgtggtaattatgttaagtcaaagctcttaatccactatcaatgaaaaaaaatctcagccatcaatcaatttaatagtttacacattatagctttactttttcctgtttactggttgcaagggaaggaaaagaaaataatttaa

SEQ ID NO: 2338 - DNA, 1479 bp, Homo sapiens
gctcgtgccggtttgggtctagttcacatgctcatccctggacctaccactgcgaccgtggtatcaggcactctggctcagccaaggttatatgcccatgtctctgtgtggagtgggtgaaggaggaggaagtaaatgatatgcagtttgatataatagcaaataaccaaggggaatagcaataaccaagggaaagggaagctgaacatttatgatatcctgtagtcaatacccccttaatttattttttgcatggcttaaagccagggctcttatttcccatttggggctttctgtttttttcttgagcttttaatgaacgtttacatttcatcagtttggatttctttgctgccagtgttggatatttgcttttttaaaaacaaaccaaaaaactatcatttaatatatccacctttctacttagactccatcttgaaaagaattatattggcccattggacacattttctcccaagatttaaactgtgaagtaagggatgaaaggatatgtgtcaatgtttgaaggaccaggcagggctgtggcatgtctttgcctgtgattcctatcaattattgtatcctggtttcagttttctagttctcttttgagtgggttctwatattctttcaggaaagtttatttttgctaataatggccagtgtcaatttccagtgctcacaagcaagaaccatgctttcagaaggttggtataagaaggctactgccattctcatgagacttgtaggactctttgacagtagagaaatcacagtagaaaaatacaacttctattgtttgccctgtatgttgcttccctttgatagcagggactcacattaaatgaagccaagaagttacattagagcctttgctgcccaatatgatattactagtcacagatgactgttgaaacctaaatttaaattagaattttaaaaaattaaaattcagtttcttcagtcacatgaagtacatttcaagtgtgcactagcaacatgttgctagtgactatcatattggaaggcacagattgtagaatatttccaccatcaaagaaagttctatcagacaacactgttggagtataaactcaagggtaggcattctgtccttgttattttctgatgtatccacaacacttagaatgggcttagcatgtataggtactcaataaatatttgttgaatgtcgaaatagcatatattgggaggccaaggcgggcagattacctgaggtcgggagttcaagaccagcctgcccaacatggagaaactccgtctctactaaaaatacaaaaaattagccgggcgtggtggtggatgcctgtaatcccagctacttgagaggctgaggcaggagaatcacttgaacccaggaggtggaggttgcggtgagctgagatcacaccattgcactccagcctgggcaacaagagtgaaactccatctctaaaaaaaaaaaaaaaaaaactcgta

SEQ ID NO: 2339 - DNA, 538 bp, Homo sapiens
ggcacgaggagttatcagtctggttagagctgggctaaacatttagtcttaccatcagtttaaaagcacctggaccagttagttgctgtacaggcaaagtcaaagggagaagcctggcctctctctactcagtcaaggttcatgactttaggagactgcaatgaaccaggcataccaggaaaggaaaaggttaactgaggttgaaaaaaaaactttatgtggcacttttaaacaagcaggttggtttggcttgtgtgactatgatggtgcctgattttgagcagagcaatttgtgttgtgacattttaaaatccattctggcacttggtgatgaatgtgttggctggcagctaagaacttgctagaatgcaagtatgcaagtcttcaccatttataatcgacacttcctttccaggaaagagcctttctaatctttgaatcagtggatttatcaatttgcataaaatatgccatcctcaatgaacacatttatcatctaccacttaactttccttctgttaaaaaaaaaaaaaaaaaa

SEQ ID NO: 2340 - DNA, 1090 bp, Homo sapiens
gcacaactctgggaggaagagtatcccaacctttgggtgaacaaactgaatctcaaatattttataatttatccaagctggtaagtggcagagctgggatttgaacccaggtctgtcttgttctaaatgccctgctttttttcactgcatcttcctcttgtgccatgtggttaaagataggcttcctttcaatattcagtttagttctattttacaaaacttcactaagcacctaccatgtgccatactctctggtgggcccagaggacaaagagatgtattagacctgacccctgacttgaggaactccatgtttaatggaaaagtagatgactgaccactaagatccaggatttaggtttctttcttgctacccatagaaatagcaatattgccttgtggatccctggaccattttcctcatgggaaggatatctttggcttggattaaaactgcaaagcataggataagaagtcagttctcaggtcactggttcacttagcttttttgtggctagaattacagccaagaccaggtccagccaggctgggcacaggtgtaggggatgtcaagctgtggcaccttagtgacagcaggaagcatggggccttcagtgcttggggtgaagtgagggtggttctaggcccatcactagctcacatggtataatgagaataatctagcagatttgagttcattctctggctttgccacttacttgtgtgtgactttgggcaagttactcaactctaagtctccattttcttatctagaaagtcgcactaggccgggtgcagtggctcacacctgtaatcccagcactttgggaggccaaggtgggtggatcacgaggtcaggtgatcgagactatcctggctaacatggtgaaaccccgtctctactaaaaatacaaaaaattagccaggcgtggtggcaggtgcctgtagtcccagctactcgggaggctgaggcaggagaatggcgtgaacccgggaggtggagcttgcagtgagctgagatcgcgccactgcactccagcctaagcgacagagcgagatccgtctcaaaaaaaaaaaaaaaaaactcgta

SEQ ID NO: 2341 - DNA, 2025 bp, Homo sapiens
ggcacgaggttaattgtagataaagaatagttttcttcctcttctccttgggccagttaataattggtccatggctacactgcaacttccgtccagtgctgtgatgcccatgacacctgcaaaataagttctgcctgggcattttgtagatattaacaggtgaattcccgactcttttggtttgaatgacagttctcattccttctatggctgcaagtatgcatcagtgcttcccacttacctgatttgtctgtcggtggccccatatggaaaccctgcgtgtctgttggcataatagtttacaaatggttttttcagtcctatccaaatttattgaaccaacaaaaataattacttctgccctgagataagcagattaagtttgttcattctctgctttattctctccatgtggcaacattctgtcagcctctttcatagtgtgcaaacattttatcattctaaatggtgactctctgcccttggacccatttattattcacagatggggagaacctatctgcatggacctctgtggaccacagcgtacctgcccctttctgccctcctgctccagccccacttctgaaagtatcagctactgatccagccactggatattttatatcctcccttttccttaagcacaatgtcagaccaaattgcttgtttctttttcttggactactttaatttggatcctttgggtttggagaaagggaatgtgaaagctgtcattacagacaacaggtttcagtgatgaggaggacaacactgcctttcaaactttttactgatctcttagattttaagaactcttgaattgtgtggtatctaataaaagggaaggtaagatggataatcactttctcatttgggttctgaattggagactcagtttttatgagacacatcttttatgccatgtatagatcctcccctgctatttttggtttatttttattgttataaatgctttctttctttgactcctcttctgcctgcctttggggataggtttttttgtttgtttatttgcttcctctgttttgttttaagcatcattttcttatgtgaggtggggaagggaaaggtatgagggaaagagagtctgagaattaaaatattttagtataagcaattggctgtgatgctcaaatccattgcatcctcttattgaatttgccaatttgtaatttttgcataataaagaaccaaaggtgtaatgttttgttgagaggtggtttagggattttggccctaaccaatacattgaatgtatgatgactatttgggaggacacatttatgtacccagaggcccccactaataagtggtactatggttacttccttgtgtacatttctcttaaaagtgatattatatctgtttgtatgagaaacccagtaaccaataaaatgaccgcatattcctgactaaacgtagtaaggaaaatgcacactttgtttttacttttccgtttcattctaaaggtagttaagatgaaatttatatgaaagcatttttatcacaaaataaaaaaggtttgccaagctcagtggtgttgtattttttattttccaatactgcatccatggcctggcagtgttacctcatgatgtcataatttgctgagagagcaaattttcttttctttctgaatcccacaaagcctagcaccaaacttctttttttcttcctttaattagatcataaataaatgatcctggggaaaaagcatctgtcaaataggaaacatcacaaaactgagcactcttctgtgcactagccatagctggtgacaaacagatggttgctcagggacaaggtgccttccaatggaaatgcgaagtagttgctatagcaagaattgggaactgggatataagtcataatattaattatgctgttatgtaaatgattggtttgtaacattccttaagtgaaatttgtgtagaacttaatatacaggattataaaataatattttgtgtataaatttgttataaaaaaaaaaaaaaaaaa

SEQ ID NO: 2342 - DNA, 986 bp, Homo sapiens
ggcacgagcagcaaacagggaccacggctaatgatgtgctttttaggggcaggatgcatagagtttaagacttggactatggcctggattgcctgggttcaaatcctgcctctactctatcacttcaggcaggcaggtccttaggctctttgggccttctcatttcctcttctgaaaaggaaattcacctcgtgctgtagtaagtccgtgaattgatatctgtaaggcacttagtaagcactgtatactgtttgactatttgtcttagtctgctcaggctgccataacaagataccatagactggccaggggaggtggctcacgcctgtaatcctggtactttgggaggccaaggcaggtggaccactggaggtcatgagttcaagagcagcctggccaacataccaaaattccgtctctagtaaaatacaaaaattagctgggcgtggtggtgtgcgcctgttaattccagctactcggcagtctgaggcaggagaattgcttgaaccagggaagcggaggttgcagtaagcagagatggcaccactgtactccagcctgggtgacagagcaagactctgtctcaaaaaaaaaagataccatagactgggtggcttgaacaacagaaatgtattttctcacagttctggagactagaagtcccagataaaagtccagcatggtgctgggtgcagtggctcacacctggaatcccagcactttgggaggccaaggcgggcagattatgaggtcaggagttcaagaccagcctggccaacatgatgacaccccgtctgtactaaaaatacaaaaattgcctgggcatggtggcacatgcctgtagtcccagctactcaggaggctgaggcaggagaatcacttgaacccaggaggcagaggatgcagtgagccaagatcgcgccattgccctctagcctgggcgacagagcgagactccgtctcaaaaaaaaaaaaaaaaaaaaaaa

SEQ ID NO: 2343 - DNA, 627 bp, Homo sapiens
gaattcggcacgaggaagttcaacctggagagatggaaaatcagctctcataactaagttaatttagtataaaaatagaattgatagtgagggtataaagtgtaaccatcagttaaacctctcctgtcattcctggcttccttgcttcagaattgaaatggaagtgggggtgtccctactctgtagaatctgggactgggcaaatgtttgtgtggcctccttaaactagctgttatgttatgattttattctttgtgagttaattagaataaagtcattttcttccaaggtatggttcatttagtctatagtctcctggttatgaaattagcatcctcccagatctgacagctccctgaggggttatataaggagtagctcacttgcaaacataacatgatgctcaattcaaaggttctagctgctgtgggtctggagttatgtaagctgagcagtagcaggaaactctgcttaaaatattgtttaaagctgtgcgtgctggcatgtgcctgtaatcccagctacttgggagactgaggcgggagaatcacttgaacccaggaggtggaggttgcagtgaactgagaccatgccactgcactcactgacagagcaagactctgtctc

SEQ ID NO: 2344 - DNA, 1220 bp, Homo sapiens
ggcacgaggaaagtctgaaattagcaagttatgaaattaaaaaatcatcgagatttaaaaaatatttttgggcttcatcttcatatgtgaagaaagtacgtgtgccactcacctgaaggaatgtctgcataagtattgcagtttctttaacccaacaaggtgtgattgcatttattcacatggacagaataacaaacccaaaactttatcgttcgttgatgagaagtgttagtcatttatttgaatgtcagttttaagctactgataacatgattgattagcaacggaaacattttagaagataccacgcatttgtttaattcaaatggtcaactgtcaggatacatcgctctcttattccactctcaccacaatctaactttaaaacattctcatcaccctaaaaagcaaccttggcactccccatcctccccttccatcgcccgtgccccaggcagcccctggttactttctgtctctgaggacttgcctgtcctgggcgttccacgtaaatgagtcagacctatgcagtccctgctggcctccttcactggcatatactcttttactggttcatttgtattgtagtgtatatcagtacctcatttctgtttattgccaaataatattccatcgtgtggatacaccacactttatttatccattcataagtgatggacatgggttgtttctactttttgcctactacgactaatgctgctgtgagtattcagggttctagccaatgcagttaggcaagagcaagaaggtggcgtccacattgtaaaggagagcaaaactctctctgtatgtgtgacatggtcatgtccgtaggaaatcctcaggagtcacccagccctctattaattaaaggggtttggtaagattgtaggacgcaagatcaacacacaagaatgaaattgtatttctgtatgctaacaacgaaccatccagagatagaattaagaaaacaattgtatttacagtgcatcaaaaaatatttcattgtgttaagacggcaacaattctagcttcttttatctataggttctgtgtaatacctactaaaatcccagctacctttgcataaattggcaagctgattctgaaattcacatggagatactagggattcagcatggctacaacgatcttgaaaaacaaacaaagttagaggacttgcaactcgtgatttcttctttaaaaaaaaaaaaaaaaaa

SEQ ID NO: 2345 - DNA, 657 bp, Homo sapiens
gaattcggcacgagagcctccacagcctgcaggtatccagacgacgttctgcacacagagactcagactcccaccagggcctcacgccccactgcctctccgggatgcctgcgtgtggctcactcccgccacgggcacatcagccctggtgcccagctggccttctgcagagcctggtgctggagcagcttctcgaattctctgctgcctcctccccacagccttccaggscctcagagctgctgccaggccagcacctccttgggcccgtgttgaggccccacggggctgggctcatgtgggagctgatcttggccgggtgatccctcactgctctggacaaaagggagccatgggccgggcatggtggctcacgcctgtaatcccagcactttgggaggccaaggtgggcggatcacctgaggtcggagtttgagaccagcctggctaatgtggtgaaaccccgtctctattaaaaatacaaaaattagccgggtgttgtggtgggtgcctgtagtcccagctactcgggaggctgagacaggagaatggcgtgaacccgggagrtggaggttgcagtgagccaagattgtcccatmmagcctggsygacggaggaagactctgtctccaaaaaaaaaaaaaaaaaaaaaaaaat

SEQ ID NO: 2346 - DNA, 1026 bp, Homo sapiens
ggcacgagcacaactatagattacagttctagatcttagtggtctgaattatgtggaaaaggtatacaccacacttcgaggattggctactttcactacaaaaaaatggagtcaccctaagctttttgtaagaagcatgtattgaatttgtaatcattgtaaagggtttaaaaaatggcatttctcaaaggatggctaccattttgctggagccaaagaagtatccattcttatttatgatttctggggcctccctgacccaactacttgttcaagacttttattttgacttagaatgatgtaaaaatgacttctgttttggtgaaggaggctgaaagtgaacggaaatgtttgtagagggaaataaagtataatgtgccattcacagatcattgaatagaacagaagactcccctttttaaaatgtttgctgctgcaactgtgtggtacaatgaaggaaaattcacgcttgcagatgctttgttcaagggcatttgtagtttccatgtgtgttcaactgacttctaaaggcctttcaaacatatgatcttgcctccacttcctgtgaaattaacctcctttctttaaaaatacaatgatttaaagaaaattgccaccataaacaaagctaaaagactaggggaaaatatttgctgcatatgtagtcaacaggattaccatctataatatataaagaggtcctataaattgaaaatttggccaggtgtggttgttcatacctgtaatcccagcactttgggaggccaaggcaggagaatcactcgagctgaggagtttgagaccagccctggcaacacagggagaccccatctctacaaaaattaaaaattagctggacatgatggtgtgcctgtagtcccagctgcttgggaggctgaggtggaaggaccacttgagtctgggaggtcaaggctgcagggaactatggtcacaccactgcactccagcctaggtgacagagcaaaaccctatctcaaaaaaaaaaaaaaaaaaaaaaaactcgag

SEQ ID NO: 2347 - DNA, 1535 bp, Homo sapiens
ggcacgagatcttagtgtttttgtatcggtcaaaaatttatctgactgaataattagaaataatttagggaagaatcacttaaaataacagtggcaaaaatactgtagaatgtcttgattggccatataatgttactcgtttttcctaaatgtttagtcattttttactgttcctttaactacagattacatttttttgtttgtttgtttttactgtcttcacaaatgcttccaaatatggctgcttccaaccctgagtttaacccaggaacaatactgcaaactgctcaattcagtagtgagtgggctatatgcatacctactcatcaaagctattatttaaagaattatattttttagcactcttagcatttcaagataatgcatgcactcagttcccaaagtgtattattgcttcttgaaactcctctttgatctgctgaaagtaatgatggctaccatcttaaacagaccctaaggttgagagtaaacatataaatttgaaagctgtttattgatatattgattatcagtggtcacttacctatcagtgaactttggtagtgacacatacagactggtatttataacgtgcaggcaaaataagtactgtgaccttgaaagattttttttttttttttgagacttgcactcaaaagattttttttttgagtcttgcactgtcacccaggctagagtgcagtggcaagatctcggctcagcctcccaagtagctgggattacaggcaccccactaccacacccagctaatttttatgtttttagtggggacagggtttcgatatgtttgccgggctggtctcaaattcctggcctcaagtgatctgcccacctaggcctcccaaagtgctgggattacagacgtgagctaccacacctggccttgaaagattattttctatttctgacccattatataccacccatactgtagtgcttgtattttctctcacacatactgtattttttaacttgagagagtgtatttggtagactagatgacagtctttttgagacagagttttgctcttgttgcccaggctgaagtgcagtggcgcaatcttggctcactgcaacctccgcctcctgggttcaaggaattctcctgcctcatcctccctagtagttgggaatacaggcatgcgccaccatgcctggctaattttttgtatttttagtagagacagggtttcactgtgttagccaggatggtctggatctcctgacctgtaatcccagcactttgggaggctgaggcaggaagttcacttgagcccaggagttcataaccagtctgggtgacatagtgacacccaatctctacaagagataaaaaactagccgggcatggtggtgcacacttgtggtcccagctactctggaggctgaggtaggaagatcacttgagcctaggagctcaaggctgcagtgagccataattgcgtcccggcactctgcctgggcaacagagggagaccctgtctcaaaaaaaaaaaaaaaaaaaaaaaaaaaaa

SEQ ID NO: 2348 - DNA, 1242 bp, Homo sapiens
  SITE (14): n equals a,t,g, or c
  SITE (15): n equals a,t,g, or c
  SITE (1016): n equals a,t,g, or c
gctcagattcggcnnagattttgttataaagataatacacacagagagaagcgcctgcagtgaatctttgtgtaaccatcatgcagatcaggagacaaaccatggcggcccctcagaactctgccacgtgtttcttcccatcttttcctgctgctgctcccagaagtaaccctattccgacttttctgggttttcttggtaatcaatttctggtttttctttatagagttgttgcctaagtatgcacccttcaacacgatactgttgttttgcttgtactttttgttaactgtacatataataaattatgttatatatttctttattgcaggctcctttaatccagtgttatgtttgggagacgcacccatacaactgcatgtcaccgtagcttgttcatttccagtgtcgtgtagtgtcccttcatgtgaatttatcacagtttattagtatcttccactctgatggacatttggtagttggaattttcattactaatgatgcccctgcctgtggtcattcctgcctgcctcttgatgcacacaggcacgcatttctgctgggtatgtcctagttccagactcactggttatacggtatggatgtaattattgttagttttccagtgtgattaaacatcagattagcgcccattagcaatgtctgaggctgcctgttgctccactcgggtgcccgtttggtattaggagcttcttcagccattcttgtgtttgtgttcatgtatctcattgtggttttaattttcatttctataatgactaatgtggttgaatatgtttttgtatgattatttgccatttgtatttgctctttttaaagtatttgtacaggactttcacccattctcttattgtgttgccttatataggaattatttctatgttctagatatggatcctttgctggccatatatgttgaaagtatctccactctttggcttgcctttcattattttaattgkgtcttgctgaacagaaggttttaatgtcaaggnagtttttagtcaatcccctcatttatgattggtgcattttgkcaggtttaagaagtcttttctttcccataagaacgtgaagaaaacatattctcctatgttttatagaccataggttggcaaacttttttctgtaaaggactaaatagtaaacattttaagctttgtggaccacagatagtctctgctacatattcatcttaaaaaaaaaaaaaaaaaactcgag

SEQ ID NO: 2349 - DNA, 633 bp, Homo sapiens
gctggtcaacatggtgaaccctgtctctactaaaaacacaaaaaattagctggacgtggtggcaggtgcctgggtgcctgtaatcgcagctactcgggaggctgaggtaggagaaatgcttgaacccaggaggtggaggttgcagtgagctgagatcgcaccactgcattccagcctgggcgacaagaacgaaactccatctcaaaatatgtatgtatgtgtgtgtgtgtatatatatatatatatgtatatatatatgtatatatatgtatttatgtatatataaatcaaaatgaaaaacctttttggatactaagagcaacaaaatttagggaagtaatttcttaagtatagattaaaacaaatatttatgcagcctggtgactagaaggctgttgtgtaactaaacaccatgaaacttaatattgcgatagtcctccccacatgaagagagagtgtgagtgatgaagggccatgttcttatatctattaaaactcaagagggaatttggttgcatatgaaaggacttaggtattataaagggttagatacttggaagaactgcaagtttaataagatgctgaaataagttgccaacagaaatgttggttattaaaaaaaaaaaaaaaaaa

SEQ ID NO: 2350 - DNA, 422 bp, Homo sapiens
ggcacgagcaggactgatggtgaaacctgaaggcatagacatgacccatagctgcctttatgttttacaacttcctgttgattttcattttcctcgtttgtcagtcatctcccttgacttcccacatctatctatgttgcatcctagcctggtgcctggcctggcggaggcattggaacattggaaagaatgaatgaatgagtttagccctctggagagtgtatgctgaaaaactgttacctcgcctttaagagcttaaaagtgaagagaatgaattttgatagaaccatttttttaaagtaaggaccatccttctgtgtccccagaaaattaaatagagtcagaaaatggcaaagccaagttagaagcattcaggtgtggaagttgtatagggcacttgagttaaaaaaaaaaaaaaaaaa

SEQ ID NO: 2351 - DNA, 535 bp, Homo sapiens
  SITE (11): n equals a,t,g, or c
  SITE (13): n equals a,t,g, or c
  SITE (162): n equals a,t,g, or c
  SITE (422): n equals a,t,g, or c
tgaaatatatntncatatggaraagggtctcccttggtcgctggatatggtttggctgtgtccctacccaaatcttatcttgaattgtatttcccataattcttaggtgtaatgggagggacctggtkgggaggtaattgaatcatgggagcccagtctttncctgtgctgttctggtggtggtgaataagtctcatgagatctgatggttttataaaggggagttccccgatcatgctctcttgcctgctgccatgtaagacatgcctttgcttctcctttgccttccaccatgattgtcatgtcttcctagccaagtggaactgtgagtccattaaacctctttttctttataaattacgtgggtccaaggccaggtgcagtggctcacgcctgtaatcccaacactttgggagtctganggcaggcggatcacgaggtcaggagttcaagaccagcctgaaccaacatgatgaaaccctgtctctactaaaaatacaaaaatttagccaggcgtggtggcacacacctgtaa

SEQ ID NO: 2352 - DNA, 2259 bp, Homo sapiens
ggtcgacccacgtcgtccggaagccaggagtcctttagaagtctatgattcccatcaccgcggggctggacagctctcttggggaccttccctgtgcacctgtgaccgtgtctgcccctcataacaccctagtcacaatgccctttcagttccccaaaaaagctagactggtcccacttctgggcctctgcctggagtattcacagaccctcagtcgggccccagcttggatgagtgtcagcagaggccctccccactccacctggattaaagcaggtctgcctggcgccctgcaccacacacccttccctccctcagcgtgtctggcccgaccagcacgcagcttccatgatggcagggcctggcctctcctgcacgccatgcaggcctggcccttgccaaccactggaccttagtaaatatttgaggagcaaaagaagcaaacgctagtgggtgcatgagtggtggcagagtctggttctgaggtttcygagcttaaggccgtgcagcagctggctctgctcccttgwkattctggtgcccactcccttgccaggtttcaggcacccgtggatgagcagtcagagagtctacagaacacgcacgacgacagcaggaacagcgcggcctcagccaggaataatccaggaagtgtcccggaaaagagagagaagacatcagagcctaaaggaaacagctgggctccgaacggcctctcagaagagcctctactgaaaaatatggatcatcacagatccaamcagaaaaatggggscgatgtccccacatgragggaacacccgacttagcaaatgggaccggtccccagggtcaggctcttagagcaggcacaagactgggacactggacagaaggttgttcccatgatggttttttttatttgttatttttgagatggagtttcgctctgttgcccaggctggagtgtaatggtgcgatctcggctcactgcaacctctgcctcctgggttcaagcgattctcctgcctcagcctcccgagtagctgggattacaggcgcctgacaccacgccccgctaattttttgtatttttagtagagatggggtttcaccatgttggccaggctggtctcaaactccagacctcaggtgatccacctgcctcagcctcccaaagtgctgagattacaggggtgagtcaccgcgcctggccaatgttgttgttgtttttaagacagaatttcactctttgttgcccaggctggagtgcaatggcgcaatctctggctcaccgcaacctccgcctcccaggttcaagcgattctcctgcctcagcccccagagtagctgggattacaggcatgtaccatcacacccagctaattttttgtattttaagtagagagggggtttctccatgttggtcaggctggcctcgaactcccaacctcaggtgatccgcccacctcggcctcccaagatgctgggattacaggggtaagccactgtgcccggccggttatttctttaaaaggtaatcatttgtcaagagtaaaacccagaagctctgacaggccataatttcagatcctttggcttgggcagttttgattttccccgtgtttgcatggcatgaagtcttcgtccttgtcacagtagcttgggatgactcccagtccacatggaaaacatcagggagtgacaatccagcaagaaatccctcgctagttccacacctacgcaccgagcgtcggtgtgccaggccctgtgctgggcagagtgtggtatgtcagggtgtgccggttttaggtaacaagactccaccactgagtggcacctgccctattgcaaaggaatccagttcctccggaataacagtcccactgttaacctggtgctactgggaagttccacacagtaatctgagcagtgactcatggaaggatgaggaacgtttgctccagcttctctccctttccagcaagggcagagctcctaaagccaggggttagcacctggccagcttatgtggcagatggtctcagttacaacttcgctgctttcccaaactcctgcagccctcctgagtccgacttccgttgatagcaaggcactgggtggcagcaaccttttttctagtagttttttcccagcagttttccatttctccacagtatccttttcatttagaggagcttaataaatgctttttaaaaaaaaaaaaaaaaaaaaaaaaaaaaaaaaaaaaaaaaaaaaaaaaaaaaaaagggcggccgc

SEQ ID NO: 2353 - DNA, 854 bp, Homo sapiens
ccacgcgtccgccaccccagtcccgcagccggcaccccgatcccacagccggcactcaccccagtcccatagccagcacctcgatcccatagatgacaccccgatcccgccccagtcctatagcccgcaccccgatcccacccgagtcccgcagccggcaccccatcccacccatgtcccacagtcggcaccccgatcccactcggatccggcagccagcttggatcctgtggccctcctccagcccccagggctcatttatatgttttattggcagaggctggggctggctctgttggcctctgtgctgggtttcttcctctgcaccgcagactggctctcctgacctctccaggtgtcatcgaacacccttgtgcttgctgtcacccgctgcctgtctgcaggatcccggattccgtatcaggggaccgaaattagtcggaaaataggaagcaggtgctcgcttggatggaaccctgaccctgtgctcacacttgtaggaggagggctctgcaggccgcctcccggaacgggaggttcccaagccactgcacttcggaggggctgtaattagagttgcacattcattcagttcccagtaaagtagaacgtgctccagccagtgaggaaaaggtgtttttaaaaattagattggccgagtgcggtggctcatgccttttacctcaacactttgggagacaaaggtgggaggatcacctgtggccaggagttcaagaccagcctgggcaacagagcctgtctctggggaagaataaaaaaaaaaattgagccttaaaaaaaaaaaaaaaaaaaaaaaaaaaaaaaaaaaaaaaaaaaaaaaaaaaaaaaaaaaa

SEQ ID NO: 2354 - DNA, 971 bp, Homo sapiens
  SITE (41): n equals a,t,g, or c
  SITE (564): n equals a,t,g, or c
  SITE (565): n equals a,t,g, or c
  SITE (567): n equals a,t,g, or c
agtaaattaatgtaggaacagaaaacgaaataccgcatgtnctcttataagtgagagctaaacattgggtactcacggacataaagatggcaacaatagacactggggaagagggggaatggagggagggggcaagggctgaaaaactacctattgggtactatgctcactacctattgggtactgtgctcactacctattgggtactgtgctcactacctattgggtactttggtgacagcatcatacaatataccaatgtaacaagcctgaacatgtatcccttaaatctaaaataaaagttgaaattactttttaacaaargaaaatyccacatatttatattgaaaccaagccaagctgtggtcttctgcaatgttataatcaccctgtaaagtcaatatacaaaatatattgtattaattttaacatttctaggctattcaggttaaattttgkgttccaaatcwatctttcgtaatataagattcatattattctgatcacttctggctaaaccttaaaaagaattcccctatcaatacaaagaatattagttggganntnatatatatataataaataataataataatatataacataatttaaaaaaattttaatggcaaacagttgtatctaataaagattctgaatcctggtcgggtgctgtggctcacacctgtaatcccagcactttgggaggccaaggcgggcagatcacttgagctcgggagttagcgaccaagcctgaccaacaggagaaacccagtctctactgaaaatacaaaattagtcaggcgtggtagcacatgcctataatcccagctactcaggaggctgaggcaggagaatggcttgaacccgggaggcagaggttgcagtgagccgagattgcgccactgcagtccgcagtccgacctgggcgacagagcgagctccgtctcaaaaaaaaaaaaaaaaaactcgag

SEQ ID NO: 2355 - DNA, 1229 bp, Homo sapiens
ggcacgagctggggtggggctgagaagtccatgtaccgccagactatggtgagtgaccatagggtatgaccattatctctttgtaagtaagtcaatactgttccccacagatgaaacctcagagcatagaaacccatggattagcaggaaatgtcactgagtccattacaggtcagggatcactgaaaaatgtcattgctcttcgattgacactgctccctgcttcctcagctgctctgcatttgaggagaagccctgtgtgcctccagctgttgccaaggcagttaattaaacaaccggtccgcctgatgttcaccaaggtgaagctggagcaggtgctgaaaggcccagaggaagccctcgtgacctgcagacaagtgctgaggctgtggcagaccctgtacagcttctcccagctgggaggcctagaaaaggatggcagcttcggtgagggcctcaccatgaagaagcagagtggcatgcacctgactttgcctgatgcccatgatgcagactctggctcccggcgggcttcgtccatcgccgcctcccggctggaggaggccatgtcagagctgactatgccctcttcggtcctgaagcagggccccatgcagctgtggaccacgctggaacagatctggctgcaggctgctgagctgttcatggagcagcagcacctcaaggaagcaggtttctgcacaggaggcggcgggcctcttccccacttctcactcagtactctatatgcggggccggctggctgaggtgaagggcaacctggaggaggccaagcagctgtacaaggaggcgctcacggtgaacccagatggcgtgcgcatcatgcatagcctgggtctgatgctgagtcggctggccacaagagcttggcccagaaggtgcttcgtgatgccgtggagaggcagagtacgtgccacgaggcgtggcagggcctgggcgaggtgctgcaggcccagggccagaacgaggctgccgttgactgcttcctcaccgcccttgagctggaggccagcagccctgtactgcccttctccatcatccccagagagctctgacgacgctgcagccgcagggagggaggggctggccagagggagaggcagcagggaacgtgggtcagggtggggcaacagtggcatcaggtgcggggcctcagggaaatacatctttagtgaacgccaaaaaaaaaaaaaaaaaaaaaaaaaaaa

SEQ ID NO: 2356 - DNA, 1260 bp, Homo sapiens
  SITE (15): n equals a,t,g, or c
  SITE (37): n equals a,t,g, or c
cccggtttttagaanctaaggggattcccccccgggnctgccaggaatttcgggcaccgaagtgagaaaagagcctggcaacaagatgaagcaagccaagtctgtgggtgacctcgccccacctgaatgggactggaggagtaagggggctgtcacaaaagtcaaagaccagggcatgtgtggctcctgctgggccttctcagtcacaggcaatgtggagggccagtggtttctcaaccaggggaccctgctctccctctctgaacaggagctcttggactgtgacaagatggacaaggcctgcatgggcggcttgccctccaatgcctactcggccataaagaatttgggagggctggagacagaggatgactacagctaccagggtcacatgcagtcctgcaacttctcagcagagaaggccaaggtctacatcaatgactccgtggagctgagccagaacgagcagaagctggcagcctggctggccaagagaggcccaatctccgtggccatcaatgcctttggcatgcagttttaccgccacgggatctcccgccctctccggcccctctgcagcccttggctcattgaccatgcggtgttgcttgtgggctacggcaaccgctctgacgttcccttttgggccatcaagaacagctggggcactgactggggtgagaagggttactactacttgcatcgygggtccggggcctgtggcgtgaacaccatggccagctcggcggtggtggactgaagaggggcccccagctcgggacctggtgctgatcagagtggctgctgccccagcctgacatgtgtccaggcccctccccgggaggtacagctggcagagggaaaggcactgggtacctcagggtgagcagagggcactgggctggggcacagcccctgcttccctgcaccccattcccaccctgaagttctgcacctgcacctttgttgaattgtggtagcttaggaggatgtcggggtgaagggtggtatcttggcagttgaagctggggcaagaactctgggcttgggtaatgagcaggaagaaaattttctgatcttaagcccagctctgttctgcccccgctttcctctgtttgatactataaattttctggttcccttggatttagggatagtgtcccyctccatgtccaggaaacttgtaaccacccttttctaacagcaataaagaggtgtccttgtaaaaaaaaaaaaaaaaaaaaaaaaaaaaaaaaaaaa

SEQ ID NO: 2357 - DNA, 1124 bp, Homo sapiens
ggcacgagggaatttgagattgcactgaaggccctctcagtactacgctacatcacagactgtgtggacagcctctctctcagcaccttgagccgtatgcttagcacacacaacctgccctgcctcctggtggaactgctggagcatagtccctggagccggcgggaaggaggcaagctgcagcagttcgagggcagccgttggcatactgtggccccctcagagcagcaaaagctgagcaagttggacgggcaagtgtggatcgccctgtacaacctgctgctaagccctgaggctcaggcgcgctactgcctcacaagttttgccaagggacggctactcaagcttcgggccttcctcacagacacactgctggaccagctgcccaacctggcccacttgcagagtttcctggcccatctgaccctaactgaaacccagcctcctaagaaggacctggtgttggaacagatcccagaaatctgggagcggctggagcgagaaaacagaggcaagtggcaggcaattgccaagcaccagctccagcatgtgttcagcccctcagagcaggacctgcggctgcaggcgcgaaggtgggctgagacctacaggctggatgtgctagaggcagtggctccagagcggccccggtgtgcttactgcagtgcagaggcttctaagcgctgctcacgatgccagaatgagtggtattgctgcagggagtgccaagtcaagcactgggaaaagcatggaaagacttgtgtcctggcagcccagggtgacagagccaaatgagggctgcagttgctgagggccgaccacccatgccaagggaatccacccagaatgcacccctgaacctcaagatcacggtccagcctctgccggagccccagtctccgcagtggagagcagagcgggcggtaaagctgctgaccgatctccctcctcctcaccccaagtgaaggctcgagacttcctgccccacccagtgggtaggccaagtgtgttgcttcagcaaaccggaccaggagggccagggccggatgtggggaccctcttcctctagcacagtaaagctggcctccagaaaaaaaaaaaaaaaaaaactcgagggggggccc

SEQ ID NO: 2358 - DNA, 920 bp, Homo sapiens
gagcacctcaggggaggtgaaactcaggtggtcttgtggcatgcgtgggtgtccctctgcactctggcctctgtgctcttgggtgctggtgctgtgtcacacgccagggcatgtgaaggcaccacaggtgtgaacgagtccccgatgatgacctggggggaggttgagaacacacccttgagagttgaagggtcggaaacgccctacgtggacaggacacccggcccagcttttaagatcctggagccaggccgcaggaacggctgggtctgaagatggccaacgaggccgctgccaagaaccgggccaagaagcaggaagccttgcggagagtgacggagaatctggccagcctcacccccaaaggcctgagcccagccatgtcgccagccctacagcgccttgtgagcaggacggccagcaagtacacagaccgggccctgcgggccagctacacaccatccccagcacgctccacccacctcaagaccccggccagtgggctgcagacccccacaagcacaccggcgcctggctctgccacacgcacccctctcacacaggacccggcctccatcacggacaacctgctgcagctccctgcccggcgcaaagcttcggacttcttttagagccaggcctgggctgggctcatagacgcttcacagagcctgcagggcagctgtacacccagcagaggactccagccttctcggggcccaggcctgggccagaagctgttgaccataccaggagtcactggagaaaggggctgtgctggggccagactggcacaaggcactcgtgcccacaccacaccccagggccttgccaagctgtttgctgtttaattggccccttgaactgtcattaaagaacacctaggtaaaaaaaaaaaaaaaaaaaaaaaaaaaaaaaaa

SEQ ID NO: 2359 - DNA, 489 bp, Homo sapiens
ggcacgagctgtttcaaccaaaacctcatgctgaccagagttgaggaacagaagaagatggtgaaggcctgcaggtataggtgttcagcatgtcatctgaaatattccccacagaggcaaaaagaaaggaaattatctctgaaaaggaatgggaggacaagagcctccctctaatcttgtccatgcagtaaagagagatcacacgaaccctggacctacctctttgaggtggtactctcaaactctttgaagtcagcagaatatgtcaatgttttggttgaagaagctgcttgaatctgggcttttctgtgccatgtgttctcccagggccagcacaaagaagggcttttggtgcaggcccaagaccaccataatcatcattgattattcctctccacgccagtgtctctaaataaactttctcttctttctctgaaaaaaaaaaaaaaaaaaaaaaaaaaaaaaaaaaaaaaaaaaaaaaaaaaaaaa

SEQ ID NO: 2360 - DNA, 882 bp, Homo sapiens
ggcacgagcccgctccgtccctgctgccggtcgagggcacctccttttgggcagcggccgtgaagacccctccgtcgccgcccatgctgtgcgcggccgccattgcgaccgtggcctcctcgtgtagggagggtttggtgccgtgtgcggcgcagcagctgctggaggtgaagctggagcaggtgttgctgctaccacagccccacgttcctggcaagggcgccgcttcctctcccagcggcagttcaggcccgacctgcggctcctgctgccgcccgcctcttccgagggcgccccctgtaggcccgagttacacccggtgcagccccgggcgctgcacgtcaaggccaagaagtaggagctaggggcttgcctggacgcatcggtgaggcctcggggggccgtggagaccggtcgtagagcctccagggcggtcaagttggaaggcctcgggccggccctcgactacttccgagggaacgagaagggcaagctggaggcggaagaggtcatgagggacgcgatgcagggcggggaaggcaaaagctcggcggccatccgagaaggtgtgatcaaaacggaggaacccgagagactcctcgaggactgcaggctcggcgcggagcccgcgtccaatggcccggctcgtggcagcgcggaggtcatcttggccccaacgtccggtgcctttgggccgcaccagcaagacctcaggatccctctggactctccacactgcttcccctggggcccggatccagtttcaggaagctccgccttcagagctgataagattgaccaaggtccccctgacaccagtgcctattaaaatgcagtccctaaaaaaaaaaaaaaaaaaaaaaaaaaaaaaaaaaaaaaaaa

SEQ ID NO: 2361 - DNA, 957 bp, Homo sapiens
ggcacgagaggagatctacaagctggtggctctgggcaccggcagcagctgctgtgctggctggctggagttctcgggccagcagctccacgactgccatggcctggtcatcgcccgcaggcctgctgaggttcttgttccggcagctcctgctggccacacaggggggccccaagggcaaggagcagtccgtgctggccccccagccagggcccggacccccattcaccctcaagccccgcgtcttcctgcacctctacatcagcaacacccccaagggcgcggcccgtgacatctacctgccccccacctcggaaggtggcctcccgcacagcccacccatgcgcctgcaggcccatgtgctcgggcagctgaagcctgtgtgctacgtggcgccctcgctctgtgacacccacgtgggctgcctgtcagccagcgacaagctggcacgctgggccgtgctggggctgggtggtgccctgctggcccacctggtgtccccactctacagcaccagcctcatcctggtgccgccctggggcctccctcccgtctctgcaaggcctcctttctccgggcctttcaccaggcggccagggctgtggggaagccctacctcctggccttgaagacctacgaggctgccaaggctgggccctaccaggaggctcgcaggcagctgtctctcctcctggaccagcagggcctgggggcttggccctcgaagccactggtgggcaaattcagaaactgaagccagcctcggcgggaccgaggtcccggagccaagctgtacccctgctgggggagtgccctatctgaggagcgttgtggggagaacatgggttgtgcggggtgaaactggggctggagggaaggaggagcctgctgtggttgggaggcggctgctgcacgtttgggcttgaataaagaagtatttctggtaaaaaaaaaaaa

SEQ ID NO: 2362 - DNA, 1240 bp, Homo sapiens
ggcacgaggtgcagctcagcccattttccaggtgggcatctgcaaagttgagggggctccggtgggtctctctgctgtgaggagactcagaccaccccctgcctcctgggggaaatgtcagaagggcttctctgcctatgaggatctggggcagggcttggccttggcctgctggtcttggaggcgttgagcttggtctggaaggggtggaggagcgtctgggctcactgggccaggggcattgctggcagtgtggacgggaggctgcagggcgctgcctcctgtggcttagtgccctggagctagagagcagtgcttggttgagtcctgccaacagcttccagatcctcacccaggccagaacccaggccagctggggaaggcagaggctggcagggcccgtggtgggtgctggtcttgactttggtgtccactgagtcccgaggctcaggcccaggagggatgcagtccggctgagggcgaggctgtccccaggacatggagagggtgagatcccaaggccacggggggggggcagggagaacccctcctaccctggatgagtgggtgactggagagctagagaacgtggcagacccaagacctctcagtgctgagcccatggaggatgccccaggctggcgggactgggaagcagagggctggtcttaacacaggtgtgtccagtgctggaggcaagtccttgtcgtgactgtccagcgccactccatgtctctcctgtccttggatgttggggggctcagcctcttgcatgggtgtcctgctgggcgctgggccccgccactggccccctgcttgctttggggtctgagttagctcctggctccactgagcaggccgtcagctgccagcccaccacgcggatacccaggccctgttccgaggcctggaacagctgcttccgaagaaggggctgccttcagggaaatgcgtgcaccgtgcagcctgtgctgtgcccagggaggcctcttcagcgggattggcagttgctgtgccctgagaacaggcagaactgtgtgatccctgaatgtgaacctgaagttcaaaggacttggaaagctctggaatgtgttggtttttcccccccaaaatgggtcctaaggagggtaaaaaaaaaaaaaaaaaaaaaaaaaaaaaaaaaaaaaaaaaaaaaaaaaaaaaaaaaaaaaaaaaaaaaaaaaaaaaaaaaaaaaaaaaaaaaaaaaaaaaaaaaaaaaaa

SEQ ID NO: 2363 - DNA, 928 bp, Homo sapiens
gggcttctccacctacgtgtgcctggtgctgctggtggccaacattttgcggatactcttctggtttggaaggcgctttgagtccccgctgctgtggcagagcgccatcatgatcctgaccatgctgctgatgctgaagctgtgcaccgaggtccgtgtggccaacgagctcaacgccaggcgccgctcctttacagacttcgacccccaccacttctggcagtggagcagcttctcggactacgtgcagtgcgtcctggccttcacgggcgtggcgggctacatcacctacctgtccattgactccgccctgtttgtggagaccctgggcttcctggctgtgctgaccgaagccatgctgggtgtgccccagctttaccgcaaccaccgccaccagtccacggagggcatgagcatcaagatggtgctcatgtggaccagtggtgacgccttcaagacggcctacttcctgctgaagggtgcccctctgcagttctccgtgtgcggcctgctgcaggtgctggtggacctggccatcctggggcaggcctacgccttcgcccgccacccccagaagccggcgccccacgccgtgcaccccactggcaccaaggccctctgacagtggggaggacgaggatgtgggaccgccagccgcgggcactggtgggccctgacctccccgcggggagggtgggtgccgtggcccctgcaggtgtggcagagatggggcacgggcattggggtctccatcagcctctgtggggtgtctcagggtgggcagtgggggtggggctgggacgctgtttgtgctcagcggggacagccagggttgatctggccccgagggttttggatgtttttaggatgacataaaaagcaagtgttttccccaaaaaaaaaaaaaaaaaaaaaaaaaaaaaaaaaa

SEQ ID NO: 2364 - DNA, 2569 bp, Homo sapiens
  SITE (3): n equals a,t,g, or c
  SITE (2564): n equals a,t,g, or c
  SITE (2567): n equals a,t,g, or c
ggncacgagcggccctccactccctgactgtcgtgtttgtctcgctctgtgctgagggctgatgctgaggacctccttgactccttccttagcaacattctacaggactgcaggcaccacctgtgtgaaccggacatgaaactggtgtggcctagtgccaagctgttgcaggcagctgcaggtgcatctgcccgggcctgtgactctgtcaccagcaawgtactgcctttactgctggaacagttccacaagcacagtcagagcagccagcggcggacaatccttgaaatgctcctgggtttcttgaagctgcagcagaaatggagctatgaagacaaagatcaaaggcctctgaatggcttcaaggaccagctgtgctcactggtattcatggctctaacagaccccagcacccagcttcagcttgttggcatccgtacactgacagtcttgggtgcccagccagatctcctatcttatgaggacttggagctggcagtgggtcacctgtacagactgagcttcctgaaggaggattcccagagttgcagggtggcagcactggaagcatcaggaaccctggctgctctctaccctgtggccttcagcagccacctcgtacccaagctcgctgaggagctgcgtgtaggggagtcaaatttgactaacggagatgagcccacccaatgctcccggcatctgtgctgtctgcaagccttgtcagctgtatcaacacatcccagcatcgtcaaggagacactgcctctgctgctgcagcatctctggcaagtgaacagagggaatatggttgcacaatccagtgacgttattgctgtctgtcagagcctcagacagatggcagaaaaatgtcagcaggaccctgagagttgctggtatttccaccagacagctataccttgcctgcttgccttggctgtgcaggcctctatgccagagaaggagccctcagttctgagaaaagtactattggaggatgaggtgttggctgccatggtgtctgtcattggcactgctacaacccacctgagccctgagttagctgcccagagtgtgacacacattgtgcccctcttcttggatggcaacgtgtcctttctgcctgaaaacagcttcccgagcagattccagccattccaggatggctcctcagggcagaggcggctgattgcactgcttatggcctttgtctgctccctgcctcgaaatgtggaaatccctcagctgaaccaactcatgcgggagcttttggaactgagctgctgccacagctgccccttttcttccaccgctgctgccaagtgctttgcaggactcctcaacaagcaccctgcagggcagcagctggatgaattcctacagctagctgtggacaaagtggaggctggcctggrctctgggccctgtcgtagtcaggccttcactcttcttctctgggtaacaaaggccctagtgctcagataccatcctctcagctcctgccttacagcccggctcatgggcctcctgagtgacccagaattaggtccagcagcagctgatggcttctctctgctcatgtctgactgcactgatgtgctgactcgtgctggccatgccgaagtgcggatcatgttccgccagcggttcttcacagataatgtgcctgctttggtccagggcttccatgctgctccccaagatgtgaagccaaactacttgaagggtctttctcatgtacttaacaggctgcccaagcctgwactcttgccagagctgcccacgcttctttccttgctgctggaggccctgtcctgccctgactgtgtggtgcagctctccaccctcagctgccttcagcctcttctactggaagcaccccaagtcatgagtcttcacgtggacaccctcgtcaccaagtttctgaacctcagctctagcccttccatggctgtccggatcgccgcactgcagtgcatgcatgctctcactcgcctgcccacccctgtgctgctgccgtacaaaccacaggtgattcgggccttagccaaacccctggatgacaagaagagactggtgcgcaaggaagcagtgtcagccagaggggagtggtttctgttggggagccctggcagctgagccctcagtcctggcctagactgttctgacaatctaacctgggattactaactgttgagccatcttccccaaagcagggaaaccactggtctctgactgcctttcccacagacacagcacaaatgctaggcctctgttgcatggctgtacaaagaacataagagtccatatttctagtggatttgtaaaataagtgtgtgtgagacacttgcgtttgaagaaagatctagggtcctgggtctcttgcatttatatgtcagaaaaggggcgatatgctgctgaggggtgagtgcatatgagtgtggccctgaggaccagggctggcagatgttgtctacctgctgaagaataaagatttcttttggtaaaaaaaaaaaaaaagggcggccgctctagaggatccctcgaggggcgcaagcttacgcgancangc

SEQ ID NO: 2365 - DNA, 1192 bp, Homo sapiens
ggcacgaggcaccctgcagggcagcagctggatgaattcctacagctagctgtggacaaagtggaggctggcctggactctgggccctgtcgtagtcaggccttcactcttcttctctgggtaacaaaggccctagtgctcagataccatcctctcagctcctgccttacagcccggctcatgggcctcctgagtgacccagaattaggtccagcagcagctgatggcttctctctgctcatgtctgactgcactgatgtgctgactcgtgctggccatgccgaagtgcggatcatgttccgccagcggttcttcacagataatgtgcctgctttggtccagggcttccatgctgctccccaagatgtgaagccaaactacttgaagggtctttctcatgtacttaacaggctgcccaagcctgtactcttgccagagctgcccacgcttctttccttgctgctggaggccctgtcctgccctgactgtgtggtgcagctctccaccctcagctgccttcagcctcttctactggaagcaccccaagtcatgagtcttcacgtggacaccctcgtcaccaagtttctgaacctcagctctagcccttccatggctgtccggatcgccgcactgcagtgcatgcatgctctcactcgcctgcccacccctgtgctgctgccgtacaaaccacaggtgattcgggccttagccaaacccctggatgacaagaagagactggtgcgcaaggaagcagtgtcagccagaggggagtggtttctgttggggagccctggcagctgagccctcagtcctggcctagactgttctgacaatctaacctgggattactaactgttgagccatcttccccaaagcagggaaaccactggtctctgactgcctttcccacagacacagcacaaatgctaggcctctgttgcatggctgtacaaagaacataagagtccatatttctagtggatttgtaaaataagtgtgtgtgagacacttgcgtttgaagaaagatctagggtcctgggtctcttgcatttatatgtcagaaaaggggcgatatgctgctgaggggtgagtgcatatgagtgtggccctgaggaccagggctggcagatgttgtctacctgctgaagaataaagatttcttttggtaaaaaaaaaaaaaaaaaaaaaaaaa

SEQ ID NO: 2366 - DNA, 1507 bp, Homo sapiens
ggcacgagaattcactcaagttgtctcatctataccccttcaaaccctgtgagcctctaggtgctgtgctgtcctgaggcctgggccatggtgcccaaggaaagcccctgaagctcaccaggaggaagaagcatgcagggcactcctggaggcgggacgcgccctgggccatcccccgtggacaggcggacactcctggtcttcagctttatcctggcagcagctttgggccaaatgaatttcacaggggaccaggttcttcgagtcctggccaaagatgagaagcagctttcacttctcggggatctggagggcctgaaaccccagaaggtggacttctggcgtggcccagccaggcccagcctccctgtggatatgagagttcctttctccgaactgaaagacatcaaagcttatctggagtctcatggacttgcttacagcatcatgataaaggacatccaggtgctgctggatgaggaaagacaggccatggcgaaatcccgccggctggagcgcagcaccaacagcttcagttactcatcataccacaccctggagagatatatagctggattgacaactttgtaatggagcattccgatatgtctcaaaaattcagattggcaacagctttgaaaaccagtccattcttgtcctgaagttcagcactggaggttctcggcacccagccatctggatcgacactggaattcactcccgggagtggatcacccatgccaccggcatctggactgccaataagattgtcagtgattatggcaaagaccgtgtcctgacagacatactgaatgccatggacatcttcatagagctcgtcacaaaccctgatgggtttgcttttacccacagcatgaaccgcttatggcggaagaacaagtccatcagacctggaatcttctgcatcggcgtggatctcaacaggaactggaagtcgggttttggaggaaatggttctaacagcaacccctgctcagaaacttatcacgggccctcccctcagtcgagccggaagtggctgccatagtgaacttcatcaccagcccatggcaacttcaaggctctgatctccatccacagctactctcagatgcttatgtacccttacggccgattgctggagcccgtttcaaatcagagggagttgatgtggccagtgggatcaccgtcgactgggcctatgacagtggcatcaagtacgccttcagctttgagctccggacactgggcagtatggcttcctgatgccggccacacagatcatccccacggcccaggagacgtggatggcgcttcggaccatcatggagcacaccctgaatcacccctactagcagcacgactgagggcaggaggctccatccttctccccaaggtctgtggctcctcccgaaacccaagttatgcatccccatccccatgccctcatcccgacctcttagaaaataaatacaagtttgaacaggcaaaaaaaaaaaaaaaaaaa

SEQ ID NO: 2367 - DNA, 1129 bp, Homo sapiens
ggcacgagcgcaagcaggagatggaggccttcgggaagaaggctgccaacaggtcctggcagaacgtgtactgtgtcctgcggcgtgggagcctcggcttttacaaggatgccaaggcagccagcgcgggagtgccataccacggagaagtgcctgtcagcctggccagggcccagggcagcgtcgcctttgattaccgaaagcgcaaacatgtcttcaagctgggcttacaggatggaaaagaatatttattccaggccaaggatgaggcagagatgagctcgtggctacgggtggtgaatgcagccattgccacagcgtcttctgcctctggagagcctgaagagccggtggtgcccagcaccacccggggcatgacccgggccatgaccatgcccccagtgtcacccgtcggggctgaggggcctgttgtgctccgcagcaaagacggcagagaacgagagcgagaaaaacgcttcagcttctttaagaagaacaagtagttgggggcaaggtcccaggccaactccctccctccgttcaggaaactgccagggacagtcgacagggaccgccctcttgtcaggacaactgcctgctgctagggtctgttgccaaggtcaacccatcaccaggaactgtcactggggacgagtccatgttcccaagggcagcccttctcttctgctgtttaattccagactggtggtgggacccaggtaaccccctctcccacccccgccgacttctcccctttccccagcctcgtgcctctgtccctcaccacggtgtggacagtgccgcaccctcaacataggccatgtggggagtggctgcccctgcctcagggtcattctcctgccatgcgagggcactcgccttctgccttctggttcctcacccctcagaccagccaggaacctctcagagctgaagcaggccctgggggcagaagtgccagatgacagtcagaggcgcaggagccctccctccccacccccaccctgtaactccagctgccactccatctccagctgctctcaatggcttccaggtgtgttgttcggggacagccaccgccttgagtctggccaaggaggtgattaaacagctcagcttctcaaaaaaa

SEQ ID NO: 2368 - DNA, 1003 bp, Homo sapiens
ggcagagtaaaaattataatcttagccgggtgctgtggcttacatctgtaatcccaccactttgggagaacaaggcaggaggatcccttgagcccaggagtttgagaccaccctggtcaacacagaaaggcctcgtctctatttattattattttttaaataaaaaaataaagaattataatcttgatgtggttaattgcacctttgtgtctattacctgtttctgttgcaggtgaacttaatagagcattaggtctgtcatcactctgtggagaaacagacatatatcaataattgttattcaagaagaaatactttctacttttatggtaattttgaaattataaaagacaaaaaacaggtaactctccttcacgattaagtctagaggtgagaatttgggtcaggtgcagtggctcatgcctgtaatcccagtactttgggaggctgaggtgcgaggattacttgagagcaggagttgagaccagcctaggcaacatagtgagaccctgtctctacaaaacgtctaaaaaattggtcaggcattgtggtgtgctcctgtagaggctgaggagggagggttgcttgagcctaggaattaaagactgcagtgagtaatgattgtgccactgcactccagcctgggtgacagagggagactctctctctccctctctctctctttttttgagacaaggtctcactcttgttgcccaggctagattgcaatgccatgatctcccaggctcaggtgatccttctacctcagcctcccaagtagttgagactacagggacacatcaccatgcccagttaatttttgcattttttgtagagacagtgtcttgccatgttagccaggttagtctcaacctcctgagctcaagcgatgcacccgcctcagcctcccaaagtgctggattataggcatgagttaccgtgcctggcctgaccccctttggaaaaaaaaaaaaaaaaaaaaaaaaaaaaaaaaaaactcgag

SEQ ID NO: 2369 - DNA, 1314 bp, Homo sapiens
cccgggagttgctggactgagacatgagcctccaactgtgtggttgggctcggtagcacatcgtgggacttgggtgtgcgcccacagatggtttggccctgcagtgaccagagcagcccaagccgccaccatggtgaaattgctagtggccaaaatcctgtgcatggtgggcgtgttcttcttcatgctgctcggctccctgctccccgtgaagatcatcgagacagattttgagaaggcccatcgctcgaaaaagatcctctctctctgcaacacctttggaggaggggtgtttctggccacgtgcttcaacgctctgctgcccgctgtgagggaaaagctccagaaggtcctgagcctcggccacatcagcaccgactacccgctggccgaaaccatcctcctgctgggcttcttcatgaccgtcttcctggagcagctgatcctgaccttccgcaaggagaagccgtccttcatcgacctggagaccttcaacgccggatcggacgtgggcagcgactcggagtatgagagccccttcatggggggcgcgcggggccacgcgctgtacgtggagccccacggccacggccccagcctgagcgtgcagggcctctcgcgcgccagccccgtgcgcctgctcagcctggccttcgcgctgtcggcccactcggtctttgagggcctggccctgggcctgcaggaggagggggagaaagtggtgagcctgttcgtgggggtggccgtccacgagacactggtggccgtggccctgggcatcagcatggcccggagtgccatgcccctgcgggacgcggccaagctggcggtcaccgtaagcgccatgatccccctgggcatcggcctgggcctgggcattgagagcgcccagggcgtgccgggcagcgtggcgtccgtgctgctgcagggcctggcgggcggcaccttcctcttcatcaccttcctggagatcctggccaaggagctggaggagaagagtgaccgtctgctcaaggtcctcttcctggtgctgggctacaccgtcctggccgggatggtcttcctcaagtggtgagcggcctcgccattgtccctgccgccggagcccgccgggagccccgggccggacacaggccgcgtcccccggccgcgcgtcccccaagagcgagcactgtggccctgggccaccacctgtgcacaaggggcctcccgggaccaggctgtgcccccgatcctacaccctgagcctcagagcactgctactttttaaaatacttctttctcttaaaaaaaaaaaaaaaaaaaaaaaaaaaa

SEQ ID NO: 2370 - DNA, 1703 bp, Homo sapiens
ggcaaaaagctaccacctgccagtctgaagcaccgagatgacatggccgcttaccaacaagaagagcagatgcagcttccccgagctgatgccattcgttcacgtctcatcgatactttctctctcattgagcatttgcaaggcttgagccaagctgtgccgcggcacactatcagggagttacttgatccttcccgccagaagaaacttgtattgggagatcaacaccagstagtgcgkttctctataaagcctcagcgtatagaacagatttcacatgcccagaggctgttgagcaggcttcatgtgcgctgcagtcagaggccacctctttctttgtgggccggatgggtccttgagtgtcctctcttcaaaaacttcatcatcttcctggtctttttgaatacgatcatattgatggttgaaatagaattgctggaatccacaaataccaaactatggccattgaagctgaccttggaggtggcagcttggtttatcttgcttattttcatcctggagatccttcttaagtggctatccaacttttctgttttctggaagagtgcctggaatgtctttgactttgttgttaccatgttgtccctgcttcccgaggttgtggtattggtaggggtaacaggccaatcggtgtggcttcagcttctgaggatctgccgggtgctgaggtctctcaaactccttgcacaattccgtcaaattcaaattattattttggtcctggtcagggccctcaagagcatgaccttcctcttgatgttgctgctcatcttcttctacatttttgctgtgactggtgtctacgtcttctcagagtacacccgttcacctcgtcaggacctggagtaccatgtgttcttctcggacctcccgaattccctggtaacagtgttcattctcttcaccttggatcattggtatgcactgcttcaggacgtctggaaggtgcctgaagtcagtcgcatcttcagcagcatctatttcatcctttggttgttgcttggctccattatctttcgaagtatcatagtagccatgatggttactaactttcagaatatcaggaaagagctgaatgaggagatggcgcgtcgggaggttcagctcaaagctgacatgttcaagcggcagatcatccagaggagaaaaaacatgtcacatgaagcactgacgtcaagccatagcaaaatagaggacaggtcgtttggactgggagactcttgtgcacgaaaatctgcccgggctaatggaaatggatcaggatgaccgtgtttggcccagagactcactcttccgatattttgagttgctagaaaagcttcagtataacctagaggaacgtaagaagttacaagagtttgcagtgcaggcactgatgaacttggaagacaagtaaagcaatggatggcttcacttccacccttcctgcaacctctactgcctgattagagtcctaattttaccctctccctccctgatgcataggtaaaggcccctctgtggagtaaggagatcttcagagctgttagtgtaactaattgagaagtattgtttccattgcgtgttccactcatgttgcttctcttgtgaaccattaactttaattggatattatttttacctgttaaaaaaaaaaaaaaaaaaaaaaaaaaaaaaaaaaaaaaaaaaaaaaaaaaactcga

SEQ ID NO: 2371 - DNA, 669 bp, Homo sapiens
ggcacgagccaggtttcaccacaatgcccatccctgcctccccactccacccacctctgccttccttactgctgtatctgctgcttgaactggcaggagtcacacatgtgttccatgtgcaacaaacggagatgtcacagactgtatcaactggggagtcaatcatcttgagttgcagcgtacccaataccttaccaaatggacctgtcttgtggttcaagggaacagggccaaaccggaaattaatctacaatttcaaacaaggtaactttcccagagtaaaagagattggagacaccaccaagcctggcaacacagacttttccacccgcatccgtgaaatctctcttgctgatgctggcacctattactgcgtgaagttcataaaaggaagagctatcaaggagtaccaatcaggtcggggcactcaggtgtttgttactgtctcttacagttctagaagccagaagtctgaaatctgcatctctggactgaaatcaaggcatcagcagaactgctccttctggaggttctaggagagaacatattccctttctcttttggcttctggtttgctgccagcatccctggcctgtcagcagcatagaataaatcttcaaggccagtgtcaaaaaaaaaaaaaaaaaaaaaaaaaaaaaaaaaaaaaaa

SEQ ID NO: 2372 - DNA, 1189 bp, Homo sapiens
  SITE (609): n equals a,t,g, or c
gccactacgcctggagggggtccctgctgctggtgtctgccctctccctccacctagtggcctgtggtgctctcctccgcccaccctccctggctgaggaccctgctgtgggtggtcccagggcccaactcacctctctcctccatcatggccccttcctccgttacactgttgccctcaccctgatcaacactggctacttcattccctacctccacctggtggcccatctccaggacctggattgggacccactacctgctgccttcctactctcagttgttgctatttctgacctcgtggggcgtgtggtctccggatggctgggagatgcagtcccagggcctgtgacacgactcctgatgctctggaccaccttgactggggtgtcactagccctgttccctgtagctcargctcccacagccctggtggctctggctgtggcctacggcttcacatcargggctctggccccactggccttctctgtgctgcctgaactaatagggactagaaggatttactgtggcctgggactgttgcagatgatagagagcatcggggggctgctggggcctyctctctyargtaagtggaatggggttnccagggggtgaagggctgccatgktgsacaactaggggagggtactawtctyattacagtgkatgtgaatattgscctctggtgtagtacagtacacagcctgsgkggccaaccatagcatccctgaaatgggtccatggggcaaagaacttggggctgggaaagtctgagtggaaagacaaaaagaagctaagtggaacccttggcagggtcctacggcttgggtttgcagaggacctggcagaacctggccagacacagacgtagcattccagtgtgcaccctttcctttggcctactgggccccaaaccaggtatctgaggcacctggtcaaagttctgctggctcagggtgccagaactttcagacctttatctcctcttacccattaactgaagctttagaaaggccacagttggtgggcgcctgtagtcccagctactcaggaggctgaggcaggagaatggcatgaacccgggaggcggagcttgcagtgagctgagatcgcgccactgcacttcagcctgggcgacagagcgaactccgtctcaaaaaaaaaaaaaaaaaaaaaaaactcga

SEQ ID NO: 2373 - DNA, 1245 bp, Homo sapiens
gagcggctcagacgcacatcatcctcagtccctcgggactggagggactcgtgagccggagcccagaaatccgggggtggataagacaccgcgtcccctccaattcccgtaagcaccccttgctccatcctgcgccccaatacctcagctagcccccttccccacttcttacactccaaactcagccgggacagacctctgctgccgccgcccccacgaacgtgtgacgacggctggaggccaacagagtccctacaggtggtgctcacggtaatgcaccgacaatgagtggctgttttccagtttctagcctccgctgcctatctagggtgtgtcatggcctggtgcgggaggctcttactctccccaagccccactgcttctcctgctgcccgcttgcttcggactctggcagaaaccccacctgctgacacgttcctcctggggaattggtgttggatgtgccagcgcctctggccgtggcccgctaaccagcctctcccgggcgggctcctgccgcgccccctctcgcttgccccctcctcctcctcctcctgctgctctcccccctgctcccaggacggcaggatggccgcgcagggcgcgccgcgcttcctcctgaccttcgacttcgacgagactatcgtggacgaaaacagcgacgattcgatcgtgcgcgccgcgccgggccagcggctcccggagagcctgcgagccacctaccgcgagggcttctacaacgagtacatgcagcgcgtcttcaagtacctgggcgagcagggcgtgcggccgcgggacctgagcgccatctacgaagccatccctttgtcgccaggcatgagcgacctgctgcagtttgtggcaaaacagggcgcctgcttcgaggtgattctcatctccgatgccaacacctttggcgtggagagctcgctgcgcgccgccggccaccacagcctgttccgccgcatcctcagcaacccgtcggggccggatgcgcgtggccttcccgcgccgcggctaccccatgcaccgctctcattcaggaggcccagaaggccgagcccagctcgttccgcgccagcgtggtgccctgggaaacggtgcagatgtgcgcctccacctgcaacaggtgctgaagtcgtgctgagtctggccgcctgcaggggggtacccgggccaacggcggagggggcggggaagggagattcggcaaagacagctttactaaaaaaaaaaaaaaaaaaa

SEQ ID NO: 2374 - DNA, 2204 bp, Homo sapiens
ggcctgggcgacagagtgagaatctgtctcaaataaataaataaaattaaattataacaggcaaaccgtcactggccagggaactcctacgtggaataaacawagctgatgtgtaaagaattctgaggtgtgcttcacaggtcaccacacacagctagccttctgttggggtctggcccagccctgtgcttgggtaaggacagaaggctctgggtgacgctccgtgaaggagaacccagttgctgggcattgtctcttgtgcggtgatgctgatgcctatcctttggtctcatgcctggctctgctttgctgcgcaytctgtctcccactccgtgctgtctgagatgcaggtgattgagcaggaaaccccagtgagtgcaaaatcctctcgctcgcagctggacttgtttgacgatgttggtactttcgcctctggacccccaaagtacaaggacaatcccttttccttaggggaaagctttggctcccgctgggatacagatgctgcctggggtatggacagggtagaggagaaggagccagaagtgaccatctcaagcatccggcctatttcagaaagagccacaaaccggagggaagtggagagccggagctcaggcctcgagtctagtgaggcgcgtcagaaattcgcaggagccaaagccatctcatctgacatgttctttgggcgggaggtggatgcggagtatgaggccaggtctcggctgcagcagctctcaggcagcagtgccatcagctcttcagacctctttggggacatggatggagctcacggagcaggaagtgtatctctggggaacgtgctgcctacagcggacattgcccagtttaagcagggtgtcaagtctgtggctgggaaaatggctgtgctggccaatggtgtgatgaattccttgcaggatcgctacggttcctactgatccgagctctgtgactcaggcttacgatggtgacggcaacaagaactccacagttcccaggctggggatgctttgccttgtggaagctggggaggatttgttacttcgtatgtgtggtgtgtgtgtggggtggcctttgaggcgctcactcctgtgaggggaatggtcagtaccagcccttgtcctctgcctgtggactgagccctttattccctctcacaccaccctccgtgtgttagactcttgtccttctgtcctgcccccacagctgctgctcacttatcctgccatactgggaaagggggttcccccacgatggcttattctgggtccagactttccccaggtagggaaagcggaaggtagaaggctttttttgctggctctagggttcttctagttcgaggccttgggtccccatcctctggaaccagggggaggcctggaaggagttcactgtagacccgtcccatggggaaagaggctgcggacttgctgctgctgctgctgccagtggcctcttctgggtgccaggagaggggaaggacctttgtctgggcgttaccaagggctggaaactttacctggtacctaaaggtttcatttggtatcagaccggagacccttgggttctcccgtctcaccacccctttctacagtaagcacttggaagattgtttcagggtgtctcagggtccctctgtaccatctgctgtggaatgcaggaccctctgtgacattctttatcccttcttccccgggttggtggccatggagggtcttgtctgctgtgattcgactctggatgctgtgagcttgatgctggccagggaagcagaggatgtgagaggcagaggcaggctcctggggctgagctccttcctctgcatcattctgggcttggcctggacagcacccgccagtgagagctgtgggcctcaccctctggcagctgagccaagcactgtcattcttggtgccatcttcccctgccgcaccggcagtctcagcccagcccccacctttgggttgtaggttgggctcccaagcaacacagaccactcttccccttgcccctcccccagagggacttgactttctttctggactgtttgtattgaaacaaagtggtgtcaaaataaagcccctgcagggcctggctccctgttggtctgagtgaaaaaaaaaaaaaaaaaaactcgggtcgacggtatcgataagcttgatatcgaattcgatatcaagcttatcgataccgtcgac

SEQ ID NO: 2375 - DNA, 2240 bp, Homo sapiens
ggcctgggcgacagagtgagaatctgtctcaaataaataaataaaattaaattataacaggcaaaccgtcactggccagggaactcctacgtggaataaacawagctgatgtgtaaagaattctgaggtgtgcttcacaggtcaccacacacagctagccttctgttggggtctggcccagccctgtgcttgggtaaggacagaaggctctgggtgacgctccgtgaaggagaacccagttgctgggcattgtctcttgtgcggtgatgctgatgcctatcctttggtctcatgcctggctctgctttgctgcgcaytctgtctcccactccgtgctgtctgagatgcaggtgattgagcaggaaaccccagtgagtgcaaaatcctctcgctcgcagctggacttgtttgacgatgttggtactttcgcctctggacccccaaagtacaaggacaatcccttttccttaggggaaagctttggctcccgctgggatacagatgctgcctggggtatggacagggtagaggagaaggagccagaagtgaccatctcaagcatccggcctatttcagaaagagccacaaaccggagggaagtggagagccggagctcaggcctcgagtctagtgaggcgcgtcagaaattcgcaggagccaaagccatctcatctgacatgttctttgggcgggaggtggatgcggagtatgaggccaggtctcggctgcagcagctctcaggcagcagtgccatcagctcttcagacctctttggggacatggatggagctcacggagcaggaagtgtatctctggggaacgtgctgcctacagcggacattgcccagtttaagcagggtgtcaagtctgtggctgggaaaatggctgtgctggccaatggtgtgatgaattccttgcaggatcgctacggttcctactgatccgagctctgtgactcaggcttacgatggtgacggcaacaagaactccacagttcccaggctggggatgctttgccttgtggaagctggggaggatttgttacttcgtatgtgtggtgtgtgtgtggggtggcctttgaggcgctcactcctgtgaggggaatggtcagtaccagcccttgtcctctgcctgtggactgagccctttattccctctcacaccaccctccgtgtgttagactcttgtccttctgtcctgcccccacagctgctgctcacttatcctgccatactgggaaagggggttcccccacgatggcttattctgggtccagactttccccaggtagggaaagcggaaggtagaaggctttttttgctggctctagggttcttctagttcgaggccttgggtccccatcctctggaaccagggggaggcctggaaggagttcactgtagacccgtcccatggggaaagaggctgcggacttgctgctgctgctgctgccagtggcctcttctgggtgccaggagaggggaaggacctttgtctgggcgttaccaagggctggaaactttacctggtacctaaaggtttcatttggtatcagaccggagacccttgggttctcccgtctcaccacccctttctacagtaagcacttggaagattgtttcagggtgtctcagggtccctctgtaccatctgctgtggaatgcaggaccctctgtgacattctttatcccttcttccccgggttggtggccatggagggtcttgtctgctgtgattcgactctggatgctgtgagcttgatgctggccagggaagcagaggatgtgagaggcagaggcaggctcctggggctgagctccttcctctgcatcattctgggcttggcctggacagcacccgccagtgagagctgtgggcctcaccctctggcagctgagccaagcactgtcattcttggtgccatcttcccctgccgcaccggcagtctcagcccagcccccacctttgggttgtaggttgggctcccaagcaacacagaccactcttccccttgcccctcccccagagggacttgactttctttctggactgtttgtattgaaacaaagtggtgtcaaaataaagcccctgcagggcctggctccctgttggtctgagtgaaaaaaaaaaaaaaaaaaaaaaaaaaaaaaaaaaaaaaaaaaaaaaaaaaaaaaaaaaaaaaaaaaaaaaaaaaaaaaaaaaaaaaaaaaaaaaaaaaaaaaaaaaaaaaaaaagaaaaa

SEQ ID NO: 2376 - DNA, 2240 bp, Homo sapiens
ggcctgggcgacagagtgagaatctgtctcaaataaataaataaaattaaattataacaggcaaaccgtcactggccagggaactcctacgtggaataaacawagctgatgtgtaaagaattctgaggtgtgcttcacaggtcaccacacacagctagccttctgttggggtctggcccagccctgtgcttgggtaaggacagaaggctctgggtgacgctccgtgaaggagaacccagttgctgggcattgtctcttgtgcggtgatgctgatgcctatcctttggtctcatgcctggctctgctttgctgcgcaytctgtctcccactccgtgctgtctgagatgcaggtgattgagcaggaaaccccagtgagtgcaaaatcctctcgctcgcagctggacttgtttgacgatgttggtactttcgcctctggacccccaaagtacaaggacaatcccttttccttaggggaaagctttggctcccgctgggatacagatgctgcctggggtatggacagggtagaggagaaggagccagaagtgaccatctcaagcatccggcctatttcagaaagagccacaaaccggagggaagtggagarccggagctcaggcctcgagtctagtgaggcgcgtcagaaattcgcaggagccaaagccatctcatctgacatgttctttgggcgggaggtggatgcggagtatgaggccaggtctcggctgcagcagctctcaggcagcagtgccatcagctcttcagacctctttggggacatggatggagctcacggagcaggaagtgtatctctggggaacgtgctgcctacagcggacattgcccagtttaagcagggtgtcaagtctgtggctgggaaaatggctgtgctggccaatggtgtgatgaattccttgcaggatcgctacggttcctactgatccgagctctgtgactcaggcttacgatggtgacggcaacaagaactccacagttcccaggctggggatgctttgccttgtggaagctggggaggatttgttacttcgtatgtgtggtgtgtgtgtggggtggcctttgaggcgctcactcctgtgaggggaatggtcagtaccagcccttgtcctctgcctgtggactgagccctttattccctctcacaccaccctccgtgtgttagactcttgtccttctgtcctgcccccacagctgctgctcacttatcctgccatactgggaaagggggttcccccacgatggcttattctgggtccagactttccccaggtagggaaagcggaaggtagaaggctttttttgctggctctagggttcttctagttcgaggccttgggtccccatcctctggaaccagggggaggcctggaaggagttcactgtagacccgtcccatggggaaagaggctgcggacttgctgctgctgctgctgccagtggcctcttctgggtgccaggagaggggaaggacctttgtctgggcgttaccaagggctggaaactttacctggtacctaaaggtttcatttggtatcagaccggagacccttgggttctcccgtctcaccacccctttctacagtaagcacttggaagattgtttcagggtgtctcagggtccctctgtaccatctgctgtggaatgcaggaccctctgtgacattctttatcccttcttccccgggttggtggccatggagggtcttgtctgctgtgattcgactctggatgctgtgagcttgatgctggccagggaagcagaggatgtgagaggcagaggcaggctcctggggctgagctccttcctctgcatcattctgggcttggcctggacagcacccgccagtgagagctgtgggcctcaccctctggcagctgagccaagcactgtcattcttggtgccatcttcccctgccgcaccggcagtctcagcccagcccccacctttgggttgtaggttgggctcccaagcaacacagaccactcttccccttgcccctcccccagagggacttgactttctttctggactgtttgtattgaaacaaagtggtgtcaaaataaagcccctgcagggcctggctccctgttggtctgagtgaaaaaaaaaaaaaaaaaaaaaaaaaaaaaaaaaaaaaaaaaaaaaaaaaaaaaaaaaaaaaaaaaaaaaaaaaaaaaaaaaaaaaaaaaaaaaaaaaaaaaaaaaaaaaaaaaagaaaaa

SEQ ID NO: 2377 - DNA, 2240 bp, Homo sapiens; identical to SEQ ID NO: 2375

SEQ ID NO: 2378 - DNA, 1082 bp, Homo sapiens
ggcacgagcatgggcgcgcgcggggcgctgctgctggcgctgctgctggctcgggctggactcaggaagccggagtcgcaggaggcggcgccgttatcaggaccatgcggccgacgggtcatcacgtcgcgcatcgtgggtggagaggacgccgaactcgggcgttggccgtggcaggggagcctgcgcctgtgggattcccacgtatgcggagtgagcctgctcagccaccgctgggcactcacggcggcgcactgctttgaaacctatagtgaccttagtgatccctccgggtggatggtccagtttggccagctgacttccatgccatccttctggagcctgcaggcctactacacccgttacttcgtatcgaatatctatctgagccctcgctacctggggaattcaccctatgacattgccttggtgaagctgtctgcacctgtcacctacactaaacacatccagcccatctgtctccaggcctccacatttgagtttgagaaccggacagactgctgggtgactggctgggggtacatcaaagaggatgaggcactgccatctccccacaccctccaggaagttcaggtcgccatcataaacaactctatgtgcaaccacctcttcctcaagtacagtttccgcaaggacatctttggagacatggtttgtgctggcaatgcccaaggcgggaaggatgcctgcttcggtgactcaggtggacccttggcctgtaacaagaatggactgtggtatcagattggagtcgtgagctggggagtgggctgtggtcggcccaatcggcccggtgtctacaccaatatcagccaccactttgagtggatccagaagctgatggcccagagtggcatgtcccagccagacccctcctggccgctactctttttccctcttctctgggctctcccactcctggggccggtctgagcctacctgagcccatgcagcctggggccactgccaagtcaggccctggttctcttctgtcttgtttggtaataaacacattccagttgatgccttgcagggcattcttcaaaaaaaaaaaaaaaaaa

SEQ ID NO: 2379 - DNA, 1913 bp, Homo sapiens
ggcggatccgacgcgcgagaccgggaggggacgagggcgttgcaatcgttcggggcgggggctttccggggagggggtgctcaggtgcaccagcggcggcggaccctcwgactctgccctcccctccctttaacccccttccagccggacgggaggcggrgcagggctgagcatttgtgacacctacatttccgtggctcccttcttttcccccgacccctgtttatctcttcgccttccagaagttcttttccatcaggccgtcgcaccttgcgtgggaaggagcaccccacttggaagcaggaggcggggttcagatcttggccctacccctcctgtgttaaagtccgcgagcctcagtttccctcacagtattttttgcctcgccttacccggttttgaggatctgtacgagaaagagaaaggaagtggacatttgttgaattcctgcatggccaaataccacgcagactgcttcatccgccacgtttaatccttattacttggtgttctcagaactcccatttcatggattcttaagctcacagagtcagtgaataacagaaagggattcagatctagccgtttagctgcacagtggagttcttctccagagtcttcccttgtctgggctctggctggaactattcctcagccaaatcctcgccccagaacagtgcttcctgtttctccagctragaagtctccctttcagtttccttcttccagcacggagtacactgctctgcctccacttagattacttcagaaatgaaatgcagcaaatatttatccagcagtgcagggagttgaacttttggagtcgggaaccttggattcttgttctggctctgccacttactgtgtggccttgggaagtcctttgtcttctctgagctttcttttctctttgcgtaaaagcggtgctcttgtcccattctccctccctgtcttccagcaggctctccccggaggctcagccccctctgctccccatgggcaactgccaggcagggcacaacctgcacctgtgtctggcccaccacccacctctggtctgtgccactttgatcctgctgctccttggcctctctggcctgggccttggcagcttcctcctcacccacaggactggcctgcgcagccctgacatcccccaggactgggtctcttttttgagatcttttggccagctgaccctgtgtcccaggaatgggacagtcacagggaagtggcgagggtctcacgtcgtgggcttgctgaccaccttgaacttcggagacggtccagacaggaacaagacccggacattccaggccacagtcctgggaagtcagatgggattgaaaggatcttctgcaggacaactggtccttatcacagccagggtgaccacagaaaggactgcaggaacctgcctatattttagtgctgttccaggaatcctaccctccagccagccacccatatcctgctcagaggagggggctggaaatgccaccctgagccctagaatgggtgaggaatgtgttagtgtctggagccatgaaggccttgtgctgaccaagctgctcacctcggaggagctggctctgtgtggctccaggctgctggtcttgggctccttcctgcttctcttctgtggccttctctgctgtgtcactgctatgtgcttccacccgcgccgggagtcccactggtctagaacccggctctgagggcactggcctagttcccgacttgtttctcaggtgtgaatcaacttcttgggccttggctctgagttggaaaaggttttagaaaaagtgaagagctggaatgtgggggaaaataaaaagcttttttgcccaaaaaaaaaaaaaaaaaaaaaaaaaaaaactcgagggggggtcccggtaacccaatcgtccctc

SEQ ID NO: 2380 - DNA, 1989 bp, Homo sapiens
ggcacgagtttttaaaagatatcttttgtgtagaagtaacccaggaatgccagcatttgttttgatagtctcattccaatagtagttactttaaaatgaagaatgttcttaatttacaaaatattatgtatgtatttaagttatgaatattgcagatatgtaaatatgtgtatatgtgtgttgattttaatttgtatcttcacagattttattatcagttatgttttgaatttttacctttggagaaaacatactacttaaatcttccagtgtagtgatagcaaattatctttatataaattttattcagattattcaaagtaatcaaagatttttaattatttttattaaattaaatttatcagtataaataattaagatcattaaccttatttaattaaatttattaattttgattatagaaaaatgcattttcttcttaaatagattctttacacttaaagctgaagtgttattttgctacttgtatgtatatcagatactttgtttattaatctaatacgttagtaataaaaggagtactttacaattattgcctgtatattttttcatgtgtaggaaaatgaagaagattatgggacctgttctagttctgtacaatatacaccagtttacaaattacacaatgaaaagggaggaaactcagaaaagcgtaagcttgctcaggtaagtaaggttatttacccttcattcccccacattctcaaattatataattccagtaaattatttaggaacaatttggatccactaattttttatcttatatgaaaacctgcagtattggtcaaggggaggagttagtggaacctgggaaggctacaaggggattgagagtcaaatgtttcagatatcggtttctacatgctttgttagcccatgccctcatagatctcatagtccagtgaaggaaaagacaattgaatgtgtgattcttatagagtgtgaatagcttgatgataaactggaaatcataggattcctttactacaaaaataaaatcaatcttatacatgggtatttggccattaaaatagtctatagaaattaaaatctgaactactataagtctatcctattctaaagttagattattttatttgctataaatagttaaagcttctttttatatgctgatgctacttaaaatattgtttcaagtgactgagtgttcagaatcatagctataagtgttcctggtttttttttcataagtacatttatgaaggctctaactaaacaaaattggtatatacaaaattgtatcttaagtggccttagaaaactagcttcaaaaaagaattcttgagtggactgtagctacaaaattacagaactggaagtggctgcaaagcttcatttataacagttgccaaggtttgcagatgagaaagttgatagctagaatggtcacaacacttgccataagtctcataactgatcagtggcagaaggaggcgaaaagccatctctgatgctcagttagctttcctggatagcccaggcaccacagaagtatacatggccataaggtgcttccagggtctttgtctttgagcccattttgtgctgctgtaccagaatacctgaggctgggtaatttgtaaagaacagaagtttatttctcacagttcgggaggctggaaagtccaagatcaaggcactggcaccttatgaggcccttcttgctgtgtcatcccatggtggaaggcagaaaggcaagagagatgagggggccaaactcacccttttataacagcactaatcccacccaagagggtggaaccctcatggcccaatcacctcttaaaagtcccacttcttaataccattacaatggcaattaaatttcaacatgagattttgagaggacaaaattcaaaccgtaacaacagtctttaagaatgggaaaggatagtgaagctgtactgaaactctagtcctttgtaaaaaaaaaaaaaaaaaaaa

SEQ ID NO: 2381 - DNA, 336 bp, Homo sapiens
gctcgtgccgatattagtatattgttgaacatacattatgccttagaaatgcacattctgtattttgtgggatgataatctaattcagtatagaatatgctgtttggcaatgagtttgtggccagatttcaaatagggagttaagtggtactttcacaatccaaagatttttagttaaaaatcatgtagtctaatatgctgcagttatttttttatatttttcaatgcatttaattatcttttttataattctttgtactaactcagcatgtaacaaccaatttacatggaaataaatcgaaatatgataactattatgcttaaaaaaaaaaaaaa

SEQ ID NO: 2382 - DNA, 2794 bp, Homo sapiens
gcaggaaagtgcatctatcataagtgtgcaaattgatgaattctaaaatctttattgtacctgtttagcacmtagattgacactgaacataactaacaaccagaaatctccgtgtactcccttcctgtaactacccctgcgcccgaccaaatcactctcttctaacagcataactttgtgtgactagcttttttaatgtaaaagaatgaaatctacagcatgtattcatttgcatctggcttctgccacccaacattatatttgtgggattcrtttgtacagttgcatattagtttgcagatccctcactctcatttctatatggtattatattgcataaacgtaccacactttatccaactactgttaaatatttgtgcattttctacttgggggtgatttcaaatagtgctgctatgaacattcttgtaaatgtcttttggtgaacatatgcaacacatatatgcgttgttgttggttcccaggaggggcattcctgggtcataaacaatgcgtgtgttcaggtttagtacagtataatgccaaacaggtttccaaagtgtttgtgccactttacatacctgccattattgaaaaagagttctgtttgctccacattgtcaccaatacttgatattttctgctttttttttcttttaaaccgtactagtgggtgtgcagtgatattgcaatgtggttttaatttgcatcttccttgtgacaaccttgattactgtaagccacttggaaatgtgatttaaattcatataaagatatagtagcaaaacgcatactaggttactttcgtatccagaaagtttagatagaatgatttctatgtaagcttttactgtgtagtctgagtccatgaatattgattacaaaaaacacatctgtaggtgagttacaatacctcacttataattcmaaattcatgttgtgttagctcaatatttttcaaataatttttgcatgcaattttcaccttctttctgagtagtttcaggtattttgtatggttccagcagtcagttaggttgccattgtttggaagcacacatccacgtatctgcaccatgatgatatgacacrcccataccccccatttcacattttgtcagaagtgcatagttatcactaactttgccagtagaaatgtactcccaatttcccacggacttatcttgaataatctctccactgaagcataacaggttttgaattctgttagaatagttgtttttactatcttttaattttatacaaatttcaaagttacgtaatacttttatttaaaaagtgaaacaaagcttttcctctcccttacccacatgttagtccagcagagggggaaagcattggacccaggccaaaatcataaacgctttcaattaactaataataattgctggcatgttgccattaaatattcttgtctcattatctctggttgctttatcaaacccataggtcactgaagcccacttttgagacaaagactatttctcccccaaaagtcaagggaaatataaaaaatgaaattagtgattaagaatagaagtcaattaatacawtcattttgtcttaattatttaaagtccagttttttccctccagcaaacctgaaaatacactatcctccagctatcagaattatattgagatctactcacatttatgatgatgttcagagattctcattgggaaggaaaaggcacacgctgcggcggtcttgcatgactctgttgttgtggaaattcaatttgttcattgtgttttgggctctctgggtggtcagggctgggctctgggtccttggcaattcctcaggttcccagcactccaaagccaagctcacctcctcatcacacaccctacaggagaagcattagggtgtccgactacgtgggtttcatagctgtggaaaagccaaaggggagactcctgaagaaaggcggtgaagactgtgaagagcgggtcaggaagatgagcacagcactgctactcctgtgggcacagggacagcatgtctccagccagygccaccttgtttaatacatgggaactcactgaaattcattctgtattttgcccgcaaagttttaaagmtttcatccacagtcaggaattaaacttataccaatgagagcctcacacattcaaggatgtactaagcactacaggcctcacagaaacagagatcccatcttggagttttcagtaccacatgggagataaagggttttgaacatgaaatgacaaaaacaacagcaagaagaaaattcttgtcctttttcattactatcagactcaaataaatgtcttggctcttacattacattcattcttcaaccattgtggtctggcttccacttccttcacttcaccaacatggctctgccaaaggaagcccgtgatctctaggccatcactttaattgatctytctacaacatttatcctggttgttaagccctccttacaacattcttctctctttgtttttatagctccatctctcctgcttctttaacttgataatgcatacttgatttttctatttgttatttcataaaccaattaatacacagataaaatgactgtatatcaaaccatgtttgtatagaaaaaatggattttggatgcctctcatatgtaattagttctattaaacatattaattgtattgtttaatttgtcaggtttttgacagaattttgtttacaagtaataaaaattttatctccaattttcaawaaaaaaaaaaawaaagtcgacgggccgcgaatttagta

SEQ ID NO: 2383 - DNA, 2792 bp, Homo sapiens
gcaggaaagtgcatctatcataagtgtgcaaattgatgaattctaaaatctttattgtacctgtttagcacmtagattgacactgaacataactaacaaccagaaatctccgtgtactcccttcctgtaactacccctgcgcccgaccaaatcactctcttctaacagcataactttgtgtgactagcttttttaatgtaaaagaatgaaatctacagcatgtattcatttgcatctggcttctgccacccaacattatatttgtgggattcrtttgtacagttgcatattagtttgcagatccctcactctcatttctatatggtattatattgcataaacgtaccacactttatccaactactgttaaatatttgtgcattttctacttgggggtgatttcaaatagtgctgctatgaacattcttgtaaatgtcttttggtgaacatatgcaacacatatatgcgttgttgttggttcccaggaggggcattcctgggtcataaacaatgcgtgtgttcaggtttagtacagtataatgccaaacaggtttccaaagtgtttgtgccactttacatacctgccattattgaaaaagagttctgtttgctccacattgtcaccaatacttgatattttctgctttttttttcttttaaaccgtactagtgggtgtgcagtgatattgcaatgtggttttaatttgcatcttccttgtgacaaccttgattactgtaagccacttggaaatgtgatttaaattcatataaagatatagtagcaaaacgcatactaggttactttcgtatccagaaagtttagatagaatgatttctatgtaagcttttactgtgtagtctgagtccatgaatattgattacaaaaaacacatctgtaggtgagttacaatacctcacttataattcmaaattcatgttgtgttagctcaatatttttcaaataatttttgcatgcaattttcaccttctttctgagtagtttcaggtattttgtatggttccagcagtcagttaggttgccattgtttggaagcacacatccacgtatctgcaccatgatgatatgacacrcccataccccccatttcacattttgtcagaagtgcatagttatcactaactttgccagtagaaatgtactcccaatttcccacggacttatcttgaataatctctccactgaagcataacaggttttgaattctgttagaatagttgtttttactatcttttaattttatacaaatttcaaagttacgtaatacttttatttaaaaagtgaaacaaagcttttcctctcccttacccacatgttagtccagcagagggggaaagcattggmcccaggccaaaatcataaacgctttcaattaactaataataattgctggcatgttgccattaaatattcttgtctcattatctctggttgctttatcaaacccataggtcactgaagcccacttttgagacaaagactatttctcccccaaaagtcaagggaaatataaaaaatgaaattagtgattaagaatagaagtcaattaatacawtcattttgtcttaattatttaaagtccagttttttccctccagcaaacctgaaaatacactatcctccagctatcagaattatattgagatctactcacatttatgatgatgttcagagattctcattgggaaggaaaaggcacacgctgcggcggtcttgcatgactctgttgttgtggaaattcaatttgttcattgtgttttgggctctctgggtggtcagggctgggctctgggtccttggcaattcctcaggttcccagcactccaaagccaagctcacctcctcatcacacaccctacaggagaagcattagggtgtccgactacgtgggtttcatagctgtggaaaagccaaaggggagactcctgaagaaaggcggtgaagactgtgaagagcgggtcaggaagatgagcacagcactgctactcctgtgggcacagggacagcatgtctccagccagygccaccttgtttaatacatgggaactcactgaaattcattctgtattttgcccgcaaagttttaaagmtttcatccacagtcaggaattaaacttataccaatgagagcctcacacattcaaggatgtactaagcactacaggcctcacagaaacagagatcccatcttggagttttcagtaccacatgggagataaagggttttgaacatgaaatgacaaaaacaacagcaagaagaaaattcttgtcctttttcattactatcagactcaaataaatgtcttggctcttacattacattcattcttcaaccattgtggtctggcttccacttccttcacttcaccaacatggctctgccaaaggaagcccgtgatctctaggccatcactttaattgatctytctacaacatttatcctggttgttaagccctccttacaacattcttctctctttgtttttatagctccatctctcctgcttctttaacttgataatgcatacttgatttttctatttgttatttcataaaccaattaatacacagataaaatgactgtatatcaaaccatgtttgtatagaaaaaatggattttggatgcctctcatatgtaattagttctattaaacatattaattgtattgtttaatttgtcaggtttttgacagaattttgtttacaagtaataaaaattttatctccaattttcaaaaaaaaaaaaaaaagtcgrcgggccgcgaatttagta

SEQ ID NO: 2384 - DNA, 3351 bp, Homo sapiens
  SITE (3250): n equals a,t,g, or c
  SITE (3251): n equals a,t,g, or c
  SITE (3272): n equals a,t,g, or c
  SITE (3282): n equals a,t,g, or c
  SITE (3323): n equals a,t,g, or c
  SITE (3335): n equals a,t,g, or c
  SITE (3341): n equals a,t,g, or c
gcaggaaagtgcatctatcataagtgtgcaaattgatgaattctaaaatctttattgtacctgtttagcacmtagattgacactgaacataactaacaaccagaaatctccgtgtactcccttcctgtaactacccctgcgcccgaccaaatcactctcttctaacagcataactttgtgtgactagcttttttaatgtaaaagaatgaaatctacagcatgtattcatttgcatctggcttctgccacccaacattatatttgtgggattcrtttgtacagttgcatattagtttgcagatccctcactctcatttctatatggtattatattgcataaacgtaccacactttatccaactactgttaaatatttgtgcattttctacttgggggtgatttcaaatagtgctgctatgaacattcttgtaaatgtcttttggtgaacatatgcaacacatatatgcgttgttgttggttcccaggaggggcattcctgggtcataaacaatgcgtgtgttcaggtttagtacagtataatgccaaacaggtttccaaagtgtttgtgccactttacatacctgccattattgaaaaagagttctgtttgctccacattgtcaccaatacttgatattttctgctttttttttcttttaaaccgtactagtgggtgtgcagtgatattgcaatgtggttttaatttgcatcttccttgtgacaaccttgattactgtaagccacttggaaatgtgatttaaattcatataaagatatagtagcaaaacgcatactaggttactttcgtatccagaaagtttagatagaatgatttctatgtaagcttttactgtgtagtctgagtccatgaatattgattacaaaaaacacatctgtaggtgagttacaatacctcacttataattcmaaattcatgttgtgttagctcaatatttttcaaataatttttgcatgcaattttcaccttctttctgagtagtttcaggtattttgtatggttccagcagtcagttaggttgccattgtttggaagcacacatccacgtatctgcaccatgatgatatgacacrcccataccccccatttcacattttgtcagaagtgcatagttatcactaactttgccagtagaaatgtactcccaatttcccacggacttatcttgaataatctctccactgaagcataacaggttttgaattctgttagaatagttgtttttactatcttttaattttatacaaatttcaaagttacgtaatacttttatttaaaaagtgaaacaaagcttttcctctcccttacccacatgttagtccagcagagggggaaagcattggmcccaggccaaaatcataaacgctttcaattaactaataataattgctggcatgttgccattaaatattcttgtctcattatctctggttgctttatcaaacccataggtcactgaagcccacttttgagacaaagactatttctcccccaaaagtcaagggaaatataaaaaatgaaattagtgattaagaatagaagtcaattaatacawtcattttgtcttaattatttaaagtccagttttttccctccagcaaacctgaaaatacactatcctccagctatcagaattatattgagatctactcacatttatgatgatgttcagagattctcattgggaaggaaaaggcacacgctgcggcggtcttgcatgactctgttgttgtggaaattcaatttgttcattgtgttttgggctctctgggtggtcagggctgggctctgggtccttggcaattcctcaggttcccagcactccaaagccaagctcacctcctcatcacacaccctacaggagaagcattagggtgtccgactacgtgggtttcatagctgtggaaaagccaaaggggagactcctgaagaaaggcggtgaagactgtgaagagcgggtcaggaagatgagcacagcactgctactcctgtgggcacagggacagcatgtctccagccagygccaccttgtttaatacatgggaactcactgaaattcattctgtattttgcccgcaaagttttaaagmtttcatccacagtcaggaattaaacttataccaatgagagcctcacacattcaaggatgtactaagcactacaggcctcacagaaacagagatcccatcttggagttttcagtaccacatgggagataaagggttttgaacatgaaatgacaaaaacaacagcaagaagaaaattcttgtcctttttcattactatcagactcaaataaatgtcttggctcttacattacattcattcttcaaccattgtggtctggcttccacttccttcacttcaccaacatggctctgccaaaggaagcccgtgatctctaggccatcactttaattgatctytctacaacatttatcctggttgttaagccctccttacaacattcttctctctttgtttttatagctccatctctcctgcttctttaacttgataatgcatacttgatttttctatttgttatttcataaaccaattaatacacagataaaatgactgtatatcaaaccatgtttgtatagaaaaaatggattttggatgcctctcatatgtaattagttctattaaacatattaattgtattgtttaatttgtcaggtttttgacagaattttgtttacaagtaataaaaattttatctccaattttcaataaaaaaaaaaaaaaaaaactcgagggggggcccggtacccaattcgccctatagtgagtcgtattacaattcactggccgtcgttttacaacgtcgtgactgggaaaaccctggcgttacccaacttaatcgccttgcagcacatccccctttcgccagctggcgtaatagcgaagaggcccgcaccgatcgcccttcccaacagttgcgcagcctgaatggcgaatggcaaattgtaagcgttaatattttgttaaaattcgcgttaaatttttgttaaatcaagctcattttttaaccaataggccgaaatcggcaaaatcccttataaatcaaaagaatagaccgagatagggttgagtgttgtccagtttggaacaagagtccactattaaagaacgtggactccaacgtcaaagggcgaaaaaccgctatcagggcgatggcccactacggtgaaccatcacccctaatcaagttttttgggggtcganngtgccgtaaagcactaaatcngaaccctaangggagccccccgatttagagccttgaccggggaaagcccgncgaacgtggctnagaaangaaagggaag

SEQ ID NO: 2385 - DNA, 2794 bp, Homo sapiens
gcaggaaagtgcatctatcataagtgtgcaaattgatgaattctaaaatctttattgtacctgtttagcacmtagattgacactgaacataactaacaaccagaaatctccgtgtactcccttcctgtaactacccctgcgcccgaccaaatcactctcttctaacagcataactttgtgtgactagcttttttaatgtaaaagaatgaaatctacagcatgtattcatttgcatctggcttctgccacccaacattatatttgtgggattcrtttgtacagttgcatattagtttgcagatccctcactctcatttctatatggtattatattgcataaacgtaccacactttatccaactactgttaaatatttgtgcattttctacttgggggtgatttcaaatagtgctgctatgaacattcttgtaaatgtcttttggtgaacatatgcaacacatatatgcgttgttgttggttcccaggaggggcattcctgggtcataaacaatgcgtgtgttcaggtttagtacagtataatgccaaacaggtttccaaagtgtttgtgccactttacatacctgccattattgaaaaagagttctgtttgctccacattgtcaccaatacttgatattttctgctttttttttcttttaaaccgtactagtgggtgtgcagtgatattgcaatgtggttttaatttgcatcttccttgtgacaaccttgattactgtaagccacttggaaatgtgatttaaattcatataaagatatagtagcaaaacgcatactaggttactttcgtatccagaaagtttagatagaatgatttctatgtaagcttttactgtgtagtctgagtccatgaatattgattacaaaaaacacatctgtaggtgagttacaatacctcacttataattcmaaattcatgttgtgttagctcaatatttttcaaataatttttgcatgcaattttcaccttctttctgagtagtttcaggtattttgtatggttccagcagtcagttaggttgccattgtttggaagcacacatccacgtatctgcaccatgatgatatgacacrcccataccccccatttcacattttgtcagaagtgcatagttatcactaactttgccagtagaaatgtactcccaatttcccacggacttatcttgaataatctctccactgaagcataacaggttttgaattctgttagaatagttgtttttactatcttttaattttatacaaatttcaaagttacgtaatacttttatttaaaaagtgaaacaaagcttttcctctcccttacccacatgttagtccagcagagggggaaagcattggmcccaggccaaaatcataaacgctttcaattaactaataataattgctggcatgttgccattaaatattcttgtctcattatctctggttgctttatcaaacccataggtcactgaagcccacttttgagacaaagactatttctcccccaaaagtcaagggaaatataaaaaatgaaattagtgattaagaatagaagtcaattaatacawtcattttgtcttaattatttaaagtccagttttttccctccagcaaacctgaaaatacactatcctccagctatcagaattatattgagatctactcacatttatgatgatgttcagagattctcattgggaaggaaaaggcacacgctgcggcggtcttgcatgactctgttgttgtggaaattcaatttgttcattgtgttttgggctctctgggtggtcagggctgggctctgggtccttggcaattcctcaggttcccagcactccaaagccaagctcacctcctcatcacacaccctacaggagaagcattagggtgtccgactacgtgggtttcatagctgtggaaaagccaaaggggagactcctgaagaaaggcggtgaagactgtgaagagcgggtcaggaagatgagcacagcactgctactcctgtgggcacagggacagcatgtctccagccagygccaccttgtttaatacatgggaactcactgaaattcattctgtattttgcccgcaaagttttaaagmtttcatccacagtcaggaattaaacttataccaatgagagcctcacacattcaaggatgtactaagcactacaggcctcacagaaacagagatcccatcttggagttttcagtaccacatgggagataaagggttttgaacatgaaatgacaaaaacaacagcaagaagaaaattcttgtcctttttcattactatcagactcaaataaatgtcttggctcttacattacattcattcttcaaccattgtggtctggcttccacttccttcacttcaccaacatggctctgccaaaggaagcccgtgatctctaggccatcactttaattgatctytctacaacatttatcctggttgttaagccctccttacaacattcttctctctttgtttttatagctccatctctcctgcttctttaacttgataatgcatacttgatttttctatttgttatttcataaaccaattaatacacagataaaatgactgtatatcaaaccatgtttgtatagaaaaaatggattttggatgcctctcatatgtaattagttctattaaacatattaattgtattgtttaatttgtcaggtttttgacagaattttgtttacaagtaataaaaattttatctccaattttcaataaaaaaaaaaaaaaagtcgacgggccgcgaatttagta

SEQ ID NO: 2386 - DNA, 1014 bp, Homo sapiens
agccaccctgctggttgcagtagagcttgtttgactatcttgtcccaagccctctgcacttccacccactccctccctctttccagaatttgggagcaggctcagaaaatgccatgccctgaaattccacctgataggaattgaagagaaatgaatgagcgattcccagcagggatcacttgccctaaaagatgaattgagccgagtttccgcagtgactgggtccttcccacacctcatcagtagactccaagccagaatgtaaatgaatgcaaagtgatctcattcactgagcttatccatcatggatattggtgccatgactgaaggcggtgttcttgtccaagagtaagacttgtgcatgtgcttttcccctccactttcctggggagggaatggcctgatgctaccgaccagtccacattctctgaacagatgcatccccagagtgcacgtgagttcatcagcttctccaggttgatggacacatggcctgtgatgatgtttctcaaagtgtatgccacacagaacactagttcgtgagttgctccatgaaccaagggtgccatggtcagataagctgggaaatgctgcgtgctgcaccttccttagcaagattcatgtgcaaaggatctgagaagtcctgtgataccaggcttaccaatccatttggtcacatcacacaccccactcctcactgttttttggtttttgttttttttttttgactaaacacactgtctcctagggacacagttctgtgtagttaacaggaaatatttattgagtttctatgtggcaggccctgaactaagctttcttttgtatgatttcatttgctccttaaagcaaccctgtgaaatttatatattgtcatcactcccattcgacaggtaaagcattcgaggcttggagagttcaagccactttccctcctcactcagccagtaagtggtagagccaggttcaaacccaggcctgcctccctccaaagtccactttatcatgcttccc

SEQ ID NO: 2387 - DNA, 1382 bp, Homo sapiens
  SITE (558): n equals a,t,g, or c
  SITE (763): n equals a,t,g, or c
  SITE (768): n equals a,t,g, or c
  SITE (976): n equals a,t,g, or c
gttttaggtaacaaatgtttgctgagcatctaatgatgatgacaataataactatgatctatggggcactggctatgggccagggcattgctaagagctccagatccttgatcttatctaatccacataagagcactatgagggaggtactgttatttttcttgttttacacacgaggacactgaagcagaatggtcaagaaggtggctcatggtccatatggggtacagccaggacccagcccatgatttcagctcccgtgcatgttccctccatccacagggcctggtgcagttctaggagctggggggatgaagaaaggaagccaaggtcttcaccctcaaacactcacagcttttgctggtagacacaaataagtaggcaattactagaagacatcaaagtgctgttttacagcaggggttggcagactgtttctgtgaarggccagacagtgaaggttttagagtctgcarggcargcagtcgctgtcgcagctcctcagsgcmaccactgcarctataaatgtatgggcmtkgctgggktccyattaaactntatttacaaaaacaggcctctggtgggattggtcggtgggtggargggtgtarcttgccccagttctggarggattggccaaatgttctgtgaggacgctgtartgaccctaaagagaggcacccaactccatcagggctcagggaargcttcctggagggggtggcscctgaatgagcatgagctggccgagacgaagagcagnctggntgaacgggtcgggtctcacaacacggtgctcatgaggaacgctcttaatgtgcacactgtcctgtgtctgcagagcctgctcgctcagcacaaagactttggagcagcttttgagcccctgcagaggaagctcttggacctccaggtcagggtccaagccgagaaggggmttcagcgggaccttcctggaaaacaggsccagctctcnaaggttgcaggtgaggggtctgtgaggcctgaatcactcctgcccaggtgctcagctgcacctggaagcagcgtctccctctagcagtaaccagcaaagcaacagctgccgtgagccagaaawttagacccttarttgagatctgacctttcacctcaacagaacctctgcttatttatctgatggttcctgacctcaaacaactgagtcttgagctcagcaaaatgacaaactgtctttctgtttactcctcagttccaaagtctaacattggtatttgtttttagaattgctttgctaagtattcttaatgagtccagaggtgttcagttaaaccaactttgggattaagaataaatgttctgaaacgtggactgtaaaaaaaaaaaaaaaaaaaaaaactcga

SEQ ID NO: 2388 - DNA, 1282 bp, Homo sapiens
ggcacgagtataattgaaaattatattagaatattttagactgacctcccacataaaacagaaatgccttctgaggcttttgtgatagttattcagcctttaattgtctctacctccactgaccactttgtcactacctcttgtgggagttattattcccaaactgtgtcattgaaaaggaagcctctcttctataaatcaacccttcaagtattttaagaatctttccaggtcacctttctccagactaaatacacccagtttcttaactttctcttgggtgatgtgtgttccaggtatgccaaatctctattatatagttttatattgcctctatgtcttctaaactgaaatgttttccattcagttttggctattatatagaagtctaaaagtctttaagttagattttctgccgaggaactgagaggaatttggactttcctggagtgaactggagaaaggagttactttagctgttgaaaatgaggtgaggctgggtagagaaagaataagaatcccttccacctggatatagggcagattggtactgaccgaggaattactggaattcttcagttgaccttgtttgttggaacatataaatgtttaaaccttttaactagagaatcagatacacatttgcatagtctatggcctttaatacgtaaggaatattcatttggctgtagcttatataatgaattggacaattatgttttttgtggacaaagatcctgaatggcatcaaaagtttaatttctttcatttcttctttgccagcttcaaggaagtgtaacagagtatgaattctcccaggaggagtttcgaaatttacaacaagaattctggtgcaagttctatgcctgttgtcttcagtatcaagaagccctctctcaccctcttgccctacatttgaatccacacacaaacatggtgtgcctgctgaaaaaagtaagtgagctaaagcatagagaagacctcttgagacagttcagtggctgttataacaaaatgccttcagaaaacaaaaagttcagtggctcttgccaaatgttagtctggtgaatgttgcggttagcatttaggactttgcatttgtattttttcccctaaaattgtgattcattcatttaaatagttttctgtgttattctctatactttttttgtattttattgtatttatttctttttctttttttctctttttttgagttggagtcttgcattccagcctgggaaacagagtgacaccctatcttaaaaaaaaaaaaaaaaaa

SEQ ID NO: 2389 - DNA, 1637 bp, Homo sapiens
ggcacgagctcgtgccgtgacatttgtatatatgtaaaggaagaccatctgtaaatttttccagttaaagtaaacaaaaaatttaatacgcaagtacaaacctgtgcagtgccctttataagtctttcgaagaagtactacaccctgccacatcaaatgttgatgatctgcttgcttagcgggagggcatttgcttactttttctctaattactttacttctactctgatcttgctgtctcagttctcctaccagcattgatacagtataaaagggaatattaagagttccatttagtaaaaggcttcaatctaaatgagatgaagggatatagaaactgtttttcctctgactaaagaaaaatgattgggatgatctgttaaagtttcgagaaactcaaataggccctatttgccaatataggacaggaaacccacagattaagtattggataatctcaaagctccttttggccaattggtgccagttttctcacccaccaatctttcctcaactgttaaaaaaaaaaacaggaaatacattgattgacatttgtcttctcttagctgtgctttgtttcaaagttgaaaaacaaagaaaaggagagaaacttacctcctgagtaatctaatcatgaatgttctaattcttggcagttgattttaaagaagaagccagacaggaacttttctcttcattttcctctaccaataaatagcaagtaaatatgtgtcatgtgattttcttcttgacatgtacttttcttctgctctccctcagtgctcttgggaagaacaattcattgatttggtaccaacctgatgcaccctgatttgtcaaaggtggtaccaggtgggtgtcagtgtcacatacaagagtaaaactgttcctagagcaaatggcgatgagagagctgaacgcggattcatgctcaagcccccagatgggggctatgtgggagactagtgggtctgtgaaagagaactccagtcagagtaagaaatacagcacaaaaatagagaatcttggtcctgagagcgcttgcaggcacttctggagcttccgttatcatgaagcaaccggaccgcttgagactatcagccaacttcagaaattgtgccatcagtggctgaggccagagatccactcaaaagagcagatcttggaaatgctggtgttagagcagttcctgagcattctgcccaaggagacccagaactgggtgcagaagcatcatccacagaatgtcaaacaggctctggtcctggtggaattcttgcagagggagcctgatggaacaaagaatgaggtaagaagaaagattgcctacatgtacaatgaagtaggataaaagtggatatatcagaatggaggagttatcagagaattagacagattaagtcgctcttctgttgctcctttaggacagctagcaaggatctgaaatgacatacatgcatcaatagtccacaggtttcaagatttctggcagagcctttccttgtcttagagaaaataaatgcattttgtcttctctagggccagggtgaattgatggtggtgggcctagtctggcatgggcaaggacaagagttgagttcttaaaaaaaaaaaaaaaaaaaaaaaaaaaaaaaaaa

SEQ ID NO: 2390 - DNA, 1522 bp, Homo sapiens
ggcacgagggagagcggggcctacggcgcggccaaggcgggcggctccttcgacctgcggcgcttcctgacgcagccgcaggtggtggcgcgcgccgtgtgcttggtcttcgccttgatcgtgttctcctgcatctatggtgagggctacagcaatgcccacgagtctaagcagatgtactgcgtgttcaaccgcaacgaggatgcctgccgctatggcagtgccatcggggtgctggccttcctggcctcggccttcttcttggtggtcgacgcgtatttcccccagatcagcaacgccactgaccgcaagtacctggtcattggtgacctgctcttctcagctctctggaccttcctgtggtttgttggtttctgcttcctcaccaaccagtgggcagtcaccaacccgaagacgtgctggtgggggccgactctgtgaggcagccatcaccttcagttcttttccatttctcctggggtgttggcctccctgggcctaccagcgctacaaggctggcgtggacgacttcatccagaattacgttgaccccactccggaccccaacactgcctacgcctcctacccaggtgcatctgtggacaactaccaacagccacccttcacccagaacgcggagaccaccgagggctaccagccgccccctgtgtactgagcggcggttagcgtgggaagggggacagagagggccctcccctctgccctggactttcccatgagcctcctggaactgccagcccctctctttcacctgttccatcctgtgcagctgacacacagctaaggagcctcatagcctggcgggggctggcagagccacaccccaagtgcctgtgcccagagggcttcagtcagctgctcactcctccagggcacttttaggaaagggtttttagctagtgtttttcctcgcttttaatgacctcagccccgcctgcagtggctagaagccagcaggtgcccatgtgctactgacaagtgcctcagcttccccccggcccgggtcaggccgtgggagccgctattatctgcgttctctgccaaagactcgtgggggccataacctgccctgtgcagcggagccggaccaggctcttgtgtcctcactcaggtttgcttcccctgtgcccactgctgtatgatctgggggccaccaccctgtgccggtggcctctgggctgcctcccgtggtgtgagggcggggctggtgctcatggcacttcctccttgctcccacccctggcagcagggaagggctttgcctgacaacacccagctttatgtaaatattctgcagttgttacttaggaagcctggggagggcaggggtgccccatggctcccagactctgtctgtgccgagtgtattataaaatcgtgggggagatgcccggcctgggatgctgtttggagacggaataaatgttttctcattcagtcaaaaaaaaaaaaaaaaaaaaaaaaaaaaaaaaaaaaaaaaaaaaaaaaaaaaaaaaaaaaa

SEQ ID NO: 2391 - DNA, 1344 bp, Homo sapiens
ggcacgagctgaagaagaagccgccgcagcagcaccacaaggccaagcgtaaccggacttgccgaccccccagcagcagcgaaagcagcagcgacagcgacaacagcggcggcggtggaggcggcggtggaggcggaggtggcggcggcggcaccagcagtaacaacagcgaggaagaagaggacgacgacgacgaggaagaggaggtttctgaggtggagtctttcattttggatcaggatgatttggaaaatccaatgctggaaacagcttccaagttgctcttatcaggtactgctgatggtgcagacctcaggacagtagatccagaaacacaggctagactggaagctttactagaagctgcaggaataggaaaattgtccacggctgatggtaaagcctttgcagatcctgaagtacttcggaggttgacatcgtctgttagttgtgcgttggatgaagctgctgctgcacttacccgtatgagagctgaaagcacagcaaatgcagggcagtcggacaaccgcagtttggcagaagcctgttcagaaggagatgtaaatgctgtgcgaaagttactcattgaagggcgaagtgtaaatgaacacacagaggaaggggagagcctcctttgtttagcttgttctgctggatactatgagcttgcacaggttttgttggcaatgcatgcaaatgtggaagataggggaatcaaaggtgacattacacctttaatggctgctgctaatggaggacatgtcaaaattgtgaagttgctgctagctcataaagcagatgttaatgcacagtcttcaacaggcaatacagcacttacatatgcttgtgctggaggctatgtagatgttgtaaaggtgctcttggaatccggtgctagtattgaggaccataatgaaaatggtcatacccctcttatggaagctggaagtgctggacatgtggaagtagccagattgctgctagaaaatggggctggcattaatacgcattctaatgaatttaaagagagtgcccttaccttagcttgttacaaaggacacttagagatggtgcgatttcttttggaagcaggcgcggatcaagagcataaaacagatgaaatgcacactgctctgatggaggcttgcatggatggccatgttgaagtagctaggttacttcttgacagcggtgcccaagtgaacatgcctgctgattcatttgagtcaccattaactttggctgcatgtggtgggcatgtggaacttgcggctttacttattgaaagaggagctagcctggaagaggtcaatgatgaaggttatacaccattgatggaagcag

SEQ ID NO: 2392 - DNA, 1399 bp, Homo sapiens
ggcacgaggtatatcttgtctgtcagctaaattgtgtccttaagggcaggacctgtgtttcagacatctttgatatttaccatgtttgtcataaatttagtgaatgtacagtatattttggttttaggcgagcagtgtatctgtcccttttgctgcttgctagttctgccttacaacttccactggaaagagctttttagtgcagcaaatagtgtctgcattttattgtataaagcattgcctgggccataccaaatcattttgacagaggtcatttcagggatgccacaggcttcataatgctacttgatgctagttgtagcaaattgcacttgggttttggtagttgtgagtatagtgttgtctccttccaccccgccttgtgtgttaatcactgactgccaggaaatctctttgacataacatcctaaaaagtttttgttatcagtagggccctgtaacattttttttccttttctaaagcctatgccttcaaattttttacaagtgtcttattccttctaaattgagaactaattgaatattttttcttgtagataaatcttattttaaatatctagttatcattactttgcattctccttttctgattttatgttacattaccaatatcttatgatatttaaacttttttgaactctgctttttaaaataaataatataaatgcctcaattatctggaacttacactgaaacactgtaatcttgtctctgagcctgcttcccctcaaaaaatttagatttagcttttcagatgcttatagctagccaagtaagtgagaataaacacaaaaaggctaaaatatgcaagttccggagttgtcaaagcttcatgtaaaatgtgtcattgtggaatttaaaaaaattctacgctttttcatcaaggtttttggttggggcatttagacacttcctgaaatctggcattctcctaggcactgggataccatggagaagaggcagatatggtcttggctcacatggggcatataatcaagcagtaattcttaaccttggacagacttgagtccattatgccaatggtcatctccactttgccatgccattttagttttccctaagtaaaaactacgcctgtaatcctagcactttgggaggccaaggcgggtggatcacctgaggtcaggagttcgagaccagcctggccaacatggtgaaacctcatctctactaaaaatacaaacattagctgggcgtgatggcgcgtgcctgtaatcccagctactcaggaggctgaggcaggagaatcactcgaacttgagagacggaggttgcggtgagccgagatcaagccactgcactccagtctgggtgatagagtgagactcagtctcaaaaaaaaaaaaaaaaaaaaaaa

SEQ ID NO: 2393 - DNA, 3261 bp, Homo sapiens
ggaaaaagctaagcaagtgcttaaaataattgctactttcaagcataccacctcaatctttgatgactttgcacattatgaaaagcgtcaagaagaggaggaagccatgcgtagggrgagaaatagaaacaaacaataaccgtatgargatgtcctgttaaatttacaacactaacgatgtagactctggaaatgcctaataagtcaaagaagacgtattaaagctcttttctgcttaaggtgacatctttgaacactttaacacaaagttgactcttctcgtaatggttttcatcagcgcatctgcccttatactcttcaccaaacacacttgagaactgtaacttcgtcaagcactttctgtcctgaagcttttaccagtatctgctgtcttttgtaattatgcatcctagctaaggcacagaagactgaatgaatgcaaggattcattaactctttgaatttgttaaatactaacagttaaccattagaagtggttcaatgatgtaagagtcacactgcttcaactttttctttgttgtagtttttaaattgtcgatttttagctatttgacagattaaaagcaaaataatcatgccatatttagtcctggagttcaagtctaaatgttgatgtgaaaaattattgtagtaaacttttaatatggcaaagcaaccttaagctctattttagccaaatgaaacataatctgaaattatattagaacatttcccttgtcttcaaactgtttggtgtaacagaatattgatatgcagcttggtggatttcaccagttaatgcacattcttcttccctcctccccccattaatatgtatactgaaaaatgtgcatttgtctgaggaattattttgtttgctaccacttaatgaatctcaaaattttgagtaaatgtacctcagtctaatcagactttttatgacctttataactacatttaaaacccttaattcctatttctgggtgtttgcgagcctgattgctatcatgaagtaaaaatttattactctaggtattcactagctaaataaacatagttcttgtttagcaagcatatgttgttcctcagctcttttctccagcttttgcagtgtcctggcatccttaaaatactttgaaaatatggccttgatccatggattaaatcagtatctaagtgaatgtgttgatgttttattgatcagatctatataagtgggaatacagcatatatctggatattcttatagttatctttttaacatcttatttttttcattaattacatatcaacattaattttgtatcttgaagcaaattgattttgtataattaaatgtgtcaagcatctgtattaattgatttgatggcataaggttatgaaaataatgtactgccccatgtattactgttccaaaaggagaaagctatgtagaaagatacattaagggtgaaaatagcaatacagtagatttgaataccttgatgttttgcattacttcatttatgtttacatcatgtttagaaatgttttcatttactgtggtctttggtcacttcagctcaaagacctagtgatggatatttctttgaggctttcatttatataattttattttgtacaatgttttttttaaatgtgcaaatactgtattcaagtgaaaaaaatacagtatttgtagataaccatagctactacacagttcttcggtagtcccagtgtagttatatcagtgtttactgaagggaacatcaaaatattaatggtatattataaaataaagactttcttaaaggaaaattgcacctattttacctttttaagagtaagccatgaaatcttgtaacatgtctcttaactatttataatgaaaagtggcatttgggtatagtcaccacagcaatgttctacatccctaagattatctaggtaggacatgtcaaagatgactgttgtcattctggaggtcctattagagaatattataaaagggtgaccttgtaggaaggatctgagtcctccccctgaggttctctttttcttggtgctttattagcaactctggatatttttataaaactagttacattataaacggtttcaaacatgtttaatttacattaggtttttatgtaagagtgtcatggaagcactcagcaagcaggctgattgcaatagactcagacatgcgaataaatgtaattgagagtctattcatggtgaggagtacatcccagtgcctttaacctggatttctaatcttaagtgaaatgggtgcagcattcctttggaaaaaaaaatctttttattttcaagtgataattttgtgtttttctcatataagttttctccagagcacccaccttctcttccttcttggtctgtcattatattgcaaaatatttttcctctgaatgaaattatcacaggttgtctcaagcacaaccaactgaatgtctcttaactgtggggaccaaaagggagagagcctggggtctacaagaggagacacatcatcaaatgtttgaatgatcacaaattaagacattatcagcccagtaaatttcttgcttaatgtttttccaagttctggcttgaatatttcttattaaagctatcttatgtgggtattttattttgaaaggtattatagtttgtatatttaacagtaaggaggaaactgtaaccaaaattagtatttctctatacgtattggtacttgaagattcctttcaaaagaaatccagcgttttcctaattttagtacttaatttctctttttaatttaagtgatctttctaattcgaaagctgtgttctttttgaataccgtgcatgggggttaagctgatgttaaaacagtttgcaataaaaaaaaatgaatcagcttaagtcatttaatcatttcaagtgcattctgcatcctttaaaaataagtttaagaaatttaagagaattgtgttttcattaagttttgcatatcttttgttatgccatgtaaattccctttttcgtatgattaaaggaaggttatgataaaatgattagttcatttacattcacttgtagcaattacatgagaatttgaattttgtcgtgtttgggtttgttcattcctgtgaatgatggtacagttaggtgagattttctgttatggtacccaaactcaccatttggtcctctttaatctttgagggtttcaataaaaattgttcactcaaaaaaaaaaaaaaaaaaaaaaaaaaaaaaaaaaagggcggcc

SEQ ID NO: 2394 - DNA, 1594 bp, Homo sapiens
  SITE (1090): n equals a,t,g, or c
actcgtgccgaattcggcacragggaaactttggaagttcattcttaaaaattttataagtaatatatgagtacgtttttatgggatattcaaaccacctactgtttttaggtcttactctcttrtgwtgcagctgttgctgatccctgtagagtaaagtacacactgaaggctatggcaatgatctaccgttccagcttcctctaggaagggagtttgacaaataaaatgctagtgaactggagcacagtgagcaagggggaggtggcatgagctgaggacacagtgggcaggccagaacacacaggcctggacatcacctcaggaacttgcatgttatttggagcataatggaaaaccattagaaagttttagggagtggttatgatttcatttatttatattttataaagatctttctggttattcggtgaatagttatggttaaaccagttcaacccagtgacagtacctgtcacatagagttattgtgaggattggttgagatgtatgtgatagattatctggcacaaagtaagggccccctcaatattgtttttctctcaagtgcacccaaattggggtattggaaacacttcctccgtagtttggtagaaggcaccaaatcactagggctgataccgtttgagtggggccccagctgatggggcagggggtaaaggggtgaggggcttaatatgaggcagaaggaagggccaggcctctagaactcatcccaagccggccccattctctggctccctgtacatcctgcctttccatagaggaagccagtcccaggggtggctgcatcttattccatgcttwacatctcatcagccttgctgactttccccagcctgctgtagatcagagtgaaatctgtttttcctgtctagagcaagcgcactttttcctgaggatttccaaatattttgaattcccatatgcagtggaagccgaagaagctggagggagagtggggttgggaggtgcagaggttccatgtcttcttgcctttatgaagcttctggcattgtgctgggtgcaggtgatccatggaataagatggatgtggttctagtgacgnttcacatcacgaaggaccatctgtgtcctcttagggagtctggctttcctgctaagggcaacaggaaggcattgtagggtctgtgccaggataccaagtgaaggaagagatttccttactgtggacttgcagacgataagtaaacttttgggtcataagagaccatctcttggaagctgaagaacttaggccaaggttttcctgagaaatctagttttgcagaatgttgtgaaccttgatgctctggtgacagtgaattaatggtttattttaggaagcactacacaattttacttaagagtgaggctagaaagttgagctgtttctcaccttttataaatgaagtttaagatcagattaatctccatggagtttttagctcaaagcacaattagttttctatagaaagggcttgggctgaaccaaattatgccattgatctgcctggtagacatacaaatcattctgttcttagaaaaaaaaaaaaaaaaaaaaaaactcgag

SEQ ID NO: 2395 - DNA, 1455 bp, Homo sapiens
ggcagagcccaagctcccttggactctgtatgttccaactgcatactgtgcttatgctaatgaatttcgttgttgccttgtctgtccctctgactttgaagacagaggcagtgagtacagatgtttgacacagtgcccagtacatatatgatcttaatatttgttgactattaacatcgttgttattgttaataattatagaatgtactgttaactttttttaactttttaaaaaatcttgttttttatagcctcaaggaataggttctcctagtgtctatcatgcagttatcgtcatctttttggagttttttgcttggggactattgacagcacccaccttggtggtaagtaatcttttaaattatttaacactgactccaaaatctcttcttcttcagttttggaggaaaatgtgggccttttccctttgcacggttaattctcccaccagtattgttcagtattcaccagtattttactggttgtcttttccaactgttaactctcccttacctttttttgggaggggggtggcgtggaggtgtttgaatttggacttgtcactgggcatgttcaagcagaggctctgtaactactctgagtaaaatggaagagattcttaaaccgacaggtttagaaaagatgatgtctgtgacctgcatgactcggcataattactttsaggttcatttatgcagctgmctttmcaaaarcaggtttctgttcatttgggctaagtacctagaagggctattctttaatagatctaagctgattttacccaaattctcccaggtttgaaactttagaaaagacctccctgcccgaccaaacaactcagaagatagccagttttcttatattggtgtagataaggggaatggaaggagggaaggactatctatggtaaatatctataccatcttgaaaggagtaattatgataaatgtacagtttaccaaatcctagaggaatagagttttaaagtaatatactatgttttcatgaaggtttttataaaaaagttatttaatagaaaaattatgtaagtagattgaactagcctaagaacatttacagtacatatttcttgatatatttattgacagctgtgtaattgttactatctatacataaaatattgatgtttagcagttgcttatgcctgtaatcccagcattttgggaggctgggtgggcagatcgcttgggctctggagttgagaccagcctgggcaacatggtaaaaccttgtctctacaaaaaatgcaaaaattagttgtgcatggtggcatatgtttgtagtcccagctgctcgggaggctgaggcaggagagtcgcttgagcccgggaggcagaggttgtagtgacccgatatcgtgccaccacactccagcctgggcgacgggagtgaaaccttgtctcaaaaaaaaaaaaaaaaaaaaaactcgag

SEQ ID NO: 2396 - DNA, 2020 bp, Homo sapiens
gaattcggcacgagccgcmttaactttaaattcggatacttttaattctttggttatggtttgttggttgctaccactgtgggtcactgtcttatccttcccagtagggagagatgtggctgctcttctgattttcacctcctcttactaatttaccctgtggtgggaaacacatcaactgatagtgttatttcatgttaagtaaaggcaaatagccaccttcctcatttgactgaaactcaatgtgtcacattctacctcttttcttagtccttaaagacttctgtcatctgttagtctgcaggctcttaaggtcaggctctgtcttcccttcatctttgtagcttctactcttgtgcttccctcttgatgtaggccctgaatcactgttttgttgactaggagagcacatgaactgtttgtgcaacctctcaagctccgttagaaatggaagatgatcatacmtcytgtggcacccctttttcccagatcccaagcttccgggcaccctttctttcttcacctccacagatgctgccttcacccaccctttgatgaaccatcttgatcaactgccaagaatgtcaagggcatttctaacgccagggcaacagctatgagcacttatgagaccacatcaggtttgactcctgaacgaaggatgtccttawccatggkcyctttttcctggcaggcatcttgctgttattttggaaattttctctgggccgtaraggtttgaaccagtcatgtctaggagcgtttgttttctcaggaaaagcaaccctgttaaagccattgttttaaaaagtcacttggarcmttwaaaacctttgaccatccattcataaggctaaaatttagragtggggcttcaggcaagcaatattgaattaaatgtgtggagcactttaagmcagcatttgattgacatttaaaatagggaatgcaaattgaaattcctcctgggtgctttaaatcatgcattatatgtgcagtattttcaattagctgcagaaaaaaatatgttcggtgtggctgtatttttacagctgggaattgctcagagamcmcaattgactatttcatccatgtgagatttatttaaatgactcgtggggcatttgcagtttagccaataattgaaaatattgttgcaatgtggcaggtaaacctaggaaatcatttcgcattcctgaagaggtgttccaagctcagcagcatattatattagttgaagaggggcaaacggagtgagatcagtgttgagttctagtctttcacatttcattcctgggttttgccccaccatggaaatatatgggatggtgctttccagaaggacctgaaacgctaaggtgttatcttgtttctattctgtttttatatgccaamcwcaaatgaatggtcagaccagatatggaaagacccatctatcccccaactctcttctgactcctatacctttctttctatttttcgtaccatttcacttcagaagtcacctggaatactgatgcaggaggctaagctgagtctctcagggtagacagttcaacctttctatggttgttcataaatattactagggatttggaatgcatgttcccactaaaatgatgtaaatgtggttaggtgataccatattaaaatgcatcatcacttgtgcgattcagacaaagtatgggttaactaggcattgtgaaggcagaattaaaatactaaccaccaccactttctctgtaatagtggttgccaaccaggggtgatccttcctctctccttcagggacatttgtcagtgtctccagacatttggttggtccatctgggtggggtgctattagcatctcttgagtaaaggccaggaatactgctaaacattctgcaatacacaggatagccccctacaatgaataattatccagacccacatggcaagagtgacaaggttgtgaaactttgctctagaaatgtgtacattcttttttttaaaaaaaaaaaaaaaaaaaaaaactcga

SEQ ID NO: 2397 - DNA, 1774 bp, Homo sapiens
gaaaggtacctctagagctgcagcctgaaactgtacattttaaataaacccttgggggttatcatgcccagtgaatttgagaatggccctcaggtgaatagactgatgctgggacagcagcagcccgtggctgatgtgctgagcttactgcatcccctctctgtgcccccgggctccctggagcaagatggagtataatcccgccagccaggattttaggacagggacatagccctccgaacgatggtggaagtcagtgggtgccacatgggatgaagactgagagggaaacccttagaattggctgggcgtggacaaagcggggaaaaaagtactgaccaaactcacttcagtcttggagaactcaaggaacaagggacacacatacgtacacacacacacaggcatgaacacatcagacacatccttcagcctgcatactttagcttcagatagacttttcttttactagaggcaaagtgatctcactagaagaatgtgttcctcaggagctgctagatggcctgtcgctctgtgcccgctcactgtggacggctgccccacgtggatgtccataccacagtgggatccacggcctcactcaaaagagagctatggttcccagatccctgacaagagggccacaatctgaaaaggggttcctggttagctcttttaggcttagcctgagaacagaattagcctcatatttttaggccatttgccatacacattttctctcattctcaactgatacgggtggggggagattttcgaaaacagtgatgttggtaatttatagttagtaaataaaccatgtttccatatgcaaggattcacaccaggggatcctgcccacaggtatctggaggtcaaattcgtatgtgctttctgccaatctgagccactgcctctgtgtctctgagaataatatactctgcaagaaggaaagacgcacaagcaatagtgcagtcttcttagcaggcggaagtcagcacggtgtgccccctgtgtaaggggagttgcgctaagcaatgtgtttggtgattgacagattctctgccccagattctggttacctctgattagtagatgcggacatggaattaagggtaattgaaggatatttatcgagtcagacatacaccttagaataaggcttttactgttctagaaacaatattccagaagatgaaatcatccaggatgccccaaaaatatttatttatacaaagattttgagagtaatattcatacttgtctttatacctcagtctatgcgtctggggccaagtcactgtgtggcacatgtgcagcttccccgaatgcctcacatgttgtagcacctgcttccaggaacaccaaatgaacacagggtcttggaggggaagtgggggaagaacccataatgccccaaggctgcatggaaccacaatccagaaatgtgcatcctgacctggaaggcgtctaaccaagtgtccaaggggaaatatgatcgagggagaggtgagaggagggacccagagggcagacaggagagggttgatttccaccctttcttctgcgttcagcatatccaaaaggcccaatacagttgatgggccaggaactgcatgacctggattttctccctgtagtgacccacgatgttaattgatgtagaggacagtttgcaaaagtaatagatttgcccttaatcmcagacagtatgagatacaattctgggactttgtcttcgtaacctgtctttaaaaaaaaaaaaaaaaaactcgag

SEQ ID NO: 2398 - DNA, 1619 bp, Homo sapiens
gtttgtaataaaataccagtgaaggacatgtttggatatctgttaagcatttttccctgactaatgaattaggaaagaaaacataaaacataaatgaatagttatgtctcttctaataaacagtgtcattaatgctgcagttgtgggtcaaacttagggagccttatttctaaatagcaaaaattctgttttcacttcagcccttattttttttgttagtttttctctgcactgtgatacagagctaataagaggaaatgtgacgtttcagagagagagcaagcaaattgggtatgacttttttaccctatgttccccaatactggggatgtttggctactttgaacagcagtttttagtgatctaaagtttagatcaatactcgtataagagaaaaatctaactctcagtgagctccatagggcagcacagctttccatcttctctttcgccttcttgcgtctgcccaccacagtcccgaagaatgcacacgcacatatgatctgtacccatcccgcccgaagagtcatagaatcctcttctttcacttgtttcttttttcttcgtttgtttgtttttgtttgtttgtttttttaagctggggaccactgaagtaagctctatatgcacccaaagttccccttggaaaaattttcaacacgcagtgcagaaggctccagtgcagctaaatgccacaccattggttctacctgggggaatagactgatttgccctaaaatgactccaacctgcatcattaaggtacagttggctccagtggattagtgctgaaatgatgggaagtctgacacttgttgacattgtcttcatctgtttggaagggttgaatctgttcctctcaacagtgatagttcttttcactgtatagtattgagtatgtctcagggattccttgtggaaattagggcagtttttaaaataagaaaatagttttaaaagaaactaaaggtgactcatcattgaagagagcggaagaaagaggaaacatttggttttgtagcccacagtgtcttgcataggactttttcctttctcctccaggctctcatctcagcttcagaatacagaatcctttcccatcacgcacagctttaaaacttttatttaaaaatttccttccccaatgagctttcagaatacttattgtagattttaagagaaaaggtatattaatttatgctattaacatcacctcataaattataagttttatactaaagctgtatcgagtgtaatgaattatgttgcctatgtgtttaatagctaaatatatatgagcttttttttttttttttttttgacgaaaacaaactagtaagcacctttttacactggatctgccgtgtcaaggtgtatagctatcctttgctaccttgcagatatataaaataaaaggatatcctggggcctcaaaatgtagaaccctttagaccatttataactgttcctagaactgttgagaatcatgttctttagtaaatgatctgtggtttacacttaagatggctagaagcttagttacagggtttgttaaaaaaaaaaaaaaaaaaaaaaaaaaaaaaaaaaaaaaaaaaaaaaaaaaaaaaaaaaaaaaaaaa

SEQ ID NO: 2399 - DNA, 1921 bp, Homo sapiens
gcagaccccaaagcgcctgtggtgctgctgagtgagccggcctgtgcccatgccctggaggctttggctactctcctgcgcccacggtacctggacctgctagtctccagcccagcttttccccaaccagtgggttccctgagtccagagcctatgcccctagagcgttttgggcgccgcttcccccttgccccagggaggcgtctagaagagtatggtgccttctatgtagggggctctaaggccagccctgacccagaccttgacccagacctgagtcggctgctcttggggtgggcaccaggtcaacccttctcctcctgctgtccagatacagggaagactcaggatgagggtgcccgggctggacggctaagggcacgaagacgatatctggtagagagggccagagatgcccgcgtggtagggctgctggcaggcacactgggtgtagcccaacaccgtgaggcactggcccacttgcggaacctgactcaggctgctggcaagcgtasctatgtgttggccctggggcggcccacccctgccaagcttgccaacttccctgaggtggatgtctttgtgctattagcctgtcctctgggtgctctagccccccagctttctggtagcttcttccagcctatactggcaccatgtgagctggaagctgcctgcaaccctgcctggccacctccaggcctggctccccacctcacacattatgcggacttattgcctggctctcccttccacgtggctctcccaccacctgagtcagagctgtgggaaaccccagacgtgtcactcattactggagatctccgacccccacctgcctggaagtcatcaaatgatcatggaagcttggctctgaccccacggccccagctggagctggctgagagcagtcctgcagcctcattccttagttcccggagctggcaagggctggagccccgcctgggtcagacgccagtgacagaagctgtgagtggaagacgagggattgccatcgcctatgaggatgagggaagcggctgataccatgtggggctggagacatagatggacttatgaatggctgctaggacctttagtgctccctgcaccaacctcccatccccctgccaagatccttgaaggaccctggaaggagggagagcaggcagcccttcacaggataggatccgtctctgtcctgtcctggcactggcacaagctcagcacatgcccagtaatgcgtgttgtttggctgatggaataaagggcttagggacttccctgaggcctctggacccatctgtcttcctgagggcagcccaggacctttggccaatcccagttcccaggctgcagttgagggtctgtccttgtcaaaaggcaggtgctagacagtctagaccagggtttctcaaactcgtacttgacatttggggccagataattctttgttgtggggctgtctggtgtatggtagggtgctcagcagcatccctggcctctgcccactagacatcagaagcactcccccagttgtgacaaccaaaaatatctccagaccttggcaaatgttatctgtgggggaaaattgccctcaattgagaaccactggtctagctagacctgcactgtccagtacagtagccactaaatacatgtggctaaacttaaatttaagttaattaagattaaaagctcagtttctcagtcacattagtcattcaagtgttcagacagccacatgaggggacagtgcagctacaggatatgccatcatggcagaaagttctrttggttggacagygttggtctatactgactcttatttctcagggagatcacagcaacctaaataaaccagataccttttcaaaaaaaaaaaaaaacaaaaaaaaaaaaaaaaaaaaaaaaactcgag

SEQ ID NO: 2400 - DNA, 1920 bp, Homo sapiens
gcagaccccaaagcgcctgtggtgctgctgagtgagccggcctgtgcccatgccctggaggctttggctactctcctgcgcccacggtacctggacctgctagtctccagcccagcttttccccaaccagtgggttccctgagtccagagcctatgcccctagagcgttttgggcgccgcttcccccttgccccagggaggcgtctagaagagtatggtgccttctatgtagggggctctaaggccagccctgacccagaccttgacccagacctgagtcggctgctcttggggtgggcaccaggtcaacccttctcctcctgctgtccagatacagggaagactcaggatgagggtgcccgggctggacggctaagggcacgaagacgatatctggtagagagggccagagatgcccgcgtggtagggctgctggcaggcacactgggtgtagcccaacaccgtgaggcactggcccacttgcggaacctgactcaggctgctggcaagcgtasctatgtgttggccctggggcggcccacccctgccaagcttgccaacttccctgaggtggatgtctttgtgctattagcctgtcctctgggtgctctagccccccagctttctggtagcttcttccagcctatactggcaccatgtgagctggaagctgcctgcaaccctgcctggccacctccaggcctggctccccacctcacacattatgcggacttattgcctggctctcccttccacgtggctctcccaccacctgagtcagagctgtgggaaaccccagacgtgtcactcattactggagatctccgacccccacctgcctggaagtcatcaaatgatcatggaagcttggctctgaccccacggccccagctggagctggctgagagcagtcctgcagcctcattccttagttcccggagctggcaagggctggagccccgcctgggtcagacgccagtgacagaagctgtgagtggaagacgagggattgccatcgcctatgaggatgagggaagcggctgataccatgtggggctggagacatagatggacttatgaatggctgctaggacctttagtgctccctgcaccaacctcccatccccctgccaagatccttgaaggaccctggaaggagggagagcaggcagcccttcacaggataggatccgtctctgtcctgtcctggcactggcacaagctcagcacatgcccagtaatgcgtgttgtttggctgatggaataaagggcttagggacttccctgaggcctctggacccatctgtcttcctgagggcagcccaggacctttggccaatcccagttcccaggctgcagttgagggtctgtccttgtcaaaaggcaggtgctagacagtctagaccagggtttctcaaactcgtacttgacatttggggccagataattctttgttgtggggctgtctggtgtatggtagggtgctcagcagcatccctggcctctgcccactagacatcagaagcactcccccagttgtgacaaccaaaaatatctccagaccttggcaaatgttatctgtgggggaaaattgccctcaattgagaaccactggtctagctagacctgcactgtccagtacagtagccactaaatacatgtggctaaacttaaatttaagttaattaagattaaaagctcagtttctcagtcacattagtcattcaagtgttcagacagccacatgaggggacagtgcagctacaggatatgccatcatggcagaaagttctrttggttggacagygttggtctatactgactcttatttctcagggagatcacagcaacctaaataaaccagataccttttcaaaaaaaaaaaaaaaaaaaaaaaaaaaaaaaaaaaaaaaactcgag

SEQ ID NO: 2401 - DNA, 2206 bp, Homo sapiens
ggaccacttgaagtcattgaagggaactctctggagatagtggagttcttagtctctgccctttgttcttaaaatattcagctgcattttaggtaaggtagtgatctgccttcaattgcaaatagttgataatatcacttttaatgtagactaaagccaacatttttcatgtattgttctatttggagtaaataacacattttggcatggttcttcatgtcttagcatctgtcagttttcatgtgaggactcagtttacaggttatatacagcacatgttgagcgtggtcagtgggtattgtacctgaagtacgtacttcccttctgttgctgatattgtcatgagcagttccaccctcagtgtttacctctatgctttgaaatcttctctcaaacgcatattcattcctawtttttgtaccctttgggattcctcaatctcatatacatctttccatttctgacctaatcccagcactttgggaggctgagccgagcatagtggggtgtgcctatagtcccagctactcaggaggctgaggtgggaagatcacctgagcccgggagctggaggtttcagtgagctcagatgtgccactgcattccagcctgggctacagagcgaggcctgtctcaaaaaaaaaagtctcatgacttcgtctcctagatgaraccatctctagctgatgcctttgcttgcattctcatgtgcagggccagcagatactgatggarcagatgttctctgargctgtaggtgctggggcacaratcttttcctcatcctactacctartgaargggaraaatgacaagcgaagcaactgcaggtkaaaaktgtttggagaggtttctatasggctccagtctatgcactgagcccaggcatagacttcagagatgcttcctgaaaagaagttggcaagatatgagggaggagggcgcagctcctgattcctctgacctttctattgtgggtttgatgccccctccccacctgagtcctcatgggcagctgtgttttgtttttttttgttttgttttgttttgtttgagacagagtctcgcactgtcgcccaagctggagtgcagtggtgcgatctcagcagctgtgtttttaagaagtgtttctactcctttccttactcaatcctgaccctgtaaaattcccacttgctggctgccccctccccaaggaaaggccgccctctgcccctccacagtgggtggtgcccggagtcaggggacaggtctgggctttcctattcttgctgacccagctatagagaccgtgctctttcccattcagagagtcatagctacttggtttttttttgkttgktttgktttgktttgktttgktttgkttgtgtgtgkgkcttttattttacgcttggggktgkctttttaaaactttcttttawtcttttatcttgggawaattacytattttaaagwaagccttgkttgkttttgkctgktaaaaatctttacagccatccagcttatatcaacttttttatttcctgccaggcaaaaagaattaatagaaaatggcagcccaagaggtaagatacgcagtctgtccacaccccaracagggcaggataaatgcctttcttggttctaataagccctgaagagatactccctgtagcaccaagtcatttccctctgctgcccctttgaggtgactgtattcccaaaagtagtcagtgtagaggaatggatggcccgtttaggataggtagttgcacagattatctctgagggaggtgactaagaagctgaactccaaagacaagacaaaggaattgatgaacagtatcattctcttaactctgggatagggattctgtgaaggttaatgtatgctcttttttctagggagaagatccctttatatttgattgtcctggggatctgtggcccagagtaaaatcagcagtcccagctgtatagactttcaggttcattatggttgtgatctgaaaaccttggtcacctctgtggtatgtgtcattggattctagctacttgagtgaagtggctcctgtgcattcttagaagcgagtatgagagaggatggggtggagttccagttttactagagaaagctctcaaaagagaattttgatacccaacttgaaacctggaaaattaccaagtacagcttcgtgttaaaaaaaaaaaaaaaaaactcgta

SEQ ID NO: 2402 - DNA, 2597 bp, Homo sapiens
  SITE (588): n equals a,t,g, or c
gagatttaagtcgaatgccctctttaaagggaacaaaagctggacctccaccgcggtggcttagaaggaggcattgtttatttattatatattttgtaatgttattaccaatcttgttatactctttcttataccctacaattgttagcagaaattattttaaattaataagatcctgcatgcttttccttaaaaaaaaaaaaaagaaagaaagaaagatctctgtgtagagtgtcctattctgagccagtcctgagaggaaaggaagtataatcaatttgttattaaccgatgaaagaattaagtgaaagataaatctcaggaagcagaggaagtaaacctaatctctgactaagaaagctaaatactatgataactcatcattccttcttttgttcaattacattatttaatcataagtccatgacgtgccaggcactcaggaaatagtaaaaattggacgtgcgatattctgcccttgtgtagcgcacactagagtgggaaagaaagtgcacttttaactggacaactaccaacatgatgaggggaggaaacaggggctggaaatgtccacggactgtgccgaanaatgaagcccataatatttgaaagtcagtttcttccatcattttgtgtattaaggttctttcttcccctgttctccgccttcctgcttgtcatcttcactcatcagctgaccatgttgcctcttgtggtgtaaacttgtaccagttttacggtccctctggccagttcacccatgaatttgatggagatgagcagttctacgtggacctggagaagaaggagactgcctggcggtggcctgagttcagcaaatttggaggttttgacccgcagggtgcactgagaaacatggctgtggcaaaacacaacttgaacatcatgattaaacgctacaactctaccgctgctaccaatggtatgcgtccaccattctgcctctctttacttaagctatcccttcataccagggttcattattttcttcccaagaggtccccagatcttcttatggcaattgctgaaattttatcatctcccatctctaaaatcacatattcccatgtaatacaagggtctttccattatgcattcagcaaatccttctaggagaggtctcatcaacctcctactttattaaacatgcccacagagagaaggcacaggaataaagcagagcaatgtgtcattgctcccaagcagaaggtaaataagacctctttgactatcaggtggtgaaatgctggtaggagggctcttccaggatgtaatgcagaacttcagggcagagctattcacacttcacaccagtgctgtttcctcaccacagaggttcctgaggtcacagtgttttccaagtctcccgtgacactgggtcagcccaacaccctcatctgtcttgtggacaacatctttcctcctgtggtcaacatcacatggctgagcaatgggcacgcagtcacagaaggtgtttctgagaccagcttcctctccaagagtgatcattccttcttcaagatcagttacctcaccttcctcccttctgctgatgagatttatgactgcaaggtggagcactggggcctggaccagcctcttctgaaacactggggtaaggatgagtttcatcattttttgattcttttctgtctcacttttttttttgaaagaataaagcaaaaaaagcagagatttattgaaaatgaaagtacactctacaggatgggagtgggcctgccacttcatggttttctaaatgatagacttcactctcctccctaagctgggggccttgagtctttgtagagccaaccctgtaccccatcccatcccacacacatgcacatgagcaaactctggcattctgacctcaacaacttcacttccacagagcctgagattccagcccctatgtcagagctcacagaaactgtggtctgtgccccttggggttgctgtgggcctccttgggcattgtggtgggcactgtcttcatcatccaaggcctgcgttcagttggtgcttccagacaccaagggcccttgtgaatcccatcctggaagggaaggtaagattgagactggttacagttgaagcggcagtatgaaaggaaggaaagtgggagggcgttgtggacatgaatgtggtttaaagttgtaggggaattgggaagtggcatgatgatgacacaggacccccctcagacccattgatctcatgtctgccctgttgcaggtgcatcgccatctacaggaacagaagaatggacttgctaaatgacctagcactattctctggcccgatttatcatatcccttttctcctccaaatgtttctcctctcaccttttctctgggacttaagctgctatatcccctcagagctcacaaatgcctttacattctttccctgacctcctgattttttttttcttttctcaaatgttacctacaaagacatgcctggggtaagccacccggctccctaattcctcagtaacctccatctaaaatctccaaggaagcaataaattccttttatgagaaaaaaaaaaaaaaaaaaaaaaaaaaaaa

SEQ ID NO: 2403 - DNA, 1075 bp, Homo sapiens
ggatgactagaatcccaacactgtattttctatcttccttttgttttcttgtattttaaatacaagaaagtttaataactgaaaagttcaagagaattgcccaggtgtacaagaattataagtgacagagctataattaggaacacattgttaatgacttcaattcacttttgcttctaatgctgccctgttatctttgctgtcattatcccttattcttcccatcttaaagaaaataacaagaatagtatataamctgtaaatamcacatttatgtttatgattgttatatatgaaaacaaaggcttgcatagatggcatagaaatgggctttattaaacaattgaaacatagtgagagataaaggaaagtcaccacaaagccttgcttaatcatcagagtaagtggactgatgtcaatttagctccccttgccctgttaatcttctctaggatgttgatgaaaaaaataagtctgacagctacggttctctgtggtcattgtctatacgtatttctccatggcttccaccagtaataatcagaggcagttgctttgtttgatgttatgtatagaatacgtaatatcagcattgtagaaatggtactttgaaaaaataaggtagtataaatcaattaggaggagcacaggctttggtgtcagtgcaccttagtttgaggtctgtttgtttgtttattttgagacagcctgggtgacagagtgagaccctgtctcaaaacaaaaggattattagaaagtaccatgcacaggccaggtgcggtggttcacacctgtaatcccagcactttgggacgccgaggcgggcagatcacccgagttcgggagttcgagaccagcctgaaaaacatggagaaacaccctctctacaaaaatacaaaaaattagccgggtgtggtggctcatgcctgtaatcccagctacttgggaggctgaggcaggagaatcacttgaacccaggaggcggaggttgcggtgagccgagatcacgccattgcactycagcctgggcaacaagagcataactctgtaccaaaaaaaaaaaaaaaaactcgag

SEQ ID NO: 2404 - DNA, 2778 bp, Homo sapiens
ggaattcggcacgagaaacgttaaagaaatggagaatgggaacttacctggttggcactgtagttagtggccatgatcttgtgctgtttacactcgttgcttggcaactgcagaaggccgacctcctgggactaccaatgagcagaggctgcctttctcttctgcttattattattcacttccttggctcacactgcccccatttgttttctctggaacttagattcatttttattttacagacgggaaagactgagtaaatgtgagaaaattagctgaatagccactactttttttctggcataacctacccctgcttaagaacttccacgggcctttgattggggtttttaaccactttaacaaaccatgtaaccctgagagctatgcttgttggacaacatggtgtaatgtaccacaggctgtagagccagatactggggtttgaatccttattcaacatgggaacataggagctatatgacattaaacaactgtcttgtcttcactaaatttctatcaactcatttgtattgtggggataatagagcctgcttttacagggtaagtgagataaaatgaataaagtgtctagacaatatcatagcatagtaggtattcaatcctggtgagatcctgtttataaggcccactactttgtcttatcaggcagaataacaaaggaacaatatttaaaaagcaactagctcaaatctgtccccagaaggaaaaacatatcttgtccttggtccttaaaaaatttcctctgtcactgtctagaatcagcacctaagaacacaggcgtttagtgttgactggaataaaatggaatcgggtgctggtgcagggagattgagcagggatgaagagagaaaatcacagagtggaaaggatcaggtttggagagttcaatggggggctgccaggacataagcctaatatgtgtgggacaaggaaacccctctgaaactcataaaatggtattgtaatacccatctatgaggtggttaggagaattaataagtaagtagaactgtgctttgtgaattgtaaagtgaatttatatataaggtgtcaagatgaaagggaaaaactaagaaataagttgcccaaagatatcattaggaccaggagaccattataaagtatatccaggccgggcacggtggctcatgcctgtaatcccagcactttgggtggccgaagcagacggatcacaaggtcaggagttcgagaccagcctggccagcatggagaaaccctgtctctactaaaaatacaaaaaattggccaggcgtggtggtgcatgcctctaatcccaagtagttgggagtataggcatgagctaccatgcccagctaatttaaaaaaacaaattttttttaagagatagggtcttaactatattgttcctcttgtcttgaattcatggcctcaagtgattcttcgacctctggaagtgttgagattacaggcacgagccaccacacccacccaacatggtatatcattgttttaaatttgcatttctttaattagggtgtttttatatgtgtataaactgtttttattttaatttttttccctgaaaatggcctttaatgtattttgccacttactattgggctgttgacttttttttttgaaaccagtcctccctctgtcacccaggctggagtgcagtggcatcatcttggttcactgtaacttctgcctctcaggtccaaacaatcctcccgcctcagcctcccgaataactggaactacagggatgcaccaccacacccagctgattttttaattttttttgtagagatgggattttgccatgttgcccaggctggttttgaactcctgggctcaagccatctgcccacctcagcttcccaaaaagctgggattacaggcttgagccactgcacccagcctgttgatcatgttcattaatctgtttgaactccatatattaaggaaattagtcctttgtcaaatatgttgcaaatattccctccaatttgtcacttactttcattttgttggtggtttttctgttttgttgttgtttttctgtgggtttttttttttttttttttgccatggacatgtttttagtacttatgtagtagtcagatgtattactcattttttctgtgctctggatcttatgctttgaatggctttttgtgaattccaatattttaaaaataatttacccctagcttcagttcttacatttaaatatttgttccttctggaattttagtgaatgtggacaaggttatgcttcagttgccttaactagttgccttggcatcattaataagttttcttttcctctactgatttgaaatgccatttttaatgtattccctaacatatttgggtctgtttctggatcctctaacccactgttctagagagaaaggtgatcgttttagattatttgtctctctgtaatctaaaatccaaggtacacgctgggcacagtggctcacacgtgtaatcctagcactttcggaggctgaggcaggtggaacagttgaggacagaagttcgagaccagcctgaccaacatggcgaaactctgtttctactaaaaatacaaaaattagctgggcatggtgacacgtgcctgtagtcccagctactcgggaggctgaggcaagagaatcgcttgaacccgggaggtggaggttgcagtgagccgagattgcgccactgcactccatcccccgggcgacagagtgagactccatctcaaaaaaaaaaaaaaaaaaa

SEQ ID NO: 2405 - DNA, 1904 bp, Homo sapiens
ggcacgagcaaattacagatttaaaatgttagttaatttggttcaaaacctctaagcattcaactcaccagactactttttcgtatttaaaaaatgtttaaagatcaatgaagttggagattttctttcccactgtttagaatttttgttgtcagctgtttaattttttaattctgtagaaagtagaataatagaagtgtgttggtttcggtaaaagtaggcatggctgccatgctcattcagagttgtagcctctgatttcccaagacagtgttaatagggggcgtgcttctcgtgtttttatagacagtgctcatttacccatactaatggctttgaagtatatggtatgattatttttgcaccacatttaactttttgtttgtattttgcttaagataatattaaagttcagctgtgatttctaagtacatactaacaggacaatgaggcacagtaacctagaagcattacatgatgtggatgtgggtggaatggggccctgattaaaaatmcaatgtgttgttggcamcacagtaagcagatacyccaaatatgcataatctggacttaattmcagaattggataaagcagtagcttcattttgcagagtagtggtcatattagggaggccgaagcccaattttgttggttatctaaaccagggaagaggagatttcaaataatttcagaacggtctcttgctgcctctcaaaattcatcaagaccattcctttttgttggggtcctcaaaagagaatttttaaattttttattattaaaaatttcgaatatgttgttacaaaagtagagggagcaatgtaaaaacttcatgtactcttatgtagcttcaacatttaatagtccatagccaaccttgactaatttacatctttaatttctccccagctccatgcctcaaattcttttgaaacaaatctcagactccatataatttcatttctaagtatttcagaatgtatccctaaacgatatgaactcttggagtttcactcttgttgcccaggctggagtgcaatggtgcaatctcggctcactgcaacctttgtctcccgggttcaagcaattctcctgtctcagcctcctgagtacctgggattacaggcgtgcgctgccatgccaggctaattttgtatttttagtagagatggggtttctccatgttgatcagcctgggaatcatagcaaaacctcatctcaaaaaaatatttaaaagttagccaggtgtggtggcacgtgtctgttgtcctagctactggggaagataaggcgagaggattgcttgagcccaggagttcaaggctgcagtaagctatgattatgccactgcacttcagcctgggcaacagagcaagaccctgtctctaaattaattagttaattttaaaaaaaatactgtttttttgtattttattatcttcaatttataggaattaatatgttatttttcgtattgatagtgatactgttctcttttcaaataatgtatttaagctttaaaatattcagcatggccgagtgcagtgtctcatgcctgtaatcccatcacttttggaggccatgcaggtggatcacttgaggccaggagttcaagatcagcctggccaacatggcaaaaccacatctctactaaaaatacacaaattagctgggcatggtggcacacacctgtagtcccagctactcagggggctgagcgtgaggattgcttgaacctgggaggtagaagctccagtgagcgaggtcacgccactgcaccccagcctgggcaacagagtgagactatgactcaaaaataaaataaaataaaaataaaatattcagcaaatagcaaacagatagtgtgcactgttgtggtaaaaaaaaaaaaaaaaaactcgag

SEQ ID NO: 2406 - DNA, 1918 bp, Homo sapiens
  SITE (9): n equals a,t,g, or c
  SITE (28): n equals a,t,g, or c
taacgcctnccttgacggcctccacaangcactcttcgccactcagcgcagcttggagcagcaccagcggctcttccacagcctctttgggaacttccaagggcwcatggaagccaacgtcagcctggacctggggaagctgcagaccatgctgagcaggaaagggaagaagcagcagaaagacctggaagctccccggaagagggacaagaaggaagcggagcctttggtggacatacgggtcacagggcctgtgccaggtgccttgggcgcggcgctctgggaggcaggatcccctgtggccttctatgccagcttttcagaagggacggctgccctgcagacagtgaagttcaacaccacatacatcaacattggcagcagctacttccctgaacatggctacttccgagcccctgagcgtggtgtctacctgtttgcagtgagcgttgaatttggcccagggycaggcaccgggcagctggtgtttggaggtcaccatcggactccagtctgtaccactgggcaggggagtggaagcacagcaacggtctttgccatggctgagctgcagaagggtgagcgagtatggtttgagttaacccagggatcaataacaaagagaagcctgtcgggcactgcatttgggggcttcctgatgtttaagacctgaaccccagccccaatctgatcagacatcatggactcgcccagctctcctcggcctggggctctggccaaggatgggctggaggtcattcagttggtctgtctcttccctggaaaccttctgcaaagatggtgtggtgtacgtggcttccctgtaaccacatggggcttggccatttctccatgatgagaaggactggaatgcttctccgggcaggacatggtcctaggaagcctgaaccttggcttggcatgccttctcagacagcacggcctgggctccaactcttcaccacaccctgtattctacaacttctttggtgttttgctcctcctgtggttggaaacttctgtacaacactttaaacttttctcttgcttcctcttctcttctcccttatcgtatgatagaaagacattcttccccaggaggaatgtttaaaatggaggcaacattttggccaacattggaaagcactagagggcaatgggattaaaccaacctgcttggtctctattagtcagtaatgaagacgacagcctggccaaccaagggaaaggaaattagtatctttagtttcagtcattccttgtaggatatggtttagctgtgcccccacctaaaatatcatcttgaattgtaatccctataatccccacatcaagggagagatcaggtggaggtaattggatcttgggggcggttcccccatgctgttcttgtgatagttctcacgagatctgatgattttataagtttgatagttcctcctgtgttcattctccttcctgccaccttgtgaagatgccttggttcctcttcactgtctgccatgattgtaagtttcctgaggcctccccagccatgtggaacagtgagtcaattaaacctctttcctttataaattatccagtcttgggcaattcttgatagcagtgtgaaaatggactaatacacttgtgtttatctgtaatttaaatttcatgtctttttctccttgccttacatagggtaaagaccaagaaatgccaaacgtgaactaaaatatgtagggccttcaacttttttacttcctccagtatcttaggaccatcgtaattcttgttagcatctctaaccaggaggcagctgagggaggagggaaagaagactgtaaaaatccccctcactaatgatcaactttggaataaagtgatgcccttcaaaaaaaaaaaaaaaaaaaaaaaaaaaaaaaaaaaaaaaactcga

SEQ ID NO: 2407 - DNA, 1768 bp, Homo sapiens
  SITE (1277): n equals a,t,g, or c
  SITE (1327): n equals a,t,g, or c
  SITE (1364): n equals a,t,g, or c
  SITE (1478): n equals a,t,g, or c
  SITE (1543): n equals a,t,g, or c
  SITE (1554): n equals a,t,g, or c
  SITE (1639): n equals a,t,g, or c
  SITE (1649): n equals a,t,g, or c
  SITE (1653): n equals a,t,g, or c
  SITE (1655): n equals a,t,g, or c
  SITE (1668): n equals a,t,g, or c
  SITE (1671): n equals a,t,g, or c
ggcacgaggcctttaaaagcttctgctctttccaacccagcctgaaggggaaagccacctcggaggacaccctcaatctaaggtaatggcgggtagccatgctgtctgggcatggcactgccctgggctttgatgttcctcctctggcctcatcccactctaaagaagtcttgcagagagcatgcccaactgtttccctcatttttctctctcctattcctatacatccttcatcctactcctggaattccttctggccagttaaacctctgtgaaacagacttgaagtcttcacatgccctgtggctttttcaaacccaagtggcaggaagccatcctctgcctttggtgactgggcaggtggcacagaggtgtggagtcaggcccagccttggaggtcaggccctcccgtgggggtgtgtgagcaatcccatgctgtccctcctgtgatgagggtttctgaacgcttagaagctaaattcatacaagttggtgtgcgaatcacacattaatttaggaatctgtgctatggggcgtctctcccagtgaatgaattgcttgcagtcccccccgccgccgccaggtcccctttccagctacccagttctctggaaggccacttagggatcagtaggtgtttttatttcagtcggggtgagaatagaagaaggtggtagctggttttctacaggaatgtgtggggaccaatcaagagggtgtccccaggaatgacattcaagatatttataatcagtataaaatgggtctcactaattccttcaaaattatttattaatagcttgtgatacatggtatttgcttgttgatggagcaacaagcaaatagaaaaaaaaaatcccctgtccttattgagttcacattctcaccaggaggacagacataaaccaatataaatgagtgaactataaagcatattagataattataagtgtaagtgtaaaaaaccaagcagatagaggtgggcattgaaatcttagatgaggtggcaagcgaagcccttatcaagaaaacaatctttgaattaatacttggccgggcgtggtggctcactcctgtaatctcagcacttggggagaccaaggtgggcagaccacctgaggtcaggagttcaagaccagcctggtcaacatggtgaaaccctgtttctataaaaatacaaaaacttagccaagcatgatggcaggtgcctgtaatcccagctacttgggaggctgaggtgggagaatcgcttgaacccaggaggtggaggttgcagngagctgagatcgcgccactgcactccagcctgggcgacagagcaagactntgtctaaaaaaaaaggtggagaaacatgttatgcagntaattgagtaaagagtgtgtcagacccagggaagagcaaagcaacaacaagtacgcggccagcagctacctgagcctgacgcctgagcagtggaagtcccacagaagctacagntgccaggtcacgcatgaagggggccccgtggggaagacagtggccccttcagaatgttcataggntttaaaccctnaccccccccccggggggcttgagctgcaggatcccagggggggggtttttcctccccccccaaggcattaagcccttttccctgnactcaattancccncnataaattttctcnttntcaatcaaaaaaaaaaaaaaaaaaaaaaaaaaaaaaaaaaaaaaaaaaaaaaaaaaaaaaaaaaaaaaaaaaaaaaaaaaaaaaaaaaaaaaaaaaa

SEQ ID NO: 2408 - DNA, 2196 bp, Homo sapiens
ttttttctttgttgactagaacctctcgtccctcttgactttcatgggcatccttctgatatttatcatttaatgtaatatttcccttaggctcctcatatgttatcaaataagatttttcctgtctatttccagttggtcaagagctttattttcgttgtcggttgctgtttgtttaccttaggtggaaattagattttcaagtactttggcctttgatactaggtatcaataaagatggtaatatatatgttctctatttatctgttaatgtggtaaatatgttaccttaataggtatctttaaatttacctgtcttacattcctggattaaatcttatttggtcatatttttaactattcagctggatttatcaagattttatttggaaaatttgtacctatatttataaataaggttctgtagttttttcctgatgtcttttttcattttttggtatcagagttattctgtccccatttttcctaaatataaagcttgatgttctactctttattgattttacattctctctgagtaatatctggtcttaccacttcaattatatgtctccttataccattttatcacctaatattctgtcagaggaccctatgtaggcagctatggttgatatttcaaatgttttcagaagacacagaagaaggagaaagaagaaatatgtggataaaaccagtgttttctattcataacttatgtaacatatatagctgactatgtttatggtgtctatcataaaaatgtataaagatagtcttttgatatattaagttgtatattctgagaaagtccttttttgtgtatgtgtatatttatgtatatatgtagtctgtatatgttttcaatacccatagcccttttcccactgaactggacggaaccttattgccattacaatgttttttcagagaagagtgttaatgcaataaagaaaagttaagtttcttttttctgagttctaagtaggctcctgaaacttctagttggcttaataatcttgacacacaagatagtgtatttcaagcagctgagctatatgaaatagaaaagggttttgagtttttaaaataaagctctgaagatatcagtgcataaatttatttttattttaacttttaacaacagattggaaagaaattagccaaagagtgagatgatctcatcacattattaaataagtgttgccttggttagaaggggagttgaaacaaggttcaggagacatggcagccctgtgttctgcctttctttcctctacagcctgagaccagggataatgatagaagctccctttagttgaagatttgagcattggagatttgtgcttcactctccaggtgaaagccaggggatggcaagcgttatctaaggcccctgtctgatgatagtgtgctggtggcagagttggaatggctgcacagcctgcttcttctggaattttgtgaagcaacaatgtcatgggtgtgtcccatattgaatgacatggtatcacttagatggagatggttaactatatgagagaagtctgtagataaagcaggtagaagatagttagcaggctcctatgggcccaggaaggcagttgagacttcatgcacttttgggcagaacaagggagctggatgcaagaccagtgctttaaaggacctcacagtaatgttgagaagaagccaggaatggtagtatggattacatgattagagtctactaagactacagatagttcactgaaaacccgatcacacaaatgctgtgactagagacttgacaggtgccaaatcagagtgctacaggtccaatgcctctcaccgataccatgcggctgctgtgtgaacttccctcaccacgtaaccctcaccttagggaagagaaggatgagaagtcatgaattcttaagatgagcatatgcagaaattactgaggaaaatcagaatgatgtaagcttatctagaaatgactagattatgttttctgatacttggtgctacagaagcatgagagagaggaggtaagttctattgcagaaaacagtatgaccaggcacagtggctcatgccctataatctcagtactttagaaggttgaggcacaatgattactcaaggccaggagttttagatcagcctggtcaacacagtgataccccatctctatcaaaaaaaaaaaaaaaaaaa

SEQ ID NO: 2409 - DNA, 1561 bp, Homo sapiens
atgtcagaggcattttaggttcttcatgtttctcccactttcagttgattaccattacaggatcttaggcttctttttatctttttgcagtgccttgcatccactggttgtttgttttttctgttgggcactacttatttccttacctctggtttcttctcctacagcttatgttctgaaatgtgtattcctaaaatactgttttcctcttgttacttttctgctcgaggacttccagtaacttaccattgtttataaggtgatgttcaaacccttcagtctggagactttctgccacctatctgactgtacctttatcttcaagcttatctctttccaamcaagaggctcatttagcagctttctctgattgccatgttcatcctacactmagcctcattcagtttacagcatggaaactgtataggacctctttcctatagaaattgaagmcacttaaataggaagaaaattaaaatatacatttggatacatgagtattccagtcaaataatatctataaaataccagatagagtataaaagacaactgamggacaacagagtgatgaaaggactttattaggcatttggatttggttatgatttaaatttcaatttaattagaacgtttccatggcaaggaaggaagcatggaggactgtggaaaagtcattcagtattgagttcatttgcattagaggaatttcatagtttaaaacttgtatatctttacctatccttcgtatgttttcttcttaagcatatttgactttttctacctcagcatctgtataagaaaatatttgtgagtcaratgtttgtgggttttccttacctattattattttcttccatgctttacaacacattttttaaactaccttgttcttaaataattacacggacctgcttctgtgtactttcacagaatctttgacagttaaaaattgtatgttatataaaaatttgacaagcttctacagttaggaaaagcctttagaaatctgccttccccaaaccgtatgttatcatarcactcatgtctccccatgtctaaaaggtaaatagatacagaaacctcaccaaaagttgaatcatctgtactaaaccactgcttttttatccagactttttatataaatcttttattttccaaaaaactgatcttttacctacccctcttagagttaaaaatattgcctgtcaggcaagagtatagtatgccaatataaataatatgctttatttggttagaaacagttggtttgggaagctagcaacatagcatattctttacaaatttaataaggtgtattttgatactgtgataacctgcattgtaaattaccaaatggttggaattgaccagtttatacttattaaaatttttgatgtgccaatggctatccaattcattgcatttgtgaattgtgcttttagaaaaattgtggacattttagttttatatacatatttatgagttatttgtgcatatgataaaattatatataataataaaagtatatatgtaacttaaaaaaaaaaaaaaaaaactcgag

SEQ ID NO: 2410 - DNA, 1963 bp, Homo sapiens
gattagatattaaacacttcaaccacataagaatattgaggactgttgaatgagtcctgtgctctggtggtcctggaacttaattttatttatgaattttcagtcattagagaagagtatggtgtggatatgggaggttggattagccgactaaactttgaagtttgcaactttagcagatgttgggatagaagttaacacagtagttcaaattgatttcgcacttcatggtttatagaaatgctttcacattcatatctgaatatttgaaacaacctagtgggtaggtaggtaagcaatttkatctgtgtttcccatggaagaaactgaggctgggagatgttcattgtttgttatccaaggtcatatagctagtaagtagaagagtccagatgcaaacccaggccacctgaacaatgttcacatcattttaccatggagaagagattagtgcttttatttgtctaacactctggtcagtgaaattaaagtatctccgtgtgaaacagcatgcaaaaggctttgtttctaatatttttaacaaatccctttagatcgttgggaattaaacaaatmcctagggcagtgtggacttacctgaagtcttttgacattttatgaagttctgttaaacctagaaataaagtcaaataaattttttattgctttagagacatagttattggaagttatttatagtttaaatatgtagccataataattattcgtgmctatatttcaagatagtttattcagcaagcacttactgagaacctaccatgtactgggcactgtgttcttaaaaggactaattgatgagctcagtctagtgggggagatgagtaaaccagcaattataatacagagtactacttgagtagaggtacgcatagggaaaaccctgtaatagagggagcactgtctgtgttacctaatgcagacttgaggtaattcgaaaaggcatgttaagccatgtgatgcttgagtacaatcttgaaagcatgttaatacttaacttggtaagaacattttaagcgaataacagcctatgcaaatacacagaggcatttgagaatgcggcacttagagggagctacaaatagattgacatggcaagagtatgcactgactgttaagggatggaaggagttgagaccagagagagagagacatgattaggattgtgaagagccttagatgacatgcttttaaaaagttagtactttttcctaaagataattgggagtcattggtgaattttaatagggaaatgcttgctatccatttatgtttgcaaagattacataatagtgtggaggatggaattggtggtgcaggatatgagattggaagcaagaataccagttagttacgatagtaaccatgtcataaatgctccacgtccaaactggtactgacattagagagaaaagaaagaaatttgagaaataattagaaggttgagatttaactagtcttggtgagagagagagatagtcttcagatgtggtttggacaaatgggtggatggcgatgctggtcaaagccaatacatggttgaaaaagccggtttctgtggctagagggtgttgatgagctcagtttgagatattttgagttgaaggtacctgtgggaatttacggttagaaataactgttaggaggctgggcatggtgtctcacatctgtaatcccagcagtttggaggctgaggtgaacagattgcttgagatcaggaattttgagaccagcctggtcaaagtggtgaaaccccatgtctactaaaaattcaaaaattagctgacatggtggcgggcgcctgtaatcccagctgcttgggatgctggcttgaacctgggaggtggagtttgcactgagccaagatcacgtcactcactccagcctgggcgacagagcaagtctcaataaagaaaaaaagaaaaaaaaaaaaaaaaaactcgag

SEQ ID NO: 2411 - DNA, 1300 bp, Homo sapiens
ggcacgaggttatttgtattttacctggcaaccctatgttggagcctccttccctgctgcagccaacaggggtagaggatctgagctgcttatttgtaactgaaagtccatgggactgcttttatttgggggaatttttctgttaactgtcattatgaaagtgatcacgatgagagattcagatttatttttaaaattcggtggaggaatatctcctcattgatttagatctttgatttttttcatcagaggttttgttttcctgctatagattttgcatatcttttgttagatttatacctgagggttttgtctttttggagtgtgtgtgtgtgcacgtgtgtgctaatgtgtttttaagttcaaatttattgctggcatatagcagttgatttttgtatattatccttgtgaaaggagcaaaagacctgatggagctgttgtttgggggcctttcatcctacctcatcacttctgcaggacagccccttgggaagcccccaggtcacttgttttggggctcctgaacgtctcactagttggccacaggaagtccacttgaagtttttaaaaagagggcgtatcattgttttgatgcctcattcccgccaggtttttctatggccccacatggtcacagcttttgaactgctttttgctttttggctgcattgttctccgtgagtggtgggttcagtcctggcttcatactgaaatatctgcaaagttttaaaaacaaacaaacaaacaaaaaacaaacaaacaaaaacacccatgcctggtctggttggggggtgtaacggagcttttttttttttttttttttttgttctccaggtgattctacagcccagcttgggttaagaacatcttccctaaagtctcaaacaccaaaatcccctttcctgtccaaaaaaaaaaaaaaaaaaaaaaactttttagggcagttagtccatcttaggtaaggaaggaaggaaaactgattaaatgaatgtacactaaggtataagtagttgctagcccaactctcctgagcccctttttccctcctgccacaggcacctgccaccccgtctctactaaaaatacaaaaaataaaataaaataaaataaaaataaccaggcatggtggtgcatgcctgtaatcccagctacttgggaggctgagacagaagaatctcttgaatctgggaggcagaggttgcagtgagccaagatcgtgccactgcactccagcctgagtgacagagcaacatcctgtctcaaaaaaaaaaaaaaaaaaaaaaaaaaaaaaaaaaaa

SEQ ID NO: 2412 - DNA, 1146 bp, Homo sapiens
ggcacgagcccgcctgtaatcccagctaccggggaggctgaggcacaagaattgcttgaacttgggaggcagagtttgtagtgagccaagatcacgccactgcattccagcctggccgacagtgtgagacggtcccagaaaaaaaaagaaagaaagaaagaaaaagaaaaaacttggggtaatttatgtccagcttaagtacctgaacagtttccggaaatgtatattttttttctgagaggcaaaggatgtaaacagcttctaagtagctttaatgtttctgtacagaaataagtttatccctgtaacattgtggtagagttttaatacagtatttagttttttattgggcttttttaaaaagttaacttttaacatagctgctcagggattaaatcagattggaaaacccattctgactccacatactgctacaaagaaatacatcgttgtttatattgagctgcaggagatagtacactttaaacttaagaaagttaaatgtttcacaataacattgcaatataatcttcagctactctctttccattggtaaaatctctgatggtgtgataactctttgccaacctacgaaacccatatctggaagaatcaccagctcccgtgagcagcttcatgtaaatagatgcactccaagcagattgcatgcctcaggtgtttgtcttctagtaatcatggagtgtgcaacacccagagtaacactacaaggggcaggactgcaaacagcaggtcctggctaaaaacccttaatgctgcattgctgccagttgtaaagagatgcctgaatggaggcaagttctgccctgtgggtgaaactgatgatgtactgtactggcatatataaatccactaaatccagctaccaggaactgcctggaactgtggccatgcatttttttttttctttaaagaccagtgtgatagtaggccatgcatctgagatacgatattccttggtaactagagggagaaaaaaaaaatcaagtaggttcaggcttatgttgtattttgagagtctggttttatttgaacagaaataactctacagaaagctcttgtaaataatgctcaaatttgcacccgacgatcaaatccattaaaaatgaatcttgtaaaaaaaaaacg

SEQ ID NO: 2413 - DNA, 1472 bp, Homo sapiens
cccccgggctgcaggaattcggcacgagcagtacctaaaatagtggctggcccctatgtattgggtcatagcaggtactacattcacctctctactatgtttaatacagtttatttcccttgtgtgtgccttgctaaaatatttatgtttaaatttctgtatttgatacacattgtgaaaggacattttcaagtctaagtcccatgacttgagtttgcctgtgtctcccattaaaagctctcaattacaccattgtgtgcccagtacctcgcattgtgcctggccagtgttggacagtaaataaaaattcagtgtcttattcactgaggtatagtgcctaaaacagaagacattccataaatatgtgtggaatgaatgacttaaatatttgattaatgaagtttaagttgagcaaagaaaggagaactagtagcttagatttactaagaatactatgccacatttatttgtttatttttagagacagtcttactctgttgcccatgctggagtacagttgtatgatcatagctcactatggactcaacctcctgggctcaagcaatcctcccatctcagcctcccaagtagctgggactacaggaatgcaccctcttccctggctaatttttaaatttcctgtagagatggggtcttgctatgttgcccaggctgtcctcaaactcctggcctgaagtaatcctcccatctcagcctcccaaagtgctgggagtacagatgtgagccaccgctcgtggcctatgctacatttattttaacatctttatcgttcacaagtaatttcacaggtatccccttacttgagtcttgcaacaactctatgaggtttattttgccagatttatagctgaggaataagactcagaggagtcagagggcttctctaagattatttagcttgcagattggaacttgaacccaagccttgactcctaattttatatttgtatgaattcatacaaatgtcataggaaattatccacattttataactagaattatagaattagaagtggcctcacacatcacaaatcctgaacccctcactcatttttcaaagaggaaaataagaattggaaagtttatatatgtatccaaaggtacacatccagtttaggaatttcaaaaagctggctaggcacagtggcacatacctgtaattccagcagtttgggagcccgaggtgggtggatcacctgaggtcaggagttcgagaccagcctgaccaacatggcgaaaccccatctctactaaaaatacaaaactagccaggtgtggtggtgcacacctgtaagtaatcccagctacttgggaggcggaggcaggagaatagcttgaacctgggaggcggagattgcagtgagctgagattgcaccactgcactccagcctggacgacagagggagactccgtctcaaaaaaaaaaaaaaaaaaaaaaaaaaaaaaaaaa

SEQ ID NO: 2414 - DNA, 1117 bp, Homo sapiens
ggcacgagaattaatctaggctcttaacctttaaaaaatgtatataatgtttacatatgtttataatgtcacgccatttatttcatttaaaattttaaatgattttatctttggtcctctcttacaacttattcttggtacaacttattctttgtactataacagcagagatgagtaattgggacagactagcctccaaagcataaacttatttatgatttggccctttacagtaaaagtctgctcatcccaggttttgcttgtcaatttatatactggcgtttgttcctgatcctatttatttatttctggcatccaactctggtagttctttctgaatcagtttaatgaagtttgtaaatgatgtaattaaacgttatttattacttttatttttttctagagatagggtcttgctgtgttgcccaggctggtcttgaactcctggcctcaagtgattctcctgctttggcctcccagagttttgggattacacgtctgaggcattgcactcagacacttttatctaaagtttatatactgttaaactaaagaaaccatatacaaatttcaagtcaggtgcttttactcattttataccttgattcttgaatggccagattttctgaaaatacccagttaatgattagattatgctacttcagtcaccacgtgtttgaaggctgatcacagaaaactagaagcaatgtaactagtttcaaaatataattaaatggaggaggaagtgtttggcttttttccctccagaccacaaattggtaggtaaagtaaaagttagatttgaaaattgggcctgggtgtggtggcttacacctctcagcacgttgggagtccaaggtgagtggatctgttgagtcccagagtttaagaccagcctgggcaacatggcaaaatgccatttttactaaaaatacaaaaatgtagctgaatgtggtggcgcatgcctgtagtcctggctacccaggaggctgaggtgggaggatcatctaggcccaggaagttgaggctgcagtgagccatgataatgccactgtatgccatcctgggcaatggaaatgagagacccccgtctcaaaaaaaaaaaaaaaaaaaaaaa

SEQ ID NO: 2415 - DNA, 1797 bp, Homo sapiens
ggcacgagctgagagggccatggagaatctgtggccagccctccctggccccctgacctggcagaggaaggaaagggcattggagtaggcttctgtcttcaggccagagggggaggtggttcaggggcaggcttggtgcaccccttggctgcaagctatcacctccctatctgcttcctcttttctgcctcccctggtgcatctggtcacttcttgctgcccttcctgtgaaatcgtggcaccttggaccaagtcctgaagcacttgggcagaaggcgggagaggttgggtttctaggatccttgtttcccagggcctggctctggcctgggctcagaccactctggtctaggcaggctgctggggaaaggctggagctgcttctgctttctgctcctgttgccacctctgctaatgatggggaaaacctgcagagggctgtggttggagctgggctgaaggccggcaggggtgggtctctccatggcagtagcacacaggcaggcaggaagtggccctgtgcaaaagcgggaagtggcagttgtcaaacaggaaggggggggctgggctgtgggaggggcggggatgagcctggtagaaaggtgcgtggaggagggtccaccttggaaggtctgagcctctccctagtggttactggaaggaggggtgtctcaaggggagacacctttgcagcaccttgagatgccgagccagggccctcccactgtggaccaagcccattcagtggcctcgccctttttggggttggagatgctgcgtccagctgggatgcccttgcttttgggaaagatgctctagaaaccactactccatcctggaacccctctgctgccactgctgctgggatggaccctctgcttttttgcagccgtgggccagccctggatgtgactacaggacaggaagtgtcaggggaagagacaggagacaacagctggagaggctgggtggtggccgggcagtatgtggcagcaggaacggggagaccggggcaggtagaaactgctctgttcattgaggagagcttgtggatggcagggtgccacggctgcgaggaagaggagggaagcggacagtggcacttcctgcggcgttcccctctctctgaggagcccctgttgctgcccatcacctgcagactgtagacacaggtgggccccgccaaaacagggagggacactccacctccaggactgcaatggaggaccatgtggggagcccagaagccaggcaggagggcttagttgctgtgttgcagaccctgcatctgcctgggctgaggggacagtgggtcccattcacagtgtctctggtgatagctgtggccacaagcccagcccaggagaccctgtcaagcttctcactgggcccttggaaaggagctatatgccagaccttatgcaaaactcttgacctgtaccacctcagttaaacctcagatcttgctgtctctattttagaagtgaggaacctcttggccgggtgccgtgctcacgcctgtaatcccagcactttgggaggccgaggcaggaggatcataaggtcaggagatcgagaccatcctggctaacacagtgaaaccccgtctctactgaaaaatacaaaaaaattagccgggcatggtgatgggcgcctgcagtcccagctactcgggaggctgaggcaggagaagggcgtgaacctgggaggcggagcttgcagtgagccgagatcatgccactgcactccagcctgggcaacagagtaagactccatctcaaaaaaaaaaaaaaaaaa

SEQ ID NO: 2416 - DNA, 1435 bp, Homo sapiens
aattcggcacgaggttggccaggctggtcttgaactactgacctcaggtgatccacccgcctcagtctcccaaagtgctgggattacaggcgtgagccaacacgcctggctggctgaatattattttattgtgtagagtaatgtattcattcgttggttgataaggcatttgggttattttcaccttttggctgttgttccagataatgctgctatgagcatatttgtacaggtttttgtgtggaaatatgtttttgtttctcttcggtatataggaaaagaattacagaatcaactctgtgcttaaccatttgaagaactggttttcttttccaaaatggctgcaccatttacagccctgccagcaggttataaaagttccagcttctctgcatccttggcaacatttgttattatttttttattatagccactcaggtgggtctgaagtattttgtcgtgttttttatttgtgtttccttgttactgatatcgttcagcatatttccatgtgcttattgctcatatgcatatgttctttggagaactgtctgagattctttgctcatttttaactgggttatttctctttttattgttgaatttcaatggttctttatatattccagatacaagtccttatcagttacatgatttacaaaaattttctaccattccccattccttgagttgtcttttcactttcttgatggtgccctttgaagcacaacatttgtgtgtgtgtgtgtgtatttttagtagagatggggttttgccatgttggtcgggcgggtcttaaactcctgatctcaggtgatccacccaccttgccggtgaaccaccacagcacccggcccgtttttggtttttttgtttgtttgttttttgagccagagtattgctctgttgccctggctggggtgccgtagtgccatcttggttcacggcaacatctggctcccgggttcaagtgattcttctgcctcagcctcccgagtagctgggattacaggtacacaccaccacaccctgctaatttttatatttttggtagagacagagttttgccatgttcctcaggctggtctcaaactcctgaattcaagtgatccacccgcctcagcctcccaaagtgctgggattacaggcgtgagccaccactcccggccagaagcacaatttttaatttttatgatgttcagtttatatttgtttttccctttgttgcttgtatttttgtgtgtcttaatatgtcttctaagtctgttttaatggatggattctccccttcctgcctctcatttatctgttgaagaattttgcctatttgacctgtagagtttcctatggtctggatttttctaattatggttcccatggtacagttcaagcttctctctgtctctgtatttcctgcaaaaaaaaaaaaaaaaaa

SEQ ID NO: 2417 - DNA, 1472 bp, Homo sapiens
attgaacaaaagctggagytccaccscggttgcggccgytytagaactagkggatcccccgggctgcaggaattcggcmcsaggttttccagctccgtttattgtcttccataatgcttaacgtactgtttgtatatgttgtccttgcactatattttgatatgctctcatatattttattcatctctggctttctacgaaggcaagctcgcagcaacactgagaataattattctccgccatcaatcaagagtctccgtggttggctcctcatgggatggccttgattttaagcatgaaatgtaactcttgctctttggggccatttcattctttgttcctggggcctgcctgtgggctcgtcgggacactagagagcaggcattcccgtggccgcgggagagccgcgttcctggctggccattcccgggccctctagaagggagcggctgagagctctttagccctacttggggtttaaaagtgaaaaaggagcagctcttcctggtggaaattgcgagcagaggctgcgtgagttccgtaactcgcacacagcctccatttggagccagaatgagcacgtgagggaccccgggcagaggggccagtgctgacattatgctccatgcaacctcccatcctgttgtgggagatggtgcagaccaggggagggagtcagtgtgtgagggkatgakgctccagtcctttcctgggcaccaaagccaaatcccccctgagcacaaggatcttccctgggtgactgcagaagcaaggagacctggcccaccgtccctgctggcttcctactgcccagccgcgtctctgcctccctaccccaaagcctgcagctcctaagtgcactatttgggctgtcttgtttgcagcggatgtttgaaagacagaccctcttctctagtgctggccttgagtcctcagagagctgctgtttcctgggtttctagctccatggaggcagaaagagaccccagggtggcctttggaggaagatgagccccctgggttaaccgagcttctgcagtggtgctcctgggtcatcactgttgccactggtcagagccagagtgtgtctgcctgtgctctcctgaacacagtggagctatttccaagttcaggtgaaggggacatggaggttaagcaaggccagaaagacagagacgtcctcttcccctggtagcaggtatttagcagatgggaaaatattagcagatgggaaatcagcagatacactcagctcaagatgcaaatttaaaagccgccagcccctgtactaaatatttacactgaacatctctactccatcatccgtcttttatttttgtgagcccgtacaactgctcttattacaaagtcatgtaaaagttgaggaaagaaaatttcacccttggaaacaaattcatgatgaattaaatttcagcatgaaaatagaaaaaaaaaaaaaaaaaaaactcgag

SEQ ID NO: 2418 - DNA, 1447 bp, Homo sapiens
  SITE (859): n equals a,t,g, or c
  SITE (936): n equals a,t,g, or c
ggcacgagcaaaggtgatttgttggtaaagatggaggctttgttgagggttcttaatctggggtccctcccgaaagaacccaggacccccagtgaccacagatgtgatggggccggaggatttgggggagagggacaacagtttccattgtatctttgtcaccgccaccttcctggagactttcttctggaaaaggcttccctggctactggtccagatgggggtgagtcagggggctggactttgtccctggaatctctccttggccacttgcttccgtgattggtcggggggcactgaagggctgggcttctctctgtggggcctgtgctgcttgtggggttacacagagggaaaagcagggcagtgggggctgtgctgcggtgagtggcagttggcccagtcacgtgacaagatcctggagctgggcaggtcaccggcctttggagtggcgttcggcgcaccaggcacagcggggcggggggcccaataccttctgtcaagtgcatgacgtgggtctgtaccactgcaaaggactgggactgaccactgaagactggccagttgggctgagcacaaaatgatatttcaggagattggccaggccgaggtgggagagcagaggctcctggaagaagatgaggataggggctgggcacggtggttcatgcctgtaatcccagcactttgggaggccgaggtgggcggatcacttgaggtcaggagtttgagaccagcctgaccaacatggtgataccctgtctctactaaaaatacaaaaattagccgggcgtgttggcacacgtctgtaatcccagctacttgggaggccgaggcaggagaatcgcttgaacctganaggcggagcttgcagtgagccgagatcgcgccattgcactctagcctgggcaacactatcaaattgggaaaaataanaaagttgacaatgggctttggatgggtgtggtggaacaggaggttggagctggtgactccacatttccctccctagggtttgtctcaaacgtgacggcagaaaagaggtcataggtttgcctggtgccaaagcaggtgggagtaaaagacggaaatggctaggaatggccagcaaccgtgaaacagcttagaaattacaggcaatccagccaggtgcggtggcttacgcctgtaatcccagcactttgggaggccaaggcaggtggatcacctgaggtcaggagttcgagaccagcgtaaccaatatggtgaaaccctgtctctactaaaaatacaaaattagccgggcgtggtggcacacgcctgtaatcccatttacttgggagctgagcagagactcacttgaacccaggaggtggaggttgtggtgagccgagatcgtgccattgcactccagcctgggcaacgagagcgaaactctgtctcaaaaaaaaaaaaaaaaaaaaaaaaa

SEQ ID NO: 2419 - DNA, 3003 bp, Homo sapiens
  SITE (1814): n equals a,t,g, or c
  SITE (1827): n equals a,t,g, or c
ggcctgacagatttggctggtaaacaactagtcaactttttgaatttagacagttattaattacttaggcagagaaaaaagtagtccaaggtgccatttctctgtgccccttgtctcacacttgaaaagagtgacaccgaaataaaaggggctagctaacgattgtcccttgaatggtgggacaccctgttgctgaggaatcattgttatactgcagctaagcctgtttagtctgcaaatgtaccctacaaggttgaggaagaaaggtctcatgtttcattagaacctgagaggagatgggaaactctcctgacagaagcatcctggggcaagagagaggtgagtggaaaacgtccatccatatagcaacttctcacaagcctctcttgtccatgttccaggatgattccatggccttctgccaagayagcttgcactgtgattcagaccttaacctctctgcgctctttggacatgtgcaaggtctccagagtgccatggctgatctctttcccttcagtggaggctcaagtagaagtactgtttcttctactaatgtcaccccctcatgctgagaaaaacagaatgagaaagggaaagagtggtgaagtggcataggcgataacatccttatctctcatsagtcacacattagtaccttaactctggaaatctagcctttgatgtttttaatttgggactcatatataaaaccagttttttttttktctcttttcgtagcatcttaataattatagcctacttctcttcacagtttcagctattttggaggatgactgtatgtattcctttttaaagtacctgttgggactccccactgagaatttcgtatatgccacattaagtgcattttaattttgattaaaatttattcatcacttttcatgtgatacagtaacagcatttaaatgtttaatttcacttatataaatgttcatgttagaataacatacttaaaatctttttctttagatcattgtatgttattaaatgagcaatagtactaccagtcatgtcattttacatattgcttttggcactcatactctttattgctggttttatattaagatcaataataatcaagaggtctctcttttcagtaaatttcatgcagactcggtggcagaggctaaactttagtttgagagaccagtgaaaaaacctggaacctaaagttgagatgatgaagtcttacataatggccttggaaatagagagggagggctgaatctagatgggatatcacagataataaattgacaatatttgggaaaattatttgttgttagtagacctgtgyggtgatctggaagatgcaagcaaggctttagggtctgctggctttttcctagagtgtcaggagcatggtcagatctccatsattcttggagaaagctatgttggaggagatccttgcaattcctcctgttattaacccttccccttacccccaagartacatgttttgctactgcaagctactarttggcagaaaggttattgagtaagtaggtggcagtcttccttaaccctgtacatgggasagcattagtctttgcagctgaagagactmagcagtasagaakattcctctcattgtcttgatgagggactgacagcttgctagcgaaaatgttgcttgaccacaggawtgagacttccatgcaccctcatcttgccattattaaagctatccagctttgggtccagccttaagagaaggtagagtcatgactaggccagtgaatatamcagtgcatataaaagggccctagttaccagggagaaancagaagtagaccnctgaaagaggcaaaacctagtgaaaatagaattattgaacaaaatattgmscaaatacacttgaacaaaataataagggcacataagcagattgaattatamcaaattctttagagctagaaaaaaatgacattaagttttaatgtttagattatttaaaaaaagaggacacgtgctattaagttccaaattacaggcctagaaaatcagggggaagaattatgtcattaaatggaatgaaagtactaacagataaaatcaagagaagacgattagagacttacaagaagttctgaaggggaaaataaaaaaccaggtggacaagcaataactaaataatagatgggatgaagaaagacttgagactgcagatcagaacagctggctgttgtctagccaggagagaagtgagggaaacacacaaacacctatgcagagtctggcaaaatccctgaattccaaggaaaaagtaaaaatcctctaagcttccatatgaaagaccaagttgcatacaaagaaaaagaaccaaaccgacaccaggcaatcttccttaccacacaagcagaagtagaaaaaagtggaatgacgctacacagttgacaaagaactgcaactcaggaaccttgtactcagccaaaggaccctccacatgtcagaatgaaaaggagatactagtttatcctatctgaggaaaactaaagaaacaacctgtgaatcaaaatagagacctttatacaggggaagataaagaagacagagaacagtttaataaagaaaacagtagatcagtctcactaatataaattcaaaagtaaaaataaaatattagcaaattgaatctgccattgtatcaaaagaattctagactatcaacactagagtttatttcagacatgtaatgatgatttgttaccaggaaatctgtcaacataatttattctatcaaagggacaaataatcatagaagctattctcatgagaatttgaagtaaaatgggtataagaaggcagttatgcctgtaatcccagcactttgggagggcgaggcagttggattgcttgagcctggtaggtggagtttgcaatgagccaagactgtgtcactgtacttgagcctgggcaacagaatgagactcagtctcaaaagaaaagaaaaaaaaaaaaaaaaaactcgag

SEQ ID NO: 2420 - DNA, 1524 bp, Homo sapiens
ggcacgagttggttttcccatttccttttttccttttcactgtcgaattataacagtttttatgtatctttacattgtaaagttattaatgttgtaatccttatttgcctgtttttatccttattcagtgtttatttttgcccattctctgacctttgacatttctgcattttgtattaaattgttatagttaggttccagttgtttgatgcaatccttttgtctttatataaacagttgagtttatcttatttagtctcactgtagatgtgtttaatcttttccatctgctttttatgcattcatattggcttttgttttgtttttaatctcttgataatggggctcaattttcagatatacttttaagatatgtttatgcctttatttctcaaattgcttcagaaacaaaatagtgtctattgtgatcttccttattctcataacacttaaggatgtgttggcatgttctgagatttttattcttgtttattacagttaaatgattatttttctgttttgtggcatatacttcaaaaacaatatttattttctgattttctaactttatttccacagatcctttgcattgagtatctgcttatctttcacaagacagcttcctcatttgtgagtcttcgtatgagtaatttcagtggtcagattctgtcttcatgataatttttttctcctcaagaaagtgcacatgagtgatacacgtcctgagttccttttctgtagacttcatgtgagaccatagcttctcatgctctagaattctgtcataaccattattgatgtataaatgacatacaataaactgcatgtgtttaaattatgtaatttaaaaagttggcataattatgtacctgtgaaattattactacaatcaagataatggacatacgtgtcacccttaaaagtctacttgtgccccttggtaatccctttacgctccttatctttaggcaaccaccagtctgctttctgtcactgtcaggaagtttacattttaaaacactttatataaatggagtcatacagaatgtacttttttgagggtctgggttgttccactcagcataattattttgagattaatctgtgttgttttgtatatcaatagcttattctttttattgctgagtcgtattccattgtacggatataacacaactcatgtgtctgttcacctggatacgtggaagtttgggctggtggaaatttgggctgttccaatactgagctgtaacaaagctgctacgaacatttatgtacaagccattcattgtacggacaaatgcttttgtttctcttgggcatatatctaggagtggagtgatttggtcatatggtaggtgtatgtttaactttgtaagaaattggcttcaaactatactacaaggctatagtaaccaaaacaacatggtactggtaccaaaacaggtatgtagaccaatggaacagaacaaaggcctcagaaataatgacatttatgcagccaacaaaaaaaaaaaaaaaaaa

SEQ ID NO: 2421 - DNA, 1842 bp, Homo sapiens
gattggcaggtgctgtgtttccccaggggtgaggtgccaggctggttttcacaccaagggagcatgcagttggtctgctggctcagctgtggcttccctaggggcaggatgctgactgggtcatatgccaaggaggcaggcacatggctggtcttctggataaggcttgacttctccactgggcaggacagcctgttccttggcagggcagagtgtcatgtggactcaagtgacaggatcacagctgtccccctgagcctaggttttgagtccctggggttggggcactgaagccactaggatggagaaaatggagtgattcctagacagcttgttcccatggattaggaagcagggaagcttggctagcaaatggtgtactactgtgtgtaagcatgatgcaaggatggtgaagcctcaaggatgaaaagatgcagtgactactgcccccaggaacagaacacactctagtagttgctctagtttcaagatggtgctgtgcagtagtagcttgggtcatgggatgggaggagccacagkatgggctcytactctagaataatgcagccatatgaactccaggcagcttccaaaaytggacttaggtcctgtgagaactgcaggattctccagcaacaaagactgctggtgtccacagatataatgggggcttctggggacttctttaccttttgttttcagggaaaagcccctcctaggcttgaatcccagcctgcattccaagctgatcctgactgaggagacagagttgcagaggcaggttgcagggttccattcccttctttatgtagccatcctgagtttctgtgatccacaagatttctgccattcccctgctgtacttcagtgctctcctttagacactccagtcaaaatgtagttgtttccttattgtttcagtctttttttaggcggggaggaggatgagtaatagacacctctagtcagccatcttgccgacatcaccgacaatgtcttttctcttaaaataatagaaatatggcttccatttactacacaagttttctgtttccctttataaagttttcagtgcacctggcctaaatgcctttttatttattgccctgcctagctccaagagctgtgctactggtcagtcttctggggaccacagttttccaaggaaagacagtgactctaagatattccatgcctcaggacaaagcaaatattctggtactatggatggaactgatgtttaaaagtttccaaaaacaaaaaaacacatttcagccgaaaagctgaattcctagtaatycaccctttagtaatccaaagcaattgtcatttycatctggtaaggaaagaataaagttttgtcttagggaaagtataatatttttcaaggggcagaggctctgagggttggataaacaaatgcccacacagcccatagctattaggggttgtgacatttttatgggctgctgcaagttggggagacgaggagagagcagagcacaattttatcatcttatcaccagaaaagagccccaggccgggagtggtggctcacacctgtactcagtaccttgggatgccaaggcrgtaggatyacttcagcccaggagttcaagactagcctgagcaacatcataaaatcttatctctacaaaaaataaataaagttagctgggcttggtggcatgtgcctgtggtcccggctacttgagaggctgaggtgggatgactgcttgagcccgggaggttgaggttgcagtgagctgagatcgcatcactgaactcaagcctgagagtcagaacatgaccctgtctcaaaaaggaaaaaaaaaaaaaaaa

SEQ ID NO: 2422 - DNA, 1895 bp, Homo sapiens
ggcacgagtgcaattgatgatctctgtgaacatggaaggtgtgtttgctttaagttagacatatcttatcgaattcttcatttctaggcctttccccctggtgctcttcatcctttaccaaagagacaagcacttgaaaaaagcaatggtaccagcgcggtctttaaccccagcgtcttgcactaccagcaggctctcaccagcgcacagttgcagcaacacgccgcgttcattccaacaggtatgtgcccttactgccctacgtcctgtgcccttctggtcatgtgctttcttctcatttctctaagctgtttggtggcatctagtttgcttttgaaggtataatacagtttgaaattcatcgttgtcctagctatctaaatgtatttaccttactttgaatgatagctaaagactgttaggattctaaagccaaatatttgatagattgaagagacagatttaacccatgaggaaacagcagttaagggcttttggtttcttgtatttgcacaagccctgtaaaattgtttatgtaaataagaccttttatgtgtgacaattgaaatttgtccttaactctgaatgacctaaaaatagcaattccagtaaatactaaccatttttttctatttctattcagagcactaaaacaatgaggctattcaattaaagcaattctctactcatatttttatattcattctatctctttctccatccttctcaactttcaccaagttcacaagtatatagagtcttatcctcagtgtctaagccaatgcctgatactattacgtacgatgtgcattaactatgattccactaaaagatccattgtatagtcatagaatcttagagtttaaaggactcttagtgatctcctcatccagctgattgttttacagatgagaaaactgaggccccctaaatgagaagtgactttccaaggtgccacaactaatgagaaaaagaactgagtttccctgtgaccaaacccatttacatcacattctaccacctgggcccgcctatatatacacattccacagagttctcctgaaaaaagaaaaaagcagataaaagtgaatttttaaataactgaccccaaaaagtcagataaaagtaaaaaaacaaaagtataaatcatgtcatccctcccccatttgcaccgacatctctaaccacagacacacacacgcacaccatacgcaaagatagtcaccataattgaccatgtttttcaccttttagtcaatgttagaagcaaggggtaacttaagtcctggtgggaagaccatccattgagttctttgaaagtcaacatttttcagcccacgatagtgaaatgaaagtaaatataaatgaataacaattctaacaaaaagagttttttgattcaaatccattagtttgaacttttcgagcttattatccatttccttaaatcccatagcttatcagagttaacatcagagggaggtaaaatatttctgtgatattctttgtataaaatctacactttgaaatggattagtaacctgtgaacaatacatattttagttaacatataaattatgtgagcaaagtggttttcagtgtttttttcttattttagttttgaacctgtcttaaactcacagacttgtagaagaaatctctaattcagtatttattaggagttcacttttgccctattacagccttaattagtgacatcccagtgctgttacagcatagcagtgtcttaatatgtaatctaattgaaataacacatttgtaaaataattactagaaggtaaacttacgttaatgtcctgtgtggtttctacaaagtgtgtcattgtagacctcttggccactagatattttaagataaaaaaaaaaaaaaaaaa

SEQ ID NO: 2423 - DNA, 1641 bp, Homo sapiens
ataggttgaagggttgtgaccaccctatgttgagtacctctcttggcactatttttccaatagcaggtgcctactttgtctctatgtcagcttttttttttttttttttttgcaaaaagtattttaaaattagggtatgtacatttttgtttttagacataatgctgttgcwcacttaataggttacagtgtagtgtaaacatatcttttgtgtgcactgggaagaacaacttatgtgccttaaccttactgtgatatctgctttattgtggtggtctggaaccaaagttgcagtagctccaaggtatgcctatacagtgaaaaataatctctgattgtttacctcacaactctccttattcaaaagcagtatcaatttcctgtggtttgtattctttcttaacacattttaaacatatggtagtgttttcatacgatttattggtctttagcatggattttagaacataaggttttcgtgaatagtctaggggatataaagcaccagtgaataataacattccaggaatcaagtgtcccttctgcatgggatgacaagaatcattaatgctttctggggaaaataatggagtttcctatgggaaaaatgtgtagagagataatattgaaagagatgggaaatacagamcagagttcagggagattaaggcagctggaatatgcagaaccagtaataaagaggaaaaagagaatgccaggtgcagcggctcacacctgtaatccaagctactttgggaggcacaggccagcagattgtttgaggccaggagtttaagaccagcckgagcaacaaagtgagatgccatcactaccgccaaaaaaaaaaaaaaaattagttcggcaaggtggttcacacttctgtagtcccagctactcaagaaagaggtgggagaatcacttgtgcctaggaggttgagaagctgcagtgggatatgattgtgccactgcactccaacctgaggaacagagcaagaccctatatcaaaacaaaacaaaacaaaaaacagaagaatccttaaggctgagtatactggctcaaacctataatcccagtaccttggccctcccaaagtgctgggattgcaccgcaccaggccaagaatattttccattgtaaatgtataaattagtaaatgaagtttacctcaatcccatgtgtgttttagttggtgtgagctgtaccttgcatgcttaccctctggctacttgcaagaggcaggctggagacagtggtgtgctggtaaacgaccagctggggaaggggaggtggtttgatttatagcatttgcagatttccatgatgcaaatactcccgccacattggatttcaaaccatccaggtgatgccaagtagcttcctggaaatttaaccatctgctctcggtaactgctgccagcagctccagcacacaccactggttctagcccttcaaagcaagtttagctagcattcttctcatcacagacttttgagtttcacaagctaagtaaaagaatttttaaaaattagagaaagactttctgaaatcttttttcttcccttccttccttcctttttcccttccctttttccttccttcttttaccaaagacactaaaaaaaaaaaaaaaaaactcgag

SEQ ID NO: 2424 - DNA, 1807 bp, Homo sapiens
tcgacccacgcgtccgagagagtgtcctttgtgccagtattacaagaagcccaaactttatttttataaagggagaggatgactttctcaatcaagtgccaccagataaaaacaactgcagaggctggaactgccacaggctgtatgaaaggccactttggaaagggtttggatgagctggtggccttcaacctctgcctgcatctgccactttctgctaccctagggaggccaggaggagcttcggaggaccatcgccccactggtctagccatcatgacacctctggaggtgtcaagctcctgaaacaagctcatttcagtttctggcaaccccgtgtatttccgttttccccctaaagaacatatcataatcattgcacaaataaccatgttctttggtaatgaagccagaaaagaaagcgcaaaagaatggtgactcatttggactcttatctgtcttggaatgtcactgcttcattgccttctctgattgccttttgcatgtaaaactatgtgtctggagtcttttgccatctggatcttagtacctctttattatgtgcaatttattcctcaggtgtggaaatttctactgcaattgactacgtttgattattttgagcttgtgaaagatttctgaacagtgattgtcccgttaatagcccctcagaagatgttccctgctgataacagcatcctattttacttacttttatagcattactgtgcctagtcgtggggaaagagatggggctgtatagattatctgaatcatttgtctaagaggtacattcttccagatggaatcaataacttttttttttccaggttcccgtgcttgctatcacagtatcattgttaagtgacacttttgtctctcataacaccatcacactcttccttccaagtctgagctgtgctggggtttgaactaaaagccatatgtggaatattgacatgtgtaagaagcactttcagaatgttgtcctttttaagaaatgattctcaaaataccagtttttattccaaaaatttagagaacaaacccggaatatgaagtgcagattgtaacatggagctatttttttttcytaatcccataatacagctcctaaaagttgtgtgggatttgcgttgcataaatagccatgtgaattccacaagaagcaccagggaaagtttagagatttgcggcaatggaccgaagaacgggccaggaagtcctccaatttcctttggtctttccaggagattggactacacattgtaaagactgactgggtttcaactagtcaaaaagcactttcttctgttttcaatccctgttcgatttgtgcttctgtgcttgtaggagagatggccagggtggcagccctcatgcaggttgaagtatatgtagcctcagcctgatattcttggtgcgaaggtaaaaaaaaaaaaataaataaaaccattggcctggttgagggcgtgaccaccaagacatatatgttgtgcccgtgttcatcctgtgtatttatactgtatatgtagagtctagatttatatactgcaatgtaaaatatatatatatttaccttttttaaagacaatggaaattccaagtagctaaaacttagcttcatttatttaatgccactttaaatgtcttaaatttgtttcctggtggacagccgggtaatgcttttagctgctcgcatgcttgtctttctgcatctccatcatctgtttaccttttggttaaactaataaactagtttgggacttggctggcatgtgctgccagacccaaagggaaaaaaaaa

SEQ ID NO: 2425 - DNA, 1467 bp, Homo sapiens
ggcacgagcccaggtgggttgtcttcacttccttggtagtgtcttttaatacacaaagttttaaatttttatgaagtcaaatgtatctacatttttctttggttgctcatgcttttggtgttgcatctaagaatccactgccaaatccaaggtcatgaagatttactcctatgttttcttctaagaattttatagtttttgctattacataaggtctttgagccattaagatctttgacttaacttttgtatatgatgtaaagtcactgtcaaacatcattcttttgcatttggctgtccaggtatcccagcattatttgttgaaatgcctacacttctttatattcccttgactcctctaaccaaggcagttggacctttgctactaccactgccctgaaactgctgtcactgggttactgaggactgggtagcttagttgagtagataatcttttgttgtttcctccttgtaatatacaagccttggcttctgtgacatcatactctcctagatttccccctgtcactgtggcttcttctcagtctctgtccatccctggtgctcctgaaggttctgttctcagccttacacacattacctgggtgatctcattctctgccatgacttcacttgccatatatgtgctgattttccccaaattcctatttctcccgacctttacatctattttatttgcaggtcatatatctaataaggaattgatatccagtgtacatgtagaactcctgtaattcaatacagaaaccaaacagtccaattaataaatggagaagagatttgaatgaacatttttctaaagaacatctcaagctcaagatttcccagataacttttctttcttcaaaatctgcttctgtgtttcctcatctgtaggtggcacagcatacatctgatttcccaagccagaaacctcatagttattcttgactccaggaagaaatattattgagtttttaaaaactcagcttattgactcattgttttatataataaaatgcaacagttttaagtgtatatttcaatgagttttaatacatttatgtacttgtgtcactatcctcatagatagagacaaaacatttctatcacaccggcaatttcctatgtgtcccatcccaatcaatcctttcccctttgctggctccaaacaatgactctttcctatctttttagaaagattagaattgcttttctagagttccagtaatggaatcatacagtgtctaagtctgtttgtggtgctgtaacaaaatacctgagactgggtaatttataaattataggaatttatttctcacagttctggatgctgaaaagtttatgatcaaggcactagcaggtttggtgtctgagggcccagtttctaatttgaagatggtgctttaaacactgtcctcacatggtagaaggggcagatgggcaaaaaaaaaaaaaaaaaaaaaa

SEQ ID NO: 2426 - DNA, 1293 bp, Homo sapiens
  SITE (1214): n equals a,t,g, or c
ggcacgagcaggaaccccttcctgcccccgttgccgaggcagcactgccctctgctaggaacagctccgtgttggcctctctgtccccacacactgggcctgcagggcttctccgagactcttcagttcaggtatcaaccctkggctgtctcctggratgtggggggcgratgttctttccttgcctccccacgctcytcytgcggatccttcactccgggtgggtcggcctcttcctcctgatcagctccagagccccytctagttccctggcatggaaacacggcccgggtragctgtggtggccccgraggcctctccgctcctgcacaggccttgcttcctgcgggtgacgaggtcctggactctctcctgcccaggcttctgggtgctttccttagttcagcaccagtgctctgtgtgggcagcgtctcccccgaggatccgcagctccgggttacccgcaggcgtccatctccggtatggtgctgcccttcactgatcctggttgtatttctgtttcctgctttcctcatcgcctcctgtttcggttgattccttctttttgctggtgcccgtctcacagtagcttcctgagaacggggacctggcaggtacacttcagacctcctgtgtctgaaatagtgtcctggttctgacctgcacttgagtgtcggtgaggcctgggcagggttccgggtgggagctcagtttcgtcctgagtttctcaggccccaaccatggcctgtggtggcttcacgggctacaaggcaaaggacgcaaacgaagaggcttcacgtgacagggttgtatgctcagccagctctggaggctggagtctgagctggcagcactgacagggtcagctctcctcggaggctgctggggaggagcctcctgcctcttccgggctccgggggcctctggcacccccggtgtccccgggcttggagacgcagcactcccatgtctgccggttcccctggccgcctcctctgtgtcattgtctgttctcttcatatagggacaccagtcatcgaattggaggttcactctactcaagtatgacgtcaccgtgatttcactgattttatgtcccaggccgtattctaacaagggcacatcctgtgttctgggaagggcgtgtcgctggggaaatactcttcacccggctgcaacctctcactgtagaactgcctctgtggagaagcccnaagggcatttgcggcttctaggagccaagtaggaggaggctgggatccgtgtktcaggcgggactccaggcttgggcgg

SEQ ID NO: 2427 - DNA, 2068 bp, Homo sapiens
  SITE (57): n equals a,t,g, or c
  SITE (139): n equals a,t,g, or c
  SITE (2017): n equals a,t,g, or c
  SITE (2029): n equals a,t,g, or c
  SITE (2034): n equals a,t,g, or c
ggtagagactctgttcagctagaagccttggatattatggctgatatgttgagcagngaaggaggacttcttgttaatttccatccttcaattctgacctgtctacttccccagttgaccagccctagacttgcagtgnaggaaaagaaccattatcgctcttggccatctggttatgaagctgtgggaaatatagtttttgtagatcttattgaacatctgttgtcagagttgtccaaaaatgattctatgtcaacaacaagaacctacatacaatgtattgctgctattagtaggcaagctggtcatagaataggtgaataccttgagaagataattcctttggtggtaaaattttgcaatgtagatgatgatgaattaagagagtactgtattcaagcctttgaatcatttgtaagaagatgtcctaaggaagtatatcctcatgtttctaccattataaatatttgtcttaaatatcttacctatgatccaaattataattacgatgatgaagatgaagatgaaaatgcaatggatgctgatggtggtgatgatgatgatcaagggagtgatgatgaatacagtgatgatgatgacatgagttggaaagtgagacgtgcagctgcgaagtgcttggatgctgtagttagcacaaggcatgaaatgcttccagaattctacaagaccgtctctcctgcactaatatccagatttaaagagcgtgaagagaatgtaaaggcagatgtttttcacgcatacctttctcttttgaagcaaactcgtcctgtacaaakttggctatgtgaccctgatgcaatggagcagggagaaacacctttaacaatgcttcagagtcaggttcccaacattgttaaagctcttcacaaacagatgaaagaaaaaagtgtgaagacccgacagtgttgttttaacatgttaactgagctggtaaatgtattacctggggccctaactcaacacattcctgtacttgtaccaggaatcattttctcactgaatgataaatcaagctcatcgaatttgaagatcgatgctttgtcatgtctatacgtaatcctctgtaaccattctcctcaagtcttccatcctcacgttcaggctttggttcctccagtggtggcttgtgttggagacccattttacaaaattacatctgaagcacttcttgttactcaacagcttgtcaaagtaattcgtcctttagatcagccttcctcgtttgatgcaactccttatatcaaagatctatttacctgtwccattaagagattaaaagcagctgacattgatcaggaagtcaaggaaagggctatttcctgtatgggacaaattrtyygcaaccttggagacaatttgggttctgacttgcctaatacacttcagattttcttggagagactaaagaatgaaattaccaggttaactacagtaaaggcattgacactgattgctgggtcacctttgaagatagatttgaggcctgttctgggagaaggggttcctatccttgcttcatttcttagaaaaaaccagagagctttgaaactgggtactctttctgcccttgatattctaataaaaaactatagtgacagcttgacagctgccatgattgatgcagttctagatgagctcccacctcttatcagcgaaagtgatatgcatgtttcacaaatggccatcagttttcttaccactttggcaaaagtatatccctcctccctttcaaagataagtggatccattctcaatgaacttattggacttgtgagatcacccttattgcaggggggagctcttagtgccatgctagactttttccaagctctggttgtcactggaacaaataatttaggatacatggatttgttgcgcatgctgactggtccagtttactctcagagcacagctcttactcataagcagtcttattattccattgccaaatgtgtagctgcccttactccaaggggggggccgggtaccaaattcnccctatagtgantcgtnttacaattcactgggccggtcgttttacaacgtc

SEQ ID NO: 2428 - DNA, 389 bp, Homo sapiens
ggcacgaggtaaatacagatgaagcttcactctctagcctgcacttacttcctactgtgtggcctaacacgccatagactggtactggtttgtggcatgggagttggggacccctgctttatttaatcacttataacttataatcacttagatgctctaagtcatctggggggtgagaaggttggaaaagaaaaagtacattagtgagtgagtaaagattatctgggattgtttcttagatgaggatctatttgatgttggtgttggtctactgtgaactaaatataactgcattggagcctaagcgcagatgtctgcgtcatggtttattactcctgtgttcgtttcaaggagctcctgtgatacctgctgtctccacctaaaaaaaa

SEQ ID NO: 2429 - DNA, 2027 bp, Homo sapiens
gggccattttatccttttctcctacttctgcccaagaracctgaattgctgccatagaggacagtgtttgtktggtctcctgagtccacatcgctcgcttccatggggtcccggtgttgtttttgcctcgttccccataggctgctgcccttatggcctctggactgaactctggggcctttggggtggtgtgaaggagtctgtgggcttcttggaacacatggatctgttcggtgggtccccagacctctgytcccagagctcatggcccaggtggtgaggagggaaaggcagtcagattccaggctggagtgtgattctgtgggaatactggggtcagttatggaacaggacttgcccatcataggtaagtgagacagcaaatagatgattcaagagcaaggattactgcgggaaggtgagactcctactgtccacgcgcatgagcagaacctggaaccagaggggcagggaccaggggtctttactcatttattttatgggtaaagagacatgaagagacagcctctctcttctgtctcagaagctctgtgtttgggaaactttgagcccagtgagtagcagggtctgcagtgtgagtaccaggtttccctggcaatccaggtctcctctgaggaagcattctgacttcccactgaccacggaaggcatgtcagcttcatgcctcgggctagagttctgataatcggggctgaggggtgaaaagaaatccagtcagacagacagtggggagacaggtccctgccctttatttgcgggatcaatcagggactcccagaaaggaaggagaatggtgagaagggccctaagagttcgtctctcacctgggggctggtgacgtggtcaccacaagctgaagacaggctaatggggtggcgggtgtgtgtttaaacctcacgtgcctggaagctgcacattgaccaaaggagggagggaagtgctaaccatgtatagagtgggcaggcggttccagggagacaagcagcatgttattaaattgggcctaggcagttggacgataatggagaaaaagcagggatgctataatgagtcctccccaagggtgagttcarcaccccagccctgttctgcttgtatcccagtgatacttgggaggtaggaagaaaatgggagtaagagaacaatttggggctgaagggagtgtcagaggcacgttgatccttgttttgttgtcatggaaacttcggggctggtgggacttaggccaaaagctcagaggcacagccaaaatttagaagcttgctactcctacgactcggcctataaggaagagagaagctgtctgtactttggggactacattgctgaaggaaaaaaatcactccctggctaattaagattgcttccaaattgggggaatgtgtgtcatttcctttaccaaggccagtcatccctgcttccacccatggtcaggacagtcagccactacgtgatgctgtataaattggattacaaaccatattcttgttcagcttgcactaatctatataaataaaatatgtactttgaaaaaaattaggctacatgagtttcaaatggactgtgatgttatagacctgctttctctttggttctgggccagtgtcagacggggacaggggtgataggcctggtgtcctaggggccatttgtgtaccttgaggccgtgttaacatggcctgggggaaagaaagctctcctgtcacttggagtctcattcctaaaccctccttcccagggagcaagtgtggggcagggtttcagagcacaggctttggtgtccagcctgggtacatccagctgtcccgctgtctaactgacattgtgtgagatgcttactctctctgagctccctcctcctggctcccaactttattataaaatggggaaaatgattgtgcttgccctacagaattgtagtatgaattaaaagtctggatttaatgtatttaatatagaaaattttagcttttattaataaaagtttttggcataaaaaaaaaaaa

SEQ ID NO: 2430 - DNA, 1345 bp, Homo sapiens
  SITE (1324): n equals a,t,g, or c
  SITE (1326): n equals a,t,g, or c
  SITE (1338): n equals a,t,g, or c
  SITE (1344): n equals a,t,g, or c
ctccagggatgtgatccggcatccttgagtttgctcacagtgcctgtgcaccattcgagaagcccagcccctytccctcaccaccaaaccagaaacccgggcccagctggctctccactctgcgccttcmtgtcggctaaggctgcagcctcctcytctgggcagatgggcagccagcytcccctcctgtcccggcccytcccccttgggtccatgcccacagctctgctggcctctcccccgtccttccccgccacgctccatgcccaccaggccctcccggtgctacaggcccagcctctttccctggtcaccaagtctgcccactaagctccccccgacccctgcaggctgtcacatgactcattgagtagtaatgattcagaagaaaaagaaaaaggagactttattggtcaatatttgaccactctggactgttctgtaaagtggctggtaacaacagcactttacagtttgtagatgtaaccagtagctgatcttaaggcttttttaaaaaacaaaacaaaacaacaaaaaaaaatctttataagaaagagaactgaaaagtagcgtgctattcgtcctgtaggtgctgtggtggatggacctgggcagagggcacttctctctcttacctctcttgcactttctgtctcctgtctcttctcgcccctgccgcctgccccagcttccccgactccatctgcagctctgccattgtgacatttcctgttacccagcccaagttttcatcgtctgctcaataccgtgggttcttcttcgtcctctgtcctctgcccagtgtgaggccatcaccatgtgagaagacatcttggcctgatttgctgccaccagcgtcccctccctcagtgggcccgaactcgccagccccagctttcagtggagaaagcggtcctctgaaatggtttcctcccaacccccgcatttaaagggactcaaggtgcctgccacttcctcagcgaagaagtctgtgttcctccccgtccttgccagtggcgatcatcccttcacaatcccagagtggcaggcgggaccrgccccatggtctggctcctgtcacctgggtccgtgccagcacaatctgccaaagttctagagaccctgttcccttccccatcacctcacatgcttcttctgtgtgtatttctttttgtttttatggtttttggagcaatttaaactcccagttgtttattttcacaaaagaaaataaaattgcagttgcaaaaaaaaaaaaaaaaaaaaaaaaaaaaaaaaaaaaaaaaaaaaaaaaaaaaaaaaaaaaaaaaaaaaaaaaaaaaancnsggggggggggnccgttnc

SEQ ID NO: 2431 - DNA, 1093 bp, Homo sapiens
ggcacgagcggcgccgacgagaagaactgcttctcctgccagcccggcaccttccactgcggtaccaacctgtgcatcttcgagacgtggcgctgtgacggccaggaagactgccaggacggcagcgatgagcatgggtgcctggccgccgtgccccgcaaggtcatcacggcggcgctcattggcagcctggtgtgtggcctgctgctggtcatcgcgctgggctgcgccttcaagctctactcactgcgcacgcaggaatacagggccttcgagacccagatgacgcgcctggaggctgagttcgtgcggcgggaggcacccccatcctatggtcagctcatcgcccagggcctcattccacccgtggaggactttcctgtctacagtgcgtcccaggcctctgtgctgcagaatcttcgcacagccatgcggagacagatgcgtcggcacgcctcccgccgggggccctcccgccgccgcctcggccgcctctggaaccggctctttcaccggccgcgggcgccccgaggccagatcccactgctgaccgcagcacgcccctcacagaccgtgctgggcgatggcttcctccagcctgctccaggggctgcccccgaccccccagcaccgctcatggacacaggcagcaccagggcggccggagacaggccccccagtgcccccggccgtgcaccggaggtgggaccttcagggccacccttgccctcgggcctgcgagacccagagtgcaggcccgtggacaaggacagaaaggtctgcagggagccactggcagacggcccagctcctgcagatgcacctcgggagccctgctcagcccaggacccgcacccccaggtctccactgccagcagcaccctgggcccccactcgccagagccactgggggtctgcaggaaccccccgcccccctgctccccaatgctggaggccagcgatgatgaggccctgttggtctgttgaccgctgggctcgctggtgaccgccacagccccgctttgtaaccagggaatacacagtcatttctaaaaaaaaaaaaaaaaaaaaaaaaaaaaaaaaaaaaaaaaaa

SEQ ID NO: 2432 - DNA, 1300 bp, Homo sapiens
  SITE (1086): n equals a,t,g, or c
ggcggagcgagttacgagaattcccggccgctgcaaggggtgggagctgccctggggtcakgtgtgagcagtgattactggcatctgggcatgggctgagtgtccattcctctagagccacagtgggctccacagaggtgagtgtggccgtgaccccagatggttacgcggatgccgtgagaggggatcgcttcatgatgccagctgagcgccgcctgcccctgagcttcgtgctggatgtgctggagggccgggcccagcaccctggagtcctctatgtgcagaagcagtgctccaacctgcccagcgagctgccccagctgctgcctgatctggaatcccatgtgccctgggcctccgaagccctgggaaagatgcccgatgctgtgaacttctggctgggggaggcggctgcagtgacttctttgcacaaggaccactatgagaacctctactgcgtggtctcaggagagaagcatttcctgttccatccgcccagcgaccggcccttcatcccctatgagctgtacacgccggcaacctaccagctaactgaagagggcacctttaaggtggtggatgaagaggccatggagaaggtgccctggatcccactggaccccttggcgccagacctagcacggtaccctagttacagtcaggcccaggcccttcgctgcacggtgcgggccggtgagatgctctatctgccggctctgtggttccaccacgtccagcagtcccagggctgcatcgcagtgaatttctggtatgacatggaatacgacctcaagtatagttacttccagctgctcgactccctcaccaaggcttcaggccttgactgatggagcactggtgaacacgaccaagcacgcctcgggggacggagccagcccctccctggccaggtcaattctcgagagagcctggagtgtgcatgctggctgctggccccgggtccagcatggcttgagatcagctttggaggatcttggaatgtggtcataaggactcaaggtgccaggcaggtctgggtgagggttctcaggaagttgccacacaggtgagcagagtggggatcangtgcagcggcacctctccccagcgctgtgatgttgggcgagtcactgcgtctcgggcattggtgtcctgtcagtaaagagataataatggctgtacctcgcggggctgttgtgggcttggagatgatgtctatgaggaccagcatggagctggcacacaggacatgttgaataaaaggtagctgtgartcgtaaaaaaaaaaaaaaaaaaaaaa

SEQ ID NO: 2433 - DNA, 798 bp, Homo sapiens
ggcacagcctgtatgtagctccagctacttggaaggctaagatgggaggatggcttgagcccaagaggcagagcccgcaatgagtggagatcgtgccactgcattccaggctgggcaacagaatgagactctgtctcaaaaaaataaaaaaaaagaaaagataaacagtaaaatggaatcagaggaggaggtaatgccaagagttccactattcattgaaaactaagggagtatgttgtggaaagmgaatgacagcagaagctatgttttctttcttaatttttatctgtcttttgattcttttttcaaaatgagtctagatggtctaagcagaggagatcagaagcatcaaaatggggctggtttggggcagtgggtgtttttctcagtgactgttaatctccagaagcatggcagttctagggccagaggctacgtggcttatcctagagggagtaccttcaggtatacaattatgtcttagttgagggttttaaaaaaattgttgtcaccaggtgcagtggctcatgcttgtaatcccagcactttggtaggccgaggtgggtggatcacaaggtcaggagtttgagaccgtcctggctaacacggggaaaccctgtctctactaaaaatacaaaaaaattaggctctggtggcgcgcgcctatagtcccagctactcaggagkctgaggcaggagaatcgcttgaacccaggaggtggaggttgcagtgagcccaaatcgcgccactgcactccagcctgggcgacagagcgagactctgtcaaaaaaaaaaaa

SEQ ID NO: 2434 - DNA, 1050 bp, Homo sapiens
gaattcggcacgaggcaagattagcacaaagcatactaatgttttttgaaatacacccattgttaacattttgtaccatttgctttatcatttgcactctgtgtgttgggggtctgtgtgtgcagtatgcaataggtttttcttaaaccatgttagagtaagttgcatatatcaaagaaataccttttcccacaaataaacttaagtagttccccaaaataaggatattctataaaaccatagtatagctagcagttttattaaatttaaccttccatattccagttttatcagttgattccataatgtcctttgtggcactttgttactctcgtacatcatcccatccaggatcaggtatttcatttagccctcatgtgtcttcagtcacatttaatctggaacagttcctcagcttttgtctttttttttttttttgaccttgatgtttttgaggaatagtctttgttttaaaatagagtatttctcatattgtccttttttttttttttttttgagacagagcctcgcactgtcactcgggctggagtgcagtggcataatctcggctcactgtaagctcctcctcccaggttcaagctgtgctcctgtctccacctcccaagtagctgagattacagttgcccctgaccacatccagctaatatttctattttggtagaacaaggtttcaccatgttggccaggctgttcttgaattcttgacctcaagtgatctgcctgccttggcttctcaaggtgctgtgattataggtgtgagctactgtgcccagccctaagtaatattctaatgcgttattatgagagaaaatcattcttatagttaaaattaaatcaaaataattagtatgtcattttactaattgtacttttatgtgataaaaccacttttttttaaagttttggattgtgttaatttttcaattcaacatttataatgttaaatactgttatacattcaataaagtgttattatgccactaaaaaaaaaaaaaaaaaaaaaaaaaaaaaaaactcgagggggggccc

SEQ ID NO: 2435 - DNA, 1040 bp, Homo sapiens
aattcggcacgagtgaacagtragactgtctcaaaaaataaaggtgtacagggattgtatatttgacaacttggtatgtaggatgtgctacctctaatgttccatgctgttacttagttttcactcactactatattttggagatttgttcatattgctctgtgtacatttaattcttcagtgtgtatccaccacatttaacttattcacttacagaactatgcaagaatttctctggtaaatttcactaagtacttatgtacttttcagaacgattgtgagtttacacccctaccagcaggactgagttgagtacccatttcctcacatccttgccagtacttcatttgcctaatttttgccattctcataatgtggcaattgttcaattttgcattcttccattttatttttttgcatctctgcttttcttttggttagctttgccagttctgcctattatattaatctcccagaatcagcttttagttttgttaaatctctgacatgtttcgttgattcctgctttcatcttaaacatttcttcgttgttaatttgtgtttgctataaaataagcaacatcttaaatgcttgattkgctttcgatgtttattctgtaataagatatttaaagatataatttttccctaaatgctttattagacttttctcataagttttgactggtactgttttcattgttatttaattttgtgttttttaacttctttcatgatttccttttaactgaaggttttcttagatatttagtttgctggtatattcttttaaaattgtatcattgctttctttctatattggattattgtcagagaacatgatttgcatgatattaactttttggagtatattgttgcatctttgtggcctagtacatagttaatttagtgaatgcttccagttgtacttgaaaagaatgtatattttctgattattgagggtaaatttctctatatatgttttcctgtttaataaatatgtagctatgtgcttaaaaaaaaaaaaaaaaaaactcgag

SEQ ID NO: 2436 - DNA, 2364 bp, Homo sapiens
  SITE (65): n equals a,t,g, or c
  SITE (89): n equals a,t,g, or c
  SITE (134): n equals a,t,g, or c
gcgagagctgcgtgttgaattcgccgccgagaactatctgagcggcggtggcccaggggacggangtggcgcggacaccgggactggangggaggaagtcgaggccctgcagctctcagctcgttggctggaantgctgcgcacctacttggagctggtgctttgcgtgctggtcagcatccggaacaacaggaaccttcagaagtttagtctttttggagacataagtgttctacaacagcaaggaagtttgtcaaatacatacctcagcaaggtggaccctgatggcaaaaaaattaaacaaattcagcaactgtttgaagaaatcctgagtaatagtaggcaactgaaatggctgtcctgtgggtttatgctggaaatagtaaccccaacatcactgtcatctctctctaatgctgttgccaacaccatggagcacctcagtttactggacaataatattcctggtaacagcactcttattactgcagttgaactggagcgatttgtgaatctgcactcacttgccttggatttttgtgactttacagctgagatggcaagagtcttaactgatagcaaccatgtgcctttgcaacgactgtctcttctggttcacaatgtttctgtaatgcacaagtctctggacaacatgccaaatgatgagcattggaaagccctgtcacgaaagagcaccagctttcgggtctatataatggcttttgatatcaagagtgaagatatgttaaagattctgaaacccagtataccactagagaggattcattttgatagctatatcacttgtgtttcaggggctattgttgatcttatatccaggcaatatgacaagttcctcactcattttattttaatgaatgatgtgattgacacatctggttttccagatcttagtgacaaccgaaatgaagatccgttggttttattagcatggaggtgcacaaagctctctcttctggcaattcatggttacacggtgtgggcacacaacctcattgccattgctcgtcttcggggctctgatctgaaagtgcttgaagtcaccgaagaaagcattgattttgaccaaggtgaactggccgaccaggatgtagatccagtgcataaccttattgagcaggtatccctgggcctgggtcaaccttggcatgcagtcatggacatcgaatcactcagtgtcttcactgaaccaaatcgtcatttttacagagagatgcaaagcttcagtgaagacatttagcttttttttaatgtagaattcctgtggttacatatgcaagtagggtcctattatgtttttttttcagtagtgtgaattaatccttttgtgctgtgtttaatcagtattagctttatagaattatatatgtatattctacttcttgatcaaagaacgtagtcgggtattggtttagaagttcaaagtgacaatgtatagggctttcacggttaatggacttgttaccaaaccttaaggatatacagccgaagattgtctgaggttgctggctaactttatttttcactgagttactctgcctttttgacgtttttattctttgtgtgtcagagttcagagctcaggagccaaaatatttttatacatatatagatatatatccatagcctggtagatttatatgcaatgcactgcatccatgcattctgatagcatttcattaattttgatttcaaatggaagataaataatatcccaaatgaattatctgtaacagaaaagccaagactttaactttcattacatatctaatagttgatatcaccagttaccattttgaattttgtatagtactaggttagaacattgcttaatccttttaaaaaaaatgcatttacgtaaacacgaatactgaaattgttggattttttaactatatctgacataattttattcatcaattacattacacattcatttagcccagatttcaaatagtgggggaagaaagaaactgtatttcagagtaaaatctcctaaaggaaataaaaacacagagttgtaaatacacatgcttgcaaaaacattagtcgtgaaatccctagcaacaagtcactggatttttctctgtcagcacgcgtgtcagctgccaaagaatagacttaatgaagaagtgcccacatgctggcaggggccggcccactctggccagccagatactgctagattgtaatatttaaggtcgaatttcgacctgtggtacacagctgtgctgtggctcagtcagcaacctcagaactctgaaaaaacaaaacaaaaaaaaaaaaaaaaagaaaaaaaaaacatgcacctgtttcactgtgaatagtgaatgtaaaaaaaaa

SEQ ID NO: 2437 - DNA, 524 bp, Homo sapiens
  SITE (4): n equals a,t,g, or c
  SITE (37): n equals a,t,g, or c
aaantaaccctcactaaagggaacaaaagctggagcnccaccgcggtgkcrtmsgcwmtagwwccggtscacgwccctracttcgggcttgttcgctggtggcgtcggagccgagccggactggtcaggatgatcacggacgtgcagctcgccatcttcgccaacatgctgggcgtgtcgctcttcttgcttgtcgttctctatcactacgtggccgtcaacaatcccaagaagcaggaatgaaagtggcgctttctccgccccagggttccaggacatagtctgaggcaagatggagggtatgaggggccttcacacttcacttcatcccttcctacccatcacaacatacaaagcaactacacctggatttttccaaacaacttttatttcctcagagtcttccttaatcctatggaacaagaagctgccactgaatagggcccagtataggggcttgcttttctactccctccccccaatataaaaatatagacttttaaaaaaaaacaaaaaaaaaaaaa

SEQ ID NO: 2438 - DNA, 711 bp, Homo sapiens
gttctatcagttattaagagaggactatcgaagtccccaatgataattgtggatttgtctgttattttttgtagttgtatcagtttttatttaattgattttgaacctttcatgctaggtgcatagacctttaggattgtcatgtcctcttagttaactgaccccactatcattctgaaatgaacttccttgtattctttgttctgaaatgcattttgtctagtataaatatagctgctgcagcttttttgggctagtttaactatggtatatctttttcatccttttactttttatgtatttgtgtgtttatgtttaaagtgcatttatcataggcagcatatagttggttcttgcttttttatccaatttgacagtctctgccttttaattgatgtttgggtccatttacatttaatgttattatcagtatggctaggtttgagtctatcatcttgctatttgttttgtatttgttccatgtatgctttgttcccttttctccctttttctgccttcttttggattactgttttttttaatgattccattgttttttcttccttgatttattagctgtacctcattgttttattatcttagtagttgctttagagtttatagtataaatgtttaacttcctcctcctggctttcatgctagtgtcataaattttacttgtagattttataaaccttaaaaaaaaaaaaa

SEQ ID NO: 2439 - DNA, 1992 bp, Homo sapiens
gcatcctccgccaggacagagtctccaaaggctgctactccttcatccacctcagcttccagcagtttctcactgccctgttctacaccctggagaaggaggaggaagaggatagggacggccacrmctggkacattggggacgtacagaagytgstttccggagtagraagactcaggaaccccgacctgatccaagcaggctactactccttcggcctcgctaacgagaagagagccaaggagttggaggccacttttggctgccsgatgtcaccggacatcaaacaggaattgctgcgatgcgacataagttgtaagggtggacattcaacggtgacagacctgcaggarctgctcggctgtctgtacgagtctcaggaggaggagctggtgaaggaggtgatggctcakttcaaagaaatatccctgcacttaaatgcagtagacgttgtgccatcttcattctgcgtcaagcactgtcgaaacctgcagaaaatgtcactgcaggtaataaaggagaatctcccggagaatgtcactgcgtctgaatmagacgccgaggttkagagatcccaggatgatcagcacawgcttcctttytggacggacctttgttccatatttgggatcaaataasgagatgggtctagcaatcaatgatagctttctcagtgcctccctartaaggatcctgtgtgaacaaatagcctctgacacctgtcatctccagagagtggtgttcaaaaacatttccccagctgatgctcatcggaacctctgcctagctcttcgaggtcacaagactgtaacgtatctgacccttcaaggcaatgaccaggatgatatgtttcccgcattgtgtgaggtcttgagacatccagaatgtaacctgcgatatctcgggttggtgtcttgttccgctaccactcagcagtgggctgatctctccttggcccttgaagtcaaccagtccctgacgtgcgtaaacctctccgacaatgagcttctggatgagggtgctaagttgctgtacacaactttgagacaccccaagtgctttctgcagaggttgtcgttggaaaactgtcaccttacagaagccaattgcaaggaccttgctgctgtgttggttgtcagccgggagctgacacacctgtgcttggccaagaaccccattgggaatacaggggtgaagtttctgtgtgagggcttgaggtaccccgagtgtaaactgcagaccttggtgctttggaactgcgacataactagcgatggctgctgcgatctcacaaagcttctccaagaaaaatcaagcctgttgtgtttggatctggggctgaatcacataggagttaagggaatgaagttcctgtgtgaggctttgaggaaaccactgtgcaacttgagatgtctgtggttgtggggatgttccatccctccgttcagttgtgaagacctctgctctgccctcagctgcaaccagagcctcgtcactctggacctgggtcagaatcccttggggtctagtggagtgaagatgctgtttgaaaccttgacatgttccagtggcaccctccggacactcaggttgaaaatagatgactttaatgatgaactcaataagctgctggaagaaatagaagaaaaaaacccacaactgattattgatactgagaaacatcatccctgggaagaaaggccttcttctcatgacttcatgatctgaatccccccgagtcattcattctccatgaagtcatcgattttccaggtgtgggtgaactgcctgtgactcctctcctcccccgcccctacccctcagggataatgagttcattgctgggctagatgttttagccatgattctgcctctgttttatacctgcacacgtccttatctttgttacatatgaaatatctgtatcacgggtatattgagagaaataaaggtgagagcattcacaaaaaaaaaaaaaaaaaaaaactcgag

SEQ ID NO: 2440 - DNA, 1161 bp, Homo sapiens
ggcacgagcggggtcatcgggatgatgcggacgcagtgtctgctggggctgcgcacgttcgtggccttcgccgccaagctctggagcttcttcatttaccttctgcggaggcagatccgcacggtaattcagtaccaaactgttcgatatgatatcctccccttatctcctgtgtcccggaatcggctagcccaggtgaagaggaagatcctggtgctggatctggatgagacacttattcactcccaccatgatggggtcctgaggcccacagtccggcctggtacgcctcctgacttcatcctcaaggtggtaatagacaaacatcctgtccggttttttgtacataagaggccccatgtggatttcttcctggaagtggtgagccagtggtacgagctggtggtgtttacagcaagcatggagatctatggctctgctgtggcagataaactggacaatagcagaagcattcttaagaggagatattacagacagcactgcactttggagttgggcagctacatcaaggacctctctgtggtccacagtgacctctccagcattgtgatcctggataactccccaggggcttacaggagccatccagacaatgccatccccatcaaatcctggttcagtgaccccagcgacacagcccttctcaacctgctcccaatgctggatgccctcaggttcaccgctgatgttcgttccgtgctgagccgaaaccttcaccaacatcggctctggtgacagctgctccccctccacctgagttggggtgggggggaaagggagggcgagcccttgggatgccgtctgatgccctgtccaatgtgaggactgcctgggcagggtctgcccctcccacccctctctgccctgggagccctacactccacttgggagtctggatggacacatgggccaggggctctgaagcagcctcactcttaacttcgtgttcacactccatggaaaccccagactgggacacaggcggaagcctaggagagccgaatcagtgtttgtgaagaggcaggactggccagagtgacagacatacggtgatccaggaggctcaaagagaagccaagtcagctttgttgtgatttgattttttttaaaaaactcttgtacaaaaaaaaaaaaaaaaaa

SEQ ID NO: 2441 - DNA, 1255 bp, Homo sapiens
ggcacgagctcattctgttttcttcatctttccctgaccagaaatgtttgcaacacaaggacattcctgtccccaagggctttctgacttcctccttctggcgctcctgatgtcactccatcacccaccatcaccgctgctgcaaagaggcaataataaaggaactgaagacagctgtatttgggagaagtcatgtcagattcagaaatttgccattatgtatttttatgtatttatgccttgtgactaggagaggagattttcatgggtcacaaaattcttggaggtcccttagtagatttggtagttccttaagagatccacgtgataaaataaatggagttggcctttcttgttttttgcaaaagtgataaaaggtctttagcacttggtctcctcccttgtctctagtgtctttcagaaaagttggcaataccttaacaaatgcactctgagctggagggagcccaccatttgcacccacctgacccaccctcacccctgttcagatgaatttccaaaaagagctaaggctcataaggttcccttttaagtattatttaatagttgaggccagatacttacatgcaagtctgggttatggttgttttgcctttctcagcttgtgaagtcattctaaagctagaggaagtatgtgatatacacatggactaaggctcaggtgacactatggctagattaacatctgggattaggactggaaacacatgtcattttgaactaagggaaactctttgtcatcctaatttggaatttggtccctggatggctagggatccatgaaccaggcaggtaccttttttgtttttgttttgttttgtttcttttctgtttgaattaagatgggctaagatggggcttgcaacattaaacatgagctgagcatccataagcattgaattgggattaaataaagatgttgggcaggaactgaacactgctaatatgatgataaatatgcctgactaaagccactacagaaatccagagattggctgttaaaatttgttttgtggaaagactaattctctttgatactgcagaggcagtggccatggatctgttcctctgtgctaaatgtcttgtggcagggtgtgtttgtgggggagtgttccactggtactcttgagtggcctgaagtgacccattctatgaattgttaattaaggtgccaaaaaaaattaataataaagcttggttttttgaaaaaaaaaaaaaaaaaaaaaaaaaaaaa

SEQ ID NO: 2442 - DNA, 2204 bp, Homo sapiens
ggcacgagattttttgtaagtcctacaagtacaaggtttttataagtacagcgttccaagtacctgggcactctggttggcttcagttacagctcacacaggctgagtcatctctgcctatgtatctatacaagccatttcacatccatagtaccaatacttttaaggtcaaaaacaagatgaatctgaatggtggcctttttgtcctccaccaatccctgtttctaccttcatcaaactactctgctgtttgcacttcctcacaacttcccttgctgcttatatttcttttttcccctcaggtgtctctccttcccttctaactggcagcagcccccttcacctcaggagcgggctttagatccgctctgccaggcagcttgctaacttctgtgtagctctctgaagcaggtagagaaatgttttgctaaatgcatgccgctcccactgcctttctagtcctaaccctcaatgttccttagttgtttgccttgtttcctacaatttcagctaaaactattgctcagtatgcagtattatgctacagtgtcccttgcaagtacttgttagtttgtgcagtgcttctgagatgtaattaaatgtttatgcaatgtttaaaataaactctagagggctaaagccattaatatgcccataggacacatctcgataaatgctggcgtatatggcattttcatgcaatagaaactgttagaatcaagggagaaatataagactaaaatatcagtaccctttcacatagcattcttgttttaacctatgacagatggatgtccagagccttttctttttcagagtccttggtttagcaacccttgttcgtttggtgttacttgttataatagcatttctttgcaccaaatgaaaataggttagtttgagtgttgacagaagtgtttatgttgaattttgtcacatatgacttttggatgagctgagtgtagagtttcttttgtctgtctgtttccattttttccattcgacatagttcttttcagtgctcggaattttttgaaagattgaatttcccaaatgtaagaaagaaaattttatccatatttccacaccagtgttactgtccagcatacattttgaaatgatttctagtctatagtgtaggcaaacatgaaaatagtactatgtagctgtttattaaggtatagatgtaatttaggtaattgaaatagatgattagttttgtgtgatggagtgcctgagcaggttctgacatttttataaaggtcaatgttttcacttgactgctttctagaggtgtgtgtttacctttctctcttgcaggacctggagttgctggctaccttaccgcaggtacatctacatcagtcatgtctaacctgccacctcctgtagaccatgaggcaggcgaccttggctatcagacttgaaatattcacgagagacaataaacgctgaaaggccagtgccaagtccacattcctccagctgatacgttgaagcaaactcttactgcctttctcctggtttcatgacagtgttattcctttttctataaatatatttttaggaaaaaaagtcagtgatcctaattgtatcacattataagaaagcactctgtggatcaacataagtgggtacacaagaattttttttttcttggtgtatgtaagcacatttgttcctttatatctgtttacaaaactgtgaatcaaaaagacagaactttcttcctagtttttgtaattttttttttgaactagcatgactgtagggttgagctacagtcaacaaaaattgggctaagtcacttttccccaggaaagaatatttccctctcctgcatcaagtctgcgtggccatcctccccccaccatccaagactattaggttttgtccctgcacccttcactggcatcctcaatcattaaccttctgaaagctcacagtacacattagtatgtataactggctttaccaaattgaatgaaaaggagcttgtgcaaaaaaatttaaaaatggatgtcaagatgttatgtaaaagatgagtgtaattgtgaaatgttctatacactatcaaatatataaagctttctatattgaatgtacattatacagatcattcatatgtgtacataaaattttaaaaataaagggaattgactgctttgttaatgaaaaaaaaaaaaaaaaaaaaaaaaaaaaaa

SEQ ID NO: 2443 - DNA, 1409 bp, Homo sapiens
ggcacgaggaaaaacttttggtactgtaattaatatattaaaaaagaaacattctgatttttttctggtctggctttttttctgtataattaaatgtaaacctaacaaggtttaattaaatttagtttacagctgttgcggcaaaaatgcaaaaagcaaattagagggaagaaaatatggtgtatgctttgtagacagatgggactgaatctctgttatcccaaaatgttcttttattattggtacattttatcagtaaatcaaggatagataccaaatattaatgtacacatgagccaattacttctaactagatttttctcttagtatttttttatctgtttcattattagtttatcagctccaaattagcatatccaaatgagttacccagcaatagataaattgcttttgattttgtgtcataattaatatttttatctagtcatttatctatcattttagaaactagccaagtctatgtgagtcataaaagaaaaatgaaaattatttactattagttaaattacagtggttgctttgagcaggttcagaggcttaagttcttcacaatctcttactacatgattgctgttttttcttccacagctttgtcatttactcagtgctgtggactttcaccatcctgatattaaaactgtgcaggtgtccacagtagatgcttttcagggagctgaaaaggagatcattattctgtcctgtgtaaggacaagacaagtaggattcattgatcagaaaaaagaatgaatgttgcattgactagagaaagagcatttgttgattgtgggaaattagcctgtttgagaaaaatcaactttggggacgagtgatccaacactgcgaaggtaaaataaaaatgggtttaattcatgcatttcaagttcaaactgacttttatgggttaatgcttggggtgcttcaagcaggaacagctctgctgggggaagtaactgacatgataatattgggacctctgtaaaataaagaatagttgtctcatgtcgtatgtttttttaaggaagggaagatggattgcaacatgcaaaccagtatgaaccacagctgaaccatctccttaaagattattttgaaaaacaagtggaagaaaaacagaagaaaaagagtgaaaaagagaaatctaaagataaatctcattcataaaaagacatggtgtaaatattttgtatttatgtaaattcagactcattttacatgatatattttttatatttttattactctaaaccctcttattaaaaatatgatatttaaataacatagtaaacacatgtaaaaattttgttcttcaaaaaagtgtacaaaaggtagtataaaatcctactaataaaaataagcttttttctaagaaaaaaaaaaaaaaaaaaaaa

SEQ ID NO: 2444 - DNA, 2389 bp, Homo sapiens
  SITE (314): n equals a,t,g, or c
tccgggctgccttcccccttggcgccctgacccagagccacaccgggagctaccactgccattcatgggaggagatggctgtatcggagcccagtgaggcacttgagctggtggggacagacatcctccccaaacctgtcatttctgcttcccccacaatccggggccaggaactacaactccggtgcaaaggatggctggcaggcatggggtttgctctgtataaggagggagagcaagaacctgtccagcaacttggtgctgttggaagagaagccttctttacaatccagagaatggaggataaagacganggcaattacagctgccgcactcacactgaaaaacgccccttcaagtggtctgagcccagtgagccgytggagcttgtcataaaagaaatgtaccctaagcccttyttcaagacatgggccagccctgtggtcamccctggtgcccgagtgaytttcaattgctccamcccccaccagcatatgagctttattctttacaaagrtggaagtgaaatagcatccagtgacaggtcctgggcaagtccgggggccagtgcagctcactttctaatcatttcggtgggcattggtgatggagggaattacagctgccgatattatgacttttctatctggtctgagcccagcgaccctgtggagctcgtggtgacagaattctaccccaaacccactctcctggcacagcmgtcctgtggtgtttcctgggaagagtgtgatcctgcgctgccaagggactttccagggcatgaggttcgccctcttgcaggagggagcccatgttcccttacagtttcggagtgtctcagggaactcagctgacttccttctccacactgttggagcagaggactctgggaactatagctgtatctactatgagacaaccatgtcaaacagggggtcatatctcagtatgccccttatgatctgggtgactgacacattccctaagccatggttgtttgctgagcccagttctgtggttcccatggggcagaatgttactctctggtgccgagggccggtccatggagtaggatacattctgcacaaagaaggagaagccacttcaatgcagctctggggatccaccagtaatgacggggcattccccatcaccaatatatctggtactagcatggggcgttacagctgctgctaccaccctgactggaccagttctatcaagatacaacctagcaacaccctggaactcctagtcacaggcttactccccaaacccagcctattagcccagcctggtcccatggtggcccctggcgaaaatatgactcttcagtgtcaaggggaactgccagactcaacatttgtcctgttgaaggagggggctcaggagcctttagagcaacagaggccaagtgggtacagggctgacttctggatgccagcagtgagaggtgaagactctgggatctatagctgtgtttattatttggactctactccctttgcagcttcaaatcacagtgactccctggagatctgggtgactgataagccccctaaaccctctctgtcagcctggcccagcaccatgttcaagttagggaaggacatcacccttcagtgccgaggacccctgccaggtgttgaatttgttctagaacatgatggagaagaagcacctcagcagttttcagaggatggagactttgtcatcaacaacgtagaaggaaaaggcattggaaactacagctgcagctaccgcctccaggcctaccctgatatctggtcagagcctagtgatcccctggagctggtgggggcagcagggcctgttgctcaggagtgcactgtagggaacattgtccgaagtagcctaatcgtggtggttgttgtagccttgggggtagtgctagccatagagtggaagaagtggcctcgactgcgaaccagaggctcagagacagacggaagagaccagaccattgcccttgaagagtgtaaccaagaaggagaaccaggcacccctgccaattctccttcatcaacctctcagagaatctctgtggaactgcccgttccaatataataatctcctcctttacaagagctttcctctcctctctcttgctctcagagacctataaatccaaccagttaccctgcaagtcagccccatctgctgttccttggtctctaatcacctgagctgggtaaaggggattctgggagttgagagctctgccagggtgagatgtttcctgaagagaggttccccacccctgtaactcctcactgtactgatttactggcgcatgaaattctattaaaaatgcattcttctgaataaaaagagtattcactatttaacttcaaaaaaaaaaaaaaaa

SEQ ID NO: 2445 - DNA, 1338 bp, Homo sapiens
ggcacgagctgctgctcatttttctaaaaaatgttttattggaacacaattatgcccaattgtttacatatcatccttggctcttttcttctcataatatttactgtctgtatgtttataggaaaaggtttgctttagcttatgcatagacaattattttaatgtcactattaaaaacaataatttcttaatagtttaaatatcacatttacatagattaatttccaatcatgcatattgttttgtaccactactatttgttttgttctctcatctgtttattcctgtgtcaatactgctcttataatacctttgtgtacatttaaaaccttgaaaagcaaattacttttcattatttactttcaaattttttctaggaatttcccatgcatttattttttacataaagtttagaaaaaaaatttccactttaaaaaactgagatcctgattactgttatagtaagatgacatatcggtttaaataaaattggaaatattgtgatattaaaagtcttccaatccagaaacatgctatgtctttctatttattcatgttttagtttatgtccttttataactttttatagctcttttcatgtaggcctactaattttaagttaaatttaatctatgatattttgtagtttttactactttttaaaatgagattttccttttgcatacctatttctaacatgaaattgttagcattaaaatctagctagtcaacttggattcagccactttaccaaattgctttattattttaagcacgtttttagtagtcttttatattttttaggcaagccatcaaatggagatatttttggtttttgactatgggaatagttactgttcctgttttttaatcatgatgactttcatatttcatctttgttactatgtttttacttggatattgttaattatacttttccatgtttagactgtttcttctattcccatgtcactatgaattttaattaggaatgtcttctaaattttattcaatacgattttagcacatgttgatataatcacgtattttttgcttttttctctttaatttgtttatataataaattatattgagaaatttacttaatgctgaaccagtagccatggagtatactttacttagttaaaaatgtgacattctaaaatatgatgctgtattattttgaatataatttattaggaatttttatatctatcttgaaaaagaaactggctatagctttctgtgatagctttatcaagttttgatatcttggtctatgtcttgagagaatttaaataaaggataattgctctgaacaaaaaaaaaaaaaaaaaa

SEQ ID NO: 2446 - DNA, 1081 bp, Homo sapiens
ggcacgagcctaaacatacgttcacctgcatgctgcttctgttctggacctttgcgctggatgtagtcccaacagagtggcttgctgggaggagggagatacttttcagataaggcactagcacttcatcctaacaacttctccatactgaggcaacatttttaaatacacagagaatgcctaggattcaattgttgagaaaaattgatgtaagtctgtttgtctcaaagaaagctatcaggaactacagttttattaacctaaatgtacacctggtttgatgatgactatgtaaatgtatttttagctaattaatttattatttctgcccatcagccaacgagtggataaagaaaatgtgatatatatgcactatggaatactaagccataagaaggaatgaaataatggcatttgcagcaacctagatggagttggagaccattattctaagtgaagtaactcaagaatggaaaaaaaaatatttggaattgaggtatctaatagagaactgagttaaattattgccacttaaaaacacaaagtgatatagccactttgtgaattaatcagtcagcagtggctaggttatgcttagtggtttataaccaaatcttagtttataacaacaaatgtgtattgttaattcccactacaagtttataacgacattgctggatgctacactccatgtctctttgtgggacccaggctcatgggacttctgttatctgcattagagagagagaagacaacaaaatatgcactggttcttgaagctttggcccagaagtaaaatatgtcttttacctgttcacattgcattgggccagggcaattatcatggctgcaagtaacttcaaaaggatggggaagtgcgatcttggcatgtgtcagaagaaatgaaaacatttggtgaagagcattaatgactgtctttacaggaaaaaagcaatcaaatagacatgatttcttgtttcagtttcatcatttcctactgtgttacctaaactttctgagccccagtttcttattactaaaataaaataatgataaagatgaaaaaaaaaaaaaaaaaaaa

SEQ ID NO: 2447 - DNA, 1877 bp, Homo sapiens
  SITE (854): n equals a,t,g, or c
  SITE (1422): n equals a,t,g, or c
gaattcggcacgagctgaattccatgtttcattactgggtagaagttacagaacaaatggatttagcttattataaggagaagttttctaattgttagaatttacatatctgtggaatgaggctatttgtcaaactagagagttctttttcccttaaagatgtatagtaagagcagtgcgaacatctcacaagggatgttagatattcttctgtggatagatcttgcacatgatgacctcctgggctctcccagccctgtgattctgagatcacatgcccattcaggaatcctcactgtctagacccatccactaaaatgaatcatcatcttattcacatctaagccccattacmagtttattagtatcatccctttcagtggaaatgcgaaatattttattcagttatgctaatgtaattagctcataatgtcaaatgcttgagaagttgaggttgtagttctgctgggtatttgtttctcatgtcaaatatcataccatcagtgaaattgttcataaccaccaaaattaacaattagccccttcagcccctcttccacctttatcatatttatttgcttaacaaatttatcttttttttttttttactcattgattctgaatctccctctatttaaatgtatattctgtgacagcagtcctcaacctttgttgcaccaaggaccarttttgtggaagtcagtttttccacggacaggggcagaacaggggatggttttgggatgaaaccgttccacttcagatcagatcatcaggcattagattctcatgaggagcatacaacctcaattcctcrcatgtgcagttcataatarggttcgtcttcctatganaatctaatgccaccactgatctgacaggargcggagctcaggtggtamtgcaagcagtggggagtggctctgaatacagatgaagctttgctcattcaactgccactcacctactgctatgtagcccagttcctaacaggcttcagaatgggggatgggaaccctggttctatgagagcagaatccatgtatctttttgtaccactgaatcccaagcatttcgtgttggtacatttttctgtaagggaatccgtgtcttttgttggcttttaaaatggccacctaaaaaaatttaggaactactataagagtaatgttgtcaaaatcaaataccactgttgagattttgaatctgtgaaggataattgcattcttaatattttgtcttcccttccaaaatcatgctagttagtatttcttcatttattcaagatttcttttatgccaaatagtaaattttggtaattttctttatataggccataaacatgtattattaatttaatttcttggtattttttaatctactaatgggtctactaatgagctttctcaaaggaaggagagnagggaagaagaagggacattggaaaaggatatacagaatatttttatcagtctaggtaaaggttaacttgcctctggtaatctcatttttttaagttctttaagcatatagataattaagaaaataaattggctaggcactgtggctcatgcctgtaatcccatcactttgggaggctgaagtgggtggattgcctgaggtcaggatttcaagaccagcttgaccaatatggggaaaccccatctctactaaaaatacaaaagttagctgggcatggtggcatgcgcctgtagtcccagctattcaggaggctgagacaggagaattgcttgaacccggtagaattgcttgaacccgggaggcggaggttgcagtgagccgagatcatgccattgcactccagtctaggcaacagggcaaaactccatctccaaaaaaaaaaaaaaaaaactcga

SEQ ID NO: 2448 - DNA, 1352 bp, Homo sapiens
  SITE (1333): n equals a,t,g, or c
  SITE (1341): n equals a,t,g, or c
  SITE (1350): n equals a,t,g, or c
atcgacccacgcgtccgagatcctgcctcaataaataaataaataaataaaaataaagtaaatggaattacacaatatgtgcttttggtgactggcttttttcactttgcatgttttcaaggttcatccatttgtttggtgttttaaatcttatgtggttgagtttggtttcatgtcagtgtttatttgccttttgttttcaaagataagaccacttaaattattagattatttgaattctccttaagttataagtctggtcctgctatatcagttatctaagtatttagaaatggtagactaggggacctaggtttcttaaacttttctctcttttacttaggtgtgcaatatgaataaaatatcagtagatttgtattttagaaaatgggggatacaagattggggactttattgacacatttaattctttcatgtgtaaaattacttatgtgaaaatgtgattttcttgttttttccccagactaaaaagtttttgttaattattatgagtatttctatagttggctgtttttacctggcaagaatgcttttctgctcagatgaagagataaaggcattaggcctgggatggacatttctgagtgaattaatgttggattggtattttttttatgagtggaagagacaaactatcttacatccattggttttaaaacattttttaatttcagtatatatatgtagagaaaagtacacatgtcataagcctatacagctcaatgaattttaagaaactgaacacacatgggtaactagcacccaaatcaggatatataaactgttccttgcattccaaaagccttcttttgtgcttctttccagtcattatcctttctccccaaaaaggagtcaacaccctgatgtctaacagtatagaatagtttagttcatccatggatgcagtgagccaagatcacgccactgcactccagcctgggtgacagagtgagactctgtctcaaaaaacaaacaaacaaacaaaaaacaaaccgaaaatattagtctgtaaagattgatcttgagcctaaacttttagatgttttctatcctttgaacaaatgcttctgtatcttaagcttggaaggacactgggaaactaaacacttttaaaaggcacttttctttcaatagcccacttataaagtttgctttatctaccagtacaggggaaaaaaagaataaagttggttttattccatttaaagtagttttggtatttctttgctccataccaaagtcttcctcccccaaaataaacaagtgaattagaaccaaaaaaaatcaaaaaaaaaaaaaaagggsggccgcnctaagggncccagcttncg

SEQ ID NO: 2449 - DNA, 773 bp, Homo sapiens
ccacgcgtccgggaaagtttatgtaatatatcttcagttacacacaaagaagcagagctgagatttgaactcagatgcatgaattcttaatataagttccatgattaagtttcagtagctatttgggaactcagtcatggggaaaccaccaactcatgaagcaatccattctgttgtaaaatggctactaattgttacaaaattgttacgtttgagtcagatctgtttccttttgtttcctttatttctgtttctaacttctgggacccgactgggaataaggttgatcttcttctgtaaaacagctgaattttttatattcaacatacattttataatcagaaaaataatatatactatttcttaaaaattagttttggggctgatgacaaacatatttataagtcacatatttatttctgaaggttttaagtgagtaaacctggactttaaaaaatgttgggccatgtgtggtggctcatgcctgtaatcctaacacttggggagggtgaggagggaggattgcattaatccaggagtttgagaccagcctgggcaacacagtgtgacaccttgtctctacaaaaaactaaataatcagctgggagtggtggtgcatgcctgtagcccccgctattaaggaagctgggatgggaggattgattgagcccgtgaggttgaggctacagtgagctgtgatcgtgccactgcactctagtctgagcgacacagagagaccctatttccaaaaaagagagaaaaaaaaaaaaaaa

SEQ ID NO: 2450 - DNA, 1667 bp, Homo sapiens
  SITE (1659): n equals a,t,g, or c
  SITE (1664): n equals a,t,g, or c
tgggtggtgctggacctcgggcggggccgggcctcgtggcgggaggaggcagggcagggcctctgggacggggctggacggcttgttgacggaaacgagcccttgacgctgtggcccggaagtggagcggctgtcgcagtgcggctccggcagtggcagcggaggcctgtgtttgcggccttcggcaagcgactgagatggcgagcgcaactgcacctgcagccgcagtccccaccctggcttcgcctttggagcagctccggcacttggcggaggagctgcggttgctcctgcctcgagtgcgggtcggcgaagccaggagaccaccgaggagtttaatcgagagatgttctggagaagactcaatgaggcagctgtgactgtgtcaagggaagccacgactctgaccatagtcttctctcagcttccactgccgtctccacaggaaacccagaagttctgtgaacaagtccatgctgccatcaaggcatttattgcagtgtactatttgcttccaaaggatcaggggatcaccctgagaaagctggtacggggcgccaccctggacatcgtggatggcatggctcagctcatggaagtactttccgtcactccaactcagagccctgagaacaatgaccttatttcctacaacagtgtctgggttgcgtgccagcagatgcctcagataccaagagataacaaagctgcagctcttttgatgctgaccaagaatgtggattttgtgaaggatgcacatgaagaaatggagcaggctgtggaagaatgtgacccttactctggcctcttgaatgatactgaggagaacaactctgacaaccacaatcatgaggatgatgtgttggggtttcccagcaatcaggacttgtattggtcagaggacgatcaagagctcataatcccatgccttgcgctggtgagagcatccaaagcctgcctgaagaaaattcggatgttagtggcagagaatgggaagaaggatcaggtggcacagctggatgacattgtggatatttctgatgaaatcagccctagtgtggatgatttggctctgagcatatatccacctatgtgtcacctgaccgtgcgaatcaattctgcgaaacttgtatctgttttaaagaaggcacttgaaattacaaaagcaagtcatgtgacccctcagccagaagatagttggatccctttacttattaatgccattgatcattgcatgaatagaatcaaggagctcactcagagtgaacttgaattatgacttttcaggctcatttgtactctcttcccctctcatcgtcatggtcaggctctgatacctgcttttaaaatggagctagaatgcttgctggattgaaagggagtgcctatctatatttagcaagagacactattaccaaagattgttggttaggccagattgacacctatttataaaccatatgcgtatatttttctgtgctatatatgaaaaataattgcatgatttctcattcctgagtcatttctcagagattcctaggaaagctgccttattctctttttgcagtaaagtatgttgttttcattgtaaagatgttgatggtctcaataaaatgctaacttgccagtgattaaaaaaaaaaaaaaagggcggccgcnctagnggg

SEQ ID NO: 2451 - DNA, 1241 bp, Homo sapiens
tcgacccacgcgtccggctatatgtatcccatacatcatgtgatataccttaaatatacacaatcaaatgtacttttagaagagcaatagaaaaatgtatactaaacaaacttaattcaaccaacccctgtactatgccatgccataactacctcatagtgtggttgttagatcagataatcttctatagaatttttagtactgtccyccatgcatattaagtacccaataaatgtamctattatgtttcaagcaccttgtttcctaatgtacttagtgtttttcccccattttgagcggatatagtaaggactatctatgtcttttgcaccattgtatgtacttgtctcgtaggttgcttgatttttcagtagcttccatatttatacatttaatcatttttcttatgctttctgttttcatttaattcactggtatggctgctgttatctcttattttgaatctggtttttgcttatgataatatgtgaattattttatgcggaagtaatgtcttttataatgtttctgaactaaatggcattatttttgttttctcctggacttttatgataaaagtatttagaattcttgtttcataaattattatccatatagtgaatacatatttcctccatcatacatcagttgtcttttagcatgagagctttttatagagtaggtgaggatgtaattatttataaaataatactatatatctggttagagactctttgatcctttgcattgtatgacagtgtgttgtacattggttaaacagcagttagggacttctcaaaagactattgtgttctgctctgcctaagatgtttcatttagcttttggggaattcccattgccttttgtcagaccaaagaaaaggattaatatcagtctttaattttaaaaataattaaatcattttaatcaattaaaatgattgwggctcccacctgtaatccctaccctttgggaagctgaggtaggaggattgcttgagcccaggagttcaagaccagcctgggcagcaaagtgagaccctgtgtctaacacacacacacacacacacacacacacacacacaaattaactgggcgtggtacctgtggtcctacgtgctcaggaggctgaggcaggaggatggcttgagcccaggaggtcaaggctgcagtgagccgttattgcactactgcactccagcctgggtgacagaatgagaccctgtcttcaaaaaaaaaaa

SEQ ID NO: 2452 - DNA, 1054 bp, Homo sapiens
gaattcggcacgagccccaccactgtccactgaccagaaacctggctgcagggccgaggactggtttggggactggagggctggcagcagcctgtcaccgtgcgaccgtgaccacctggcatgggcttcgtggcctgctctcaggaagtgggtcaagccctgggaaccctcatccatgagagctcgatcccgtatgaagggtgctgccgcccgtgccatctggcccgggggtgactttttgaactgtttattatatggtggatgatgatttcatctcacgtgctggacgctgttctgttcagtgtgctctttggactacattagtcccctgtggagcagcagggctggagatctctgcagtcccttccccgcccgccctgccagaaggccaaggaggcacgtggagggcctccttcctgcaattcttccctctccagagtcagggagggctgcccagccctggcctcacagccgtcccagatgttaggtgagccactgagctctgtgttgaccttgaggggcctggctgggggcccccaggctccatgccttcttgggagggtggccgccaacgcctttcctgtgttatggcaacagggagtgggcatctcatctgcctgtggtcagctctcagacggcagggagcggagctgacgttggctgtgcttggtcaccgctgccatgccgcagaggatgcgcctagctgggctggggccacacgactattatgttggccttgaacggggactgcagagccctcagtttgtctcccttgttcctctgtggctgaggtgggagggggagggtggggtaggtcccccagcaagaaagagggacaggagcaccccaggcaggaccaaggagtcgggaggcccctgccttctgtcctccatggtgagggcacagatgtctccccagagcccagcgctggcagaatggattctgctcctggctttgcttctgcggcttcggtggagacagttatggaataaaatgttccttgcacccaaaaaaaaaaaaaaaaaaaaaaaaaaaaaaaaaaaaaaaaaaaaaa

SEQ ID NO: 2453 - DNA, 1560 bp, Homo sapiens
acccacgcgtccgagatattcgtctaattccttataggcacttaggaacaaatactttaaaagatgcatttttagtaataatctgttagtctaagaaaagtggtaacaggaaaagccaataatttattacgctttgttttccatgtcatcttggttactagtttatattggttggcttctttcctccctgtagggaaaagtaatagaacctctgaaagattttcataaagatgaagtgagaattttgggcagagaacttggacttccagaagagttagtttccaggcatccatttccaggtaaaaattagaactgaattttgtttgattcatctttagaccttcatgttgaagaaaaatcaattcagacaattctgaaataatctgtcatctcagggaatatgtaacatgagagaaaggaaaggatggttagggaataattgaaatcttttgagtatctactgtatttacttcattttattaaatactcattttccattgtatctgcatttaagtgttacattatccttgggagtctggcatctgatgttgccatcagatgagaaaaccaagacataaagatattttaataatattgccacacagtcctagtagtagagctaggatttgttatattatttgtaccataccgcagtgcgttccatggaagatgtgaggatttaaatttagctctttaaaatccttgtcctatgtctgacttgtttgaatggatgaaccacttattctgtgcagagaattcttggcacaatgtaactaattcctgaacaaataatacttcatttgctgtcatatagaaaaaaattagaggtgatacttgtttaaagttaggactgcaagtcttaacctgtttttgttactagtycttgagaggttgggcaagtctgtacatcaggttctagctcactgtaatagtgattaggggatgatttgggagaatgacstaattgaattgaaaagcataataatagccaacatttcttaagtactttctatgtgctaggcactctgctaaatacattttattgtcttatttaatcttcacagtggaaactactattatcctgttttacagatgaagaaacttagggacagcgactaatttgccaaaagttatgcagattgaaaggagtggagccagaatgatatccccaataatttttatctcagagtttatactcttaatgatcatattggctccataaacagctttacacatgtataacctatgtggtgattagcacttgttctcaaatcaagtaatcagattgagatctttagtccctaacctgcatgccggcgaagaatggtctgtggaccggtgtggtggctcatgcctgtaaccctgagtctactaaaaatagaaaaattagccaggtgtggtggcatgtgcctgtaattctagctactcgggaggctgaggcaggagaatcgcttgaacccgggaggcagaggttgcagtgagacaagattacaccacagcactccaacctgggcaacagagcatgactccatcttaaaaaaaaaaaaaaagggcggccgc

SEQ ID NO: 2454 - DNA, 1390 bp, Homo sapiens
tcgacccacgcgtccgaaatgctatctggacatcaatgcccttcaggagctgtatcagaagaagctaactgaagagtccttgacttctgatgctgcaaatgataatcacattgtggctgaaggggtgtctgaggagtctctgaacagactgaaaggtgctgttagctttggatatggcctttttcacctttgcatatccatggtgcccccaaacctgctcaaaatcatcaacctgctgggttttcctggagaccgcctacaggggctttcttcactgatgtatgcaagcgaaagtaaggacatgaaggcccctttagctacattagctctgctctggtatcatactgtagtccgcccgttttttgccttggatggcagtgataacaaggcaggcctggatgaagctaaggaaattctccttaaaaaagaagctgcttatccaaattcttccctctttatgtttttcaagggacggatacaacgactagagtgtcaaatcaacagtgccttgacatctttccacactgctttggaacttgcagtagaccagagagaaattcaacatgtctgtctgtatgaaattggttggtgcagcatgatagagctcaatttcaaggatgcatttgattcctttgagaggctaaaaaatgagtccaggtggtcccagtgctattatgcctacttgactgcagtttgtcagggagccactggtgatgtggatggggcacagattgtctttaaagaagttcagaaactcttcaaaaggaaaaacaatcagattgaacagttctcggtgaaaaaggcagagcgatttcggaagcaaaccccaaccaaagcgctctgtgtgttggcgtctattgaagtgttgtacttgtrraaagctcttccaaactgttccttccccaacctgcagaggatgagtcaagcttgccatgaagtggatgactcatctgttgttggattaaagtatttgcttcttggtgccatacacaaatgtctaggaaactcagaagatgctgttcagtacttccagcgagctgttaaagatgaattgtgtcgtcagaataatttatatgttcagccgtatgcctgttatgaacttggctgtcttctattagacaaaccagagactgtaggaagaggcagagctctacttcttcaagcaaaggaggatttctctggctacgactttgaaaacagattgcatgtccgcatccatgctgctctggcctctctgagggaattggttcctcagtgacagacccggaacacccgctccgtccctccccacccagggtccgcactttaaaataaaagcagaggacaaaaaaaaaaaaaaaaaaaaaaaaaaaaaaaaaaaaaaaaaaaaaaaaaaaaaaagggcggccgc

SEQ ID NO: 2455 - DNA, 1472 bp, Homo sapiens
  SITE (55): n equals a,t,g, or c
  SITE (961): n equals a,t,g, or c
  SITE (973): n equals a,t,g, or c
  SITE (1464): n equals a,t,g, or c
ggtcgacccacgcgtccgcctaaatctcccaaagtgctgggattacaggcgtgancactgcacccagtctggtttgactttcagtgacacttttacttcttttaagtgcataaagtaaaaaatactaagataaaggacgcaaattaattcctaattaacatatttatagtttggaaaaagtgctagaggtgcttgccagttcaatttaattccatgcccagaatgtggtttctgtttattgaaatgttcttagttttggtcatctgttactacttgctgttgtcttcacggggccctgactggccttggcataactaggctgctaggggaatagttcttagagagtcattttatgtattggatttwattctgatttgttttctctctgaaagctggttgttatttgtttttttkwkkkttttttcgatcttaggtggtggttgacacagcacagattgagaataaagaagcctatgccccccagatcagtttagaaggctctagaatcgtggttcaagtcccatccacatggtaacgtgcctcttactttcaccggagcctaagctctgactgacgtttgcacatctttgaaatgatggccttgttttgaacaatgcccatgctagctgacgcaacaagtcttgctgcatgtgcaggtttatgggcagcagtggtatgttagtggcatgtgtcatgattattggtctgtgatgaggaagccaagaagtctgaaaaatggtctcattgaccataatgtaactaaaatgttatatactcttggatcataatgagcagtattatctttgttactgagtctacagcatttaaacatagtatatcattttctckaagtcacccagtgtkcactaaagcccastaaagaacatagaattccttctcctctgttccaactacaatcctgatgatctygagctcatgttgtgacacacccagtgtcttnacaaatcttggnacagtcatttttagatattatatttgtamcacttataatagataaaagattattcttaatttatttttttttaaaaaaagctcctacaaatcagaagaaaatgggcaagggacatgaacagctaagtcagaaaagaagacatatgatcaacaaatagattwagraaatgtaatggccmagtgcggtgactcacacctgtaatcctagcactttgggaggccaaggtgggcagatcgcctgaggtcagaggtttgagaccagcctgcccaatgtggtgaaaccccatctctactaaagatacaaaaactatccaggcatggtggtgggtgcctgtaattccagctaatcaggaagctgaggcacaagaattgcttgaacccaggaggcggaggttgcagagagctgagattgcactattgcactccagcctgggcaatagagcaaaactatctcaaaaaaaaaaaaaaaaaaaaaaagggcggccgctcttngagaccca

SEQ ID NO: 2456 - DNA, 893 bp, Homo sapiens
  SITE (859): n equals a,t,g, or c
  SITE (875): n equals a,t,g, or c
  SITE (884): n equals a,t,g, or c
gaatagaagcaagggacataatgaaagagtcaaaaagggaaaagttttaaaacaatacttggcttactctgagcatagtttcccctttccttaattaacgcttgctcatatattactcagaaagtccaagtgtaggcttcagaggagaggagccatagatagctttcatcagattcttgatgaaacccacagtacaaatgttaagaaacacagctctgtggtatcatctgttgactgatctgctgctaatctatttaataggaagagttgtttctatatccttctacttttaccattaaagaaaaagtaatcaactagtcactgttcattttattttcaaatttatttttgcttaaatcattgcagaatcagaaaaaaatttttattatattgtttctgaaatgttaacatttaggtgaaatgcttaatcaggttgagtatcacttacctgaaatgcttgggaccagaaatatttgggattttttcagattttggaatatttgcatttatatgcttagtatttgaacatcccaaatctgaaaatccaaaatgttccagtgagcatttccctttggtgtaacatgaacactgaaaaagtttcagtttttgtagcatttctgattttttgtgttttacgtatgtatatgtatatctgtatcttgtttttttgtttggttgtttgagacagaatcttgctctgtcacccaggctggagtgcagtgagctgagatcaggtcactgcactctagcctgggcgacagagcaagatgcaagactctgtccccctccaaaaaaaaaaaaaaaaaaaaaaaaaaaaaaaaaaaaaaaaaaaaaaaaaaaaaaaaaaaagggcggccgntttaaaggatccaagnttacgtacncgtgcatgc

SEQ ID NO: 2457 - DNA, 1066 bp, Homo sapiens
cgcgtccgattttttgtattttttctagggacggttttcgccatgttgggcaggttggtcttgaactcttgaactcctgacctcaggtgatccacccgtctcagcctcccaaagtgctgggattacagcatgagccactggccgacttttgcttcctttacagattactttgcagattgacatccaggctatacccttgtttatgtgagcgaggctgtgttgtaggcactggcactatacttacacagaagttggcaacttctcattgccttgcacaaatgtggataatagtaataacaaactaatgttgaatgattagaattttaatcagttctttaaaagtagccattattttggcatgttaggtagggagagattcaaattatttatgttatcttcccaacttgagaatggcattattagatcaagccattagacttatagattgcggaagatttagatgtacttcttaattatgaaaattacatttaccttactcaaataaccccatatatacctaaaagttttaataaactaaagcatgaccacatgactcaatcagctgtccgtaataacctgtggtataggtaggacttagttgggcaaagggtgagatgtggccatcttcacgggctcataagagataaccaaggtcccttcaggtcggccagcctcatcatgcctcagctctttctaatcctgcttattagtaaggtggatgtttattcatttatttatttggttagttaaataacaggccgcaatttactgtgttacttaaattttacttaagtaaaatttaagaagaagaagaagatgatgactgtaaaaacaaaggtgtgaatatatttagctatacatgagataggatatcaaatacataaatagttcaatttgcagttgcacagtgccatttcacccaggttaaacaataggaagactcgatgcatacgtgtcatctgtaaatgctctcatgtgaaagaaattgtgaagtaaaataaagtatcttgagtagaaatttttctacattttctcaaaataaaaaaaaaaaaaaaaaaaaaaaaaa

SEQ ID NO: 2458 - DNA, 1436 bp, Homo sapiens
  SITE (449): n equals a,t,g, or c
tcgacccacgcgtccggcctcagccgaagccctcagccctgcggtccggggcaggagacaagcccagaggggctgggtgcagcagcctggcactgccatcggggcctccacctgacgccctcacaccagcccatgtctttcagctgtgcatgcgcaggctctgcctctgtcttcttcctgttctgtgtggcccagccccttcctggaaccaggcagccctggcaggagtgagggccagctgcagggaaagtgaagggggcaacacctgccaggctgtgggtctcacgaggctcgggggagttataagaggccccctctctcagggaactcctcccaggcttggggaggaggcatcctggacccagccacgccccacagatctgaccgaagcaggggttcttggtcttgcttggaacccagattcagccccctttgggaatctaatcaanggtgtggaccctttcccagagaaaatggtgtgttcactcctgagggtccatgggcccttgaagctgctcatggctcccctgctgcaggattcccctgggtgcccgtcaaactacagcttccctggggggcctccaccccatacttacccaccagcttcttaagagttcgagctcggacccttatagtagtaaacaggctccccagagcctggtggcctttctggggccacccggcagcctgcatgggacacccatggccttgtctcctccggccccagctctcttttccagctcagccaaggctgatggcggaaaagagcagctgacgtacgagtctggggaagacgaggaggatgaggaggaggaggaagaggaggaggaggacttcaagccatccgacggcagtgaaaacgaaatggagacagagattctggactacgtgtgacagggcccaaggctgggcctccctgacccggccagactggtgtctggcctaatgagggagccggggctccccattgccacccacagtgcccggaatggccctaggaggccctctgaggagagctagagtcccagcaaagggtgcagctgaccctagcactggctgtgacatgctgcttggtgctgcctctggtcctgaggggttagggacatccccaaagggtataccctggctctgccacccatgaaccagcccagcatccagccagtgagtgggcacccaatgcctctcaggatgagaccagtaaatgccggaggtggagctgggcagctgtggagccccaggccacaggccagtctcgcttggctctcatgactgtggtggtggagatagcgtggggagcctcgcccatggtctcacgtggcaagaagtgcctttagctctggatcccaaccgtttggcacagctttggccacagccaggcccctctggaattgtccttattaaaccagtttcccgagaaaaaaaaaaaaaaaaagggc

SEQ ID NO: 2459 - DNA, 684 bp, Homo sapiens
ggtgctcggtcaagatcatgataaaccgctggaaagggagaagaagttaaggtagtactacagacagaatcttatactttggaaaaaaattcatgacaaagaaaccccaaagtattgcctgttccaccctgtctttgtggtgtgtgtgcctagcttccattattcatgaagtcaacctagaagggcagactggtaataacatgagttggtacattcttcctggcaatacataaagacctttaatgtcttaaattacttatcctagtaatattacttcctggaatctattctaacgartaatcagaaattttaacaggaatctatgcattaaaatgttcatggaaggaaaatgatcagcaatgaggaataattaaacgagacatatataaaaaaagcaacccacaattttttttcaagcatggagaaatgctcatgcgagaatactaagtaaacagcagagaaactcagacatacatggttgcctctgagtagtgaacttttatttccttcctaaatttttgtatttttaatctcttctataaatgaatgtgtattccttttacaatgaaaaataacatttttaaaaactaaaactaaagaaatgtattgtttccttttatgtataaatgtcccaagccaagatacctgaaatataacgaggaaaagattcttttgttcactctg

SEQ ID NO: 2460 - DNA, 1851 bp, Homo sapiens
  SITE (1171): n equals a,t,g, or c
tcgacccacgcgtccgcatttgtccatatctataagactttacttctgggttctctattctgttctgtttatttatatgtctgtctttaggacagtactacacagttttgattcccctgttgtaggggaatcttgttttattgtgcttcactttattacgctttgcagataatgcattgtttacaaatggaaggtttgtggtaaccttgcatcaagcaagtctattggcaccatttttccaatagcatatgctcactttgtgttcttatgccataatttggtaattcttgcaatgttttcagtttttttcctcctcctcctccttttccttcsttttatcctcctcctcctccttcctccttcctcctccgtcctcctcctcttcctcttcctcttcctcctcctcttctccttctcctccttcttttccttcttcttctttctgggacagggtctcattcttctgcccaggttggagtataccggcacgatcatagcccgctgtagactcaaactcctgacctcaagcaatcctcccttcttggcctcccaaagtgctgggattagaggcatgagccactgcacctggccagtttttcattattcttatatatgttatgggaatgtgactagtgatctttgaagatactattgtaactgtttwgggggcaccataagccatacccatgtaagacttgaactgtgtattccagtgaaaggaagagctgcatgtctgtcactttaaattaaaagctagaaatgattaagtgctgtgaggaaagcatgtcaaaagctgggtgagttaggtcaaaagttaggcctcttgtaccaagtagttagccagcttgtgagtgtgaaggaaaatttcttgsaggaaactaaatgtgctccttcagtgaacagtcgaatgttaagaaagcgacacagggttattgctaatatggagaaagtttagtggtctgggtagatcaaaccagccacaattttcccttgagccaaagcctaatccagagcaaggccctaaatctcttcaattctttgaaggctgagaggaatgaggaaactgcagamsaaatgtktsaagctagcakargttgtttcatgatatttgaagaaagaagctaccattataatatgaaagtgcaaggtgaagcagcaagtgctgacgtanaagctgcagcaagttatccagaagctctagctaagatcattgagaaaggtggctacactaaacaacagattttcaatgtaaaccaaacagctttctaatggtgaagataccatccaggatgaggagtcaatgcctagcttcaaatcttcaaaggacaggatggctttcttgttaagggccactgctcatttaccattctgaaaatcctaggttccttaagaattatgctaattttactctgcttgtagtgtagaagtggaagagcaaagcttggatgacagcacatctgtttactgcatggcttactgaatagtttaaacccactgttgagccctactgctcagaaaaaaaagactcctttaaaaatattactgctctggctcacgcctgtaatcccagcactttgggargccgaggcgggtggatcatgaggtcaggagatcgagaccatcctggctaacaaggtgaaaccccatctctactaaaaatacaaaaaattagccgggcgcggtggcgggcgcctgtagtcccagctactcgggaggctgaggcaggagaatggcgtgaacctgggaagcggagctttcagtgagccgagattgcgccactgcggtccgcagtccggcctgggcgacagagcaagactccgtctcaaaaaaaaaaaaaaaaaaagggcggcc

SEQ ID NO: 2461 - DNA, 1693 bp, Homo sapiens
  SITE (997): n equals a,t,g, or c
ctcgtgccgcagcagtgttcaatttgctcaccattggtagtgtttgctaaaattgtatttttttaagctaagtaacatgtactgggttgagaacctttttcccccctctccctctcagaaaattgctttataaaattgctttataatttgattttcttactgaaacgcatggtggtgtctaggtggggaactgactgataacccttggcagcaatcaaagtgccagtggctcctcgatgtttacatttttttctattttgttcagtcttttgttttaaatgattctaaagagattaaagaaaacagagttttaaatgtcctrtttacatgttaaaggatttggggaaattgggtatgtatgtgaatgggtgtacatgtaggaacctgtagttcagcaaagctgcgctgggcacagcatgcttgtacttgattgacaaaatcgtgtttgccagtccactttctatttttcctttaagtgatgctgatcactcaaataatgcttttaagctattgtttgtttttatttgacatgttaagccgcagcactttcttcttcatctttccatttactgatatttgggggaacaggctatcaaaggttccggcttgaagggaactgtcactaccccctctaggaagttattttatgtagcatgtttgcatatacgcattgtgtggcatgtgcatagaggcttgttttacacctatctgctcattttgttgtgttagcttttctggtttatktcatagtttgttcttgctatttattaagaacagaatatcaaaagattatgaatagcctcagctctagaatgcttaccactgttaaaacaacaaaaagactaaacctctaatttcatgcaaatctttgttagcttattctaagaaatttattaagtaaaacaaagaaaaaacagaagtgggagatagttattttgtgcgtaattttctttaaatcattttgaatgatgtgaaggcattcagtttgctgtatttnttttaatcacttcatacaaggaaaacttcgacatttacatttctasatgtagtaacagtctactttgatatatgagtatttaaactaaggcattaagagatattagatatttcttaatgttttcatagtgctcaataggtgtagtagcaatgatattacctctgaaaccaaatactcttttatccttgattccactatgggaccttataactagtccatgaaaccaagctcagaaaagctttaactcttatatttgtgtatatgtatgctgcttctgaaaatataatttttctaagttgttgtaatgactttaatttgtaatcagctaaggcttaagatttcatttgtttctaagtttctgtttttcatcccttcttttttcttttatatttagttcagacctagagccagtagaagctctcacagtgagttcaatttgttagtgaaacattgtactgcatcaccagtttttcttaccttctgttgacagctgaatatttctgttactcagtacttgcaaaaacagtaactaaaatgcactatgctgagtggaaagcaccgtcataacaattgattgccatagcaagttccaaagtgaatttcagccttgcttcacatttgtatcaataaatatgcacattttttaaaactttctaacaaaaaaaaaaaaaaaaaaaaaaaaaaaaaagggcggcc

SEQ ID NO: 2462 - DNA, 1298 bp, Homo sapiens
  SITE (319): n equals a,t,g, or c
gcctcatccctttttttcagtatgtgcaacgtatagagaaacagtttcttttgtatgcctactggataggcttaggaattttgtcttctgttgggcttggaacagggctgcacacctttctgctttatctggtaagaataatttattttaataagcaaaaatgatatttcctatctttttattggtgcttttatgtcagaagtaaaaattctaagatttgttttaattacctttgtgttttgtaagcattctgatcctccaatcagtgctttaagtttgacttagagttctgtttkgttttcctttagggttagtattnaaaaagcaaagagaaaaccccagttaagcaaataaggttgtttatttaaattagtttagcgtggaaggtttttcttttctttctagatttaattgcttaagcaattgttattttaataaatgaagtccatttaaatatgcaaaattccatgtgagaaatgtcttcccttacatcctctaacatcatttacatacttggatatttattttggtattcttgttgaatgtaattgatggagtattaacatgtagaactaaatgctttcttgagtcctttgaaccaaagtataaaaagtgccccttctgggctgggcgtggtggctcacgcctgtaatcccagcactttgggaggccaaggcgggcagatcatgaggtctggagatcgagaccatcctggctaacatggtgaaaccctgtctctactaaaaatacaaaaaattagccggacgtggtggcgggtgcctgtagtcccacatactcaggatgctgaggcaggagaatggcctgaacccgggaggcggagcttccagtgagtggagatggcgccactgcactccarcctgggcgacagagcaagactcygtctcaaaaaaaaaaaaaaaaaaaaagtgccccttctgaaaaatattcttttactagtggaaataagagagaatggccaggcgcagtggctcacacctgtaatcccagcactttgggaggccgaggcargcggatcacaaggycaggagatcgagaccatcctggctaacatggkgaaaccccgtctctactaaatatacaaaaaaaatcagccgarcttagtggcaggcgcctgtagtcccagctactcgggaggctgaggcaggagagtgatgtgaacctgggaggtggagcttgcagtgagccgagatcacgccactgcactccaacctgggcgacagagcaagactccgtctcaaaaaaaaaaaaaaaaaaaaaaaaaaaaaaaaaagggcggc

SEQ ID NO: 2463 - DNA, 504 bp, Homo sapiens
ggcacgagctcgtgccgaattcggcacgagatgaactggaggaagttactacagtggaagggttcttaataacaaggtctacctagcatgaagtatttaacattctcccatcccttaaaaaatatacatttttataaaatgaaaaccataataaatgttttgaatattaaaaaaaataataacctacagaggaaaattaatggagacagctatttgccttgtactttttccacaattgttgctgctagttgtacacatctctagttcagctcttgcccacgggacactcatcaattaggttttatttttatttctttcctctacccccagaaacaagcctgttaattttttttccttctcctctggcgactgtgtgatgaatcctttcttgcgtgatcaggttgcggatagacttgtaagggtgtttgctgcatacagtgtaagcattgtgaccgccaataaacttcaatggtttctactgaaaaaaaaaaaaaaaaaaaaaaa

SEQ ID NO: 2464 - DNA, 761 bp, Homo sapiens
ctgcaggaattcggcacgagtcccactacatgcagtggcccagggcagaggggctgatacatggcctttttcagggggtgctcctcgcggggtggacttgggagtgtgcagtgggacagggggctgcaggggtcctgccaccaccgagcaccaacttggccccctggggtcctgcctcatgaatgaggccttccccagggctggcctgactgtgctgggggctgggttaacgttttctcagggaaccacaatgcacgaaagaggaactggggttgctaaccaggatgctgggaacaaaggcctcttgaagcccagccacagcccagctgagcatgaggcccagcccatagacggcacaggccacctggcccattccctgggcattccctgctttgcattgctgcttctcttcaccccgtggaggctatgtcaccctaactatcctggaatgtgttgagagggattctgaatgatcaatatagcttggtgagacagtgccgagatagatagccatgtctgccttgggcacgggagagggaagtggcagcatgcatgctgtttcttggccttttctgttagaatacttggtgctttccaacacactttcacatgtgttgtaacttgtttgatccacccccttccctgaaaatcctgggaggttttattgctgccatttaacacagagggcaatagaggttctgaaaggtctgtgtctcgtcaaaacaagtaaacggtggaactacgactaaaaaaaaaaaaaa

SEQ ID NO: 2465 - DNA, 1924 bp, Homo sapiens
ggcacgaggcaaacaaaaatctccagctgcccacgttgctttggtcatgacccttccttcagatcacttctgcctttatttttgctgtttaggggatgtgttatcacagaaacttggaatgcagagaaatgttatcacagaaacttggaatgcagaaaaatttttgctttttaggggaggtgttatcacagaaacttggaatacaaagacctccccccaccgcagccctgccccaccccacctaccccctgctggatttagcactgcacttccattttagcagtgatttccttcctttttgccctcgcctgccttccagtaacacataatttccttctatttccagagctgtcgatgatgaaatcgaggccaatcttgaagagttcgacatcagcgaggatgacattgatgatggattcaggagactgtttgcccagttggcaggagaggatgcggagatctctgcctttgagctgcagaccaccctgagaagggttctagcaaagcgccaagatatccagtcagatggcttcagcatcgagacatgcaaaattatggttgacatgctagattcggacgggagtggcaagctggggctgaaggagttctacattctctggacgaagattcaaaaataccaaaaaatttaccgagaaatcgacgttgacaggtctggtaccatgaattcctacgaaatgcggaaggcattagaagaagcaggtttcaagatgccctgtcaactccaccaagtcatcgttgctcggtttgcagatgaccagctcatcatcgattttgataattttgttcggtgtttggttcggctggaaacgctattcaagatatttaagcagctggatcccgagaatactggaacaatagagctcgaccttatctcttggctctgtttctcagtactttgaagttataactaatctgcctgaagacttctcatgatggaaaatcagccaaggactaagcttccatagaaatacactttgtatctggacctcaaaattatgggaacatttacttaaacggatgatcatagctgaaaataatgatactgtcaatttgagatagcagaagtttcacacatcaaagtaaaagatttgcatatcattatactaaatgcaaatgagtcgcttaacccttgacaaggtcaaagaaagctttaaatctgtaaatagtatacactttttacttttacacactttcctgttcatagcaatattaaatcaggaaaaaaaaatgcagggaggtatttaacagctgagcaaaaacattgagtcactctcaaaggacacgaggcccttggcagggaatatttaaagcaacttcaagtttaaaatgcagctgttgattctaccaaacaacagtccaagattaccatttcccatgagccaactgggaaacatggtatatcatgaagtaatcttgtcaaggcatctggagagtccaggagagaagactcacctctgtcgcttgggttaaacaagagacaggttttgtagaatattgattggtaatagtaaatcgttctccttacaatcaagttcttgaccctattcggccttatacatctggtcttacaaagaccaaagggatcctgcgcttgatcaactgaaccagtatgccaaaaccaggcatccaatttgtaaaccaattatgataaaggacaaaataagctgtttgccacctcaaaactttatgaacttcaccaccactagtgtctgtccatggagttagaggggacatcacttagaagttcttatagaaaggacacaagtttgtttcctggctttaccttgggaaaatgctagcaacattatagaaattttgccttgttgccttatcttcttccaaatgtactgttaaataaaaataaagggttaccccatgcaatcacaaaaaaaaaaaaaaaaaa

SEQ ID NO: 2466 - DNA, 1600 bp, Homo sapiens
  SITE (464): n equals a,t,g, or c
gggtggacttctcacatctcaggctacatttcccatgctcctgggcgtctttctaacagggttgttcctcccaatcttgatggcaatctttttgctgaagtgcaactcattttaaacttcaattaaattgcgtgaaactgactgttggccctgtggattatcggcacccttgtgttagagcccctgatgagaaatgtgtatttttattgcatatttaggccatttgaaaaatggttattacttacccatataatacaaagaataggtttcttctaagaaattcaaagcacactgcaaattaatcttaattgtttggcatttattcattccctgagtcattcatctattcggtaatgatttattgaatacctcctgtgccctggacactctgttaagttaaaaatagaaaagtmcatctctgccctcaacctgatagttgagatgaaatgatgtaatcgtgtatncattgagctagagtgcyctgtggtatgttctttggtatgcagtgtcagtaattattaataacagtaatgactaacatgtattgagtgcttactttatgccagatgttatgacagacccatttacttataactcagttgatccttcagacaatcaaccacatgagctgtcattacttgattatccccattttacacatggggaaacttaggcttagaaaggtatttcacccatcgtaactcagatgaaaagtggtagagttgggattcaaactcagacctttctggttatgaaacctctgttccagtccccaaattgctttgcttgaggccaaacatagagaattatttatagggtattctgttgcatttgtttttgtattttttctatgataataggtccagctgttaacaggtttttcattcagtataatattgccctgtaaaggaggttggctctgatgaatgccaaaaaacgtttctgttcaatgtataactcccactgtaggaggtaggtatagatgatactcttatggatggcccgtttgggtgtatgaatccataagctcatgacctcacatcagatggtttgaaataaaggtcaagcaataacaattcatatcttttcagtaaattttgaaattaatatggcagcagctgtttataagggactctgattttatttactaactaggatttacaagagaaataaaacttgattctcagccttcaaggaacttgtaatacagaaagttacttctagtgaaactgccaaactcagagctgaatgaaatggaaagtaagaaaagtgtatagaaagttaccagatggaggaccaggcatagtggctcaggccagtaatcccaacactttgggaggctgaggtgggtggatcacctgaggtcagtagttcgagaccagcctggccaacatggtgaaactccaactctactaaaaatacaaaaaccagccaggtgtggtggtgggcacctataatcccagctacttgggaagctgaggcaggagaaccgcgtggacccgggaggcagagattgcagtgagccgagatcgccccagtgcactccagcctgggcgacagagtgagactctgtctcaaaaaaaaaaaaaaaaaactcgag

SEQ ID NO: 2467 - DNA, 759 bp, Homo sapiens
ggcacgaggaggttgccccgactcctaatgccacatcaggctggctctctcccacagttagatctaatgggagagaaggtcaggttccaccaggggaggttctgagaccgaacttagtaagaagctattgtaaaggaaacagtaacaggagaaaactgtatggcaaatacatattttctcctgtatcaaagaaatttaaatcattttaagtcactctggacctgtttcttcatctgcaaaacagggaagttatagattagatgatccttatagttccctatatccttaaggttgtgtggttctatttttgaatttaaaagcagcttgcttttacagctcaaccccaggttctgagaggttcaaatagtatgttctggcaaaagggattcaggtaggtgaaattgctaaataaaagcatgctgatggtttgagtagttctccctgaccttgtgtgtgctttataagatcctttagtagtctctactctcgatgtacactggtggggacctcctcccagccagagagtggctccttgccagaccctcacactcatctgtgtcctatgttctggactcaggattgtgtgccagcttcagaggatgctctccatagccgtagaggtggacaggacccccacctgcagctccaataaaattgccgagacgatgtttgggtttgtgctggacattcctgagaggagccagaggtgagtcttgattttgttggggagagcagttatttaaaaaaaaaaaaaaaaaa

SEQ ID NO: 2468 - DNA, 776 bp, Homo sapiens
ggcacgagagaccattgagcctggcatatagtactcaataaatacttgttgaataaataaatgaatagcgactgtgatagggtaataataaaatagtaataatcactacctgtgttaagggcttactcttatgctagacactgttccaaatcctttccatgtttatgtttctccttttagtaggattgtgtttatttccattaaacatcaccaagaaaaacaaaaagaaatcctgtattaacatttgctgcatttctaaatgacattctggccaaaaactatagtttatcttgacgtagatgatttttgcaatcaagacaagttatcactcaaagaccactccaatttattgtccaatcctctggtaacaaatgtggtcagtaggagttcttatacctggcagatagacaagggcaatggttttcaaacttttatctcaagaactcattatacccataaaaactattgaagatcctgggctgggcgtggtggctcactcctgtaatcccagcactttgggaggctgaggcaggcggatcacttgaggtcaggagttcgagaccagcctggccaacatggtggaacctcgtctctactaaaaataaaaaattagttgggcatggtggcacatgcctgtaattccagctactcgggaggctgaggcaggagaatcgcttgaacctgggaggcagaggttgcaggagccgagatcgtgccactgcactccagcctgggcaacagagcaagaccctgtctcaaaaaaaaaaaaaaaaaaa

SEQ ID NO: 2469 - DNA, 1573 bp, Homo sapiens
ggcacgagagacaggggatccccctgatactttaggatggaagtaatagtcatggggatttattctgcaaggggaatgagatggtaagcctttggggttgaattatctaaaaacaagggagagggagtgtgctgctgtctctagaaagatgaaatgtgtgcttctcctgtttgttaaagctcttttgggggtcccagtgaaagcaagcataggtgaacgatcaggagcacatcagtgaggaacgcatgttcagaagcccccatgatgctccttttcttcctcttaagcctggctctgacagtggtacaacagcggtggtggccctgatacgagggaagcagttgattgtagccaacgcaggagactctcgctgtgtggtatctgaggctggcaaagctttagacatgtcctatgatcacaaaccagaggatgaagtagaactagcacgcatcaagaatgctggtggcaaggtcaccatggatgggcgagtcaacgggggcctcaacctctccagagccattggaatgtgatgagcagccaggaagttgtagatttcattcaatcaaagatcagccagcgtgatgaaaatggggagcttcggttattgtcatccattgtggaagaggtgagtaccagggtggagaagagagggtgtctggtctgcacagccagggttcactcttttaatctgagctaagtcggcaatctgggagcattatcagtaattgctgacagacgctaaaccccgactccaaagttccaccttctgtcatttccctgacttagccttatgccttatggactagcaggtgggccgttgtgtgatacctcttgcccattcctctcctaccaccctgactcagcaagccagccctcttgtgggactgtagattcctggcaaggtgttcaaaccctgtggctgagctacccccatccctttcttagctgctggatcagtgcctggcaccagacacttctggggatggtacagggtgtgacaacatgacctgcatcatcatttgcttcaagccccgaaacacagcagagctccagccagagagtggcaagcgaaaactagaggaggtgctctctactgagggggctgaagaaaatggcaacagcgacaagaagaagaaggccaagcgagactagcagtcatccagacccctgcccacctagactgttttctgagccctccggacctgagactgagttttgtctttttcctctagccttagcagtgggtatgaggtgtgcagggggagctgggtggcttcactccgcccattccaaagagggctctccctccacactgcagccgggagcctctgctgtcctccccagccgcctctgctcctcgggctcatcaccggttctgtgcctgtgctctgttgtgttggagggaaggactggcggttctggtttttactctgtgaactttatttaaggacattcttttttattggcggctccatggccctcggccgcttgcacccgctctctgttgtacactttcaatcaacactttttcagactaaaggccaaaacctaatcgtaaaaaaaaaaaaaaaaa

SEQ ID NO: 2470 - DNA, 1440 bp, Homo sapiens
tggacaagagccgggaacagacgcctccttacacaggacatcccaggactaatcaatgtggggaaaggtgctcacgtcattgcattagcatcacaacttcaagaaaatgctcgttaaaaccagagtgacttgcaccagcacccgccccagaacggccgaatgcccatcagtgctggcaagtctgaagcagtctggcctcacaccctgcgtgtaggagtatgcagctctttggcaatctcttctgttttgctttgtttgtttttaaccatcgaactgcagaagataatattttctgaggctcagcctgtacataccctctgacccagcagcctgcagccctcgttctacccaggagagctgagtgcatctgtccacaccgacagacgtgtccatagccactttggtcataatctcccaaaacaagaatcagcccagtgtccatctacaggggcatggatcagtggaggcctaatcgtacagggccccaaacagctgtgaaaacagacatagtactgctacctggaagaagcttacattttgttgagtgaaagaagccagacactaaaaagggcatactggccgggcacagtggctcacgcctgtaatcccagcactttgggaggccgaggcgggcggatcacgargtcaggagattgagaccatcctggctaacatggtgaaacaccgtctctactaaaaatacaaaaaattagccgggtgtggtggtgggcgcctgtagtcccagctactcgggaggctgaggcgggagaatggcatgaacccaggaggcggagcttgcagtgagccgagaccgcgccacggcactccagcctgggcgacagagcgggactccgtctaaaaaaaaaaaggagggcctactgtgtgcctccagttctgtgagggtcagaagctgatccacagtaatggctgccaacagtgcttaccttgagagagggaatagcaggaaagccacacgacgagccttctaggatactggggatattctctctatagatctggatgtgtatatgatgtgtacattcaccaaggtgtacacatgagatatgtacacttctctgtattccattacaccttggtttttgaaaagacagaaacagcatgctcagcttattaagaacctgaatattttcagacaaaaagtatgtctagtgttagtccacttttttttttttttagttttagactcacagagccytcttagggtcatatttagttgtatatcatctgacaaaagagggaatggctcacccagctgctacagtcagtcttgtagcctttgtaagatawwgaawgataaatcatacaataaattaaaactttcggctgggcacagtggctcacgcccataatccccagcactttgggaggccgaggcggaggatcacttgagcccaggagttcagatgagcctggccaaca

SEQ ID NO: 2471 - DNA, 1544 bp, Homo sapiens
  SITE (467): n equals a,t,g, or c
  SITE (471): n equals a,t,g, or c
ggcacgagcttgaataatattttgagtaagaaaaacagatgcatctgacagttctttttccacccactatctggggatgtctttttctggggctagtccatcttgtcctggataactaccctatcttgagaacccagtcttagtttcatgaaacatctttaatgaaaacagccttttgggatggtgctgctgcaaactgtggtctggctctcctcgcatgtgctctggctgccgcagaacagagctcaggccgctagggggcacctccacgtgccgcttttagcagtaccagccacctcaaagctttgccacagactgaatagctccttccgggggcctggatggcacccaggggatctgccgttgcttttttaatttatttttttacatttagctcattaatatctgttagatatttttatgtctgcattgaaatatgtaactttatttttcccccaaaggataantgtnccaacattatcagttagcttgtcttttccccaccatcttaaaatacgactcttatttttaaaattgcattttataaacatgtatgtttcagtaatttatattctgccccactgatctatattcccatcttagaattatacttttattttatttttaaaatttatttagagacaaggtcttggtatgtcactcaggctggaatgcagtggtgcaatgataattcactgcaaccttgaattcctgggctcaagcaatcctcccacctcagccttccaagtagctgggactacaggtgtgtgccactatgcctggctaatttttttatttttatttttttgtggagacgatgttttgctatgttgcccaggctggtctcaaactcctgggctcgagggatcttcctgtcttggctgcccaaagtgttgggattataggcatgagccacctcacccagccttagtattatactattttagttaacaaagctttacaatgaattttgatacctagaaagactgcacccaggtgaaataaacagccttgtttctcacacaaagcctgtttggtggtctcttcacatggacacgtgagacagatttcgctagggaagcaaataaccatggaggtgggcaagaaatatccatgattgtagagctttcaatcagccttttattcttgtaacaaatgaaaaacaaaggattatcagacatctgcggaaaacctctaacatagaagaaggagataaaatgaacaaacaataaaaagcaacttaaaaatggacaccatataaagaaaggaaaacagtttaaaaaaaaaaaaaacccaaaaccctattcttaagctacagagaaagcctggccaacatggtgaaaccctatctctactaaaaatacgaagtattttagccaggcatggtggcacatacctgtagtcccagctgctcaggaggctgaggcaggagaatcacctgcacccgggaggctgaggctgcagtgttctgagatcacaccacagcactccagcctgggtgacagagtgagaccttgtctcaaaaaaaaaaaaaaaaaaaaaaa

SEQ ID NO: 2472 - DNA, 1335 bp, Homo sapiens
tcgacccacgcgtccgaaagaaagaaagaaagaaatcatagacaacgggaataaaaactgcaagatacctaggaatgaatccaacaaatgcactttcttcacagatcaaagcataaactctaattgaagactataaaaggcacatgcagtgttcatggcaccatagccatggatgaaaagactcatcattgtggagattggcagttctcaaattaatctgtggatttattaatacacttttgattatattcccaggagagatttttataaaatgcagaccagccaaggcaatattgaagaggcgcagacggcattaagaagctgcaattgcagggcagccaggccaagaggcaccagggccctcagcgcacagtgagcccagaagggccgcaagtggcagggtacctctgcgcactagggaaggagccatgttgctaaatggtgttgggacagctgatgccatatagaaaaggatgcagtgatacccctacctcacaccatgcacaaaacacatcacagtgagagacctaacctgtaaaagcctttcagagaaaaatcaagaggaaatcttcctaacagtgaggaacaaaaagacagattgaacaagagattgagggtaaagacatcaataggtttgactctacagacttcttcatgaccacaagaaaaatgtcacggttgtaatgtaagtggcagaataagaaaagatatttgcagtatctacgagttacagaatatatataaaaatatgtgcaactgtctgtcgtgaaaaaaaacggcaaacaccacacatcgataaggatttggggacattggcttgtgtgtgtcctgccgagagtgtagatggtcacccatttggggaatgaaatggccttccctggggagatcagagtcatgcaggatacatgactggcagttccgttctaggcgcttccttctccacccgcaaggacacgtgaagttgtcgactgtgacatggttcacaaagccaggggcagctcaaatgacggggttagttgtacagtggaaggtaacgcaagattaaatgagttaaccagagctgtgtgtcttgggccagataaatcctcaaagcctaacattaaagaagcaagttgctagaaaataggccccattttgacactgaagaggttttttgaaatgtggaaggcatgttacgttgttgatgagcgtgcgtaagcaggaaaacctcagcagcccctgggaggcgccctcagcccaagggacagccctcccaggcaggcgcaggggcagacgatgcttttactgtgtctaaaattatgcttctctatgaaaaaaaaaaaaaaaaaactcgag

SEQ ID NO: 2473 - DNA, 1628 bp, Homo sapiens
ggcacgagttacataccactcctttccctgtgtctgtgttttttgcttatgctcatctgtttggattttttttcctcctgacagaattgtacttaggcctcaaagcctaattcaaaaggtcacttccttccctaagcctaacctacctcccaataatatttaatggtaatttcctctgtgattacccctatagaataacgtagcagttatgttatttaagggtaacataaagggtatttaacccattatgttatgctgtttgtgttgtatatgtctctgctctcaaaggctgtgagctctatgaggacaggaactatcttaatcaattgtgtattcctagcaccccatacaagtgcctggaatatagctacaatcaataaatgtttgtaaattgaattgaattgaagggacattacaacattgtagtataaatcactttgtagcctgagattgatcactactgcaaatactaaaagtggaagaacatatacctttactattcagtagaatagttttatggttaaatcaatagcatcgtgtaacatgtgatgatgtgcgtttatgcatttatccaaatatttgtaagtttaatactgaccacgatgtatatggctattgaagaaaaccacacataatatgtgtgtgaggtttgaaactagctctgttgcctaaggctgtctttgtgccttgccagaatgtggaccgtggcatgatcggcctgaatatttagccatcctcatgatagcatgtggaataactggtttacarttcatycgtttcatacatactctgcctagcatgttaaaattaactggaaactgaagaattggagccaaagttagaaaatgaagagagttcaacttgaaaccatcaggaaacaggctgattacatgaaggtctttttgtttgtttgtttttaacataataaatagagatggggtttcaccatgttgcccaggtggttcaaacttgtgggctcaagcaatctcctgcctcagcctcccgaagtgctgggattacaggcstgagccaccatgcccatcctatattttttttcaggcaatatccttttgtgctcaagaaattaagacacacaccccaccacaaactacatttgaagactctgccaaaaaaatgccatgttttttctcattttctttcatcagtaattaatgataccaagaacacttatatgcatggtttatagcagttggctatggtcaaaaaaagttgggcttcccctctgagacatttgcagatatatgtcctaggtataccatcagtggcaaataatgcttatcttaagatctaatctcacagggcatgctggctcacgcctgtgatcccagcactttgggaggccaaggcaggaggatggcttgaggccaggagtttgagaccaacctgggcaacatggcaggaccctgtctctacaaaaaataaaaaaagttagccaggcatggtggcttacacttgtggtcccagtgcgcaggaggctgaggcagaaggatcacttgagcactagaggtggaggttgcagtgagctgagattggagtgccagtggactccagcctgggtgacagagcaagactctgtctcagaaaacaaaaaaaaaaaaaaaaaaaaa

SEQ ID NO: 2474 - DNA, 1957 bp, Homo sapiens
gaattcggcacgagcaaatgttggtttgtatatatattttttaaaaggcactagacttagaaatgccaaagtaattaattttctttattttcagaaacaatttagtgttcatggtacgaagtgtttctaaattgaaacactttcagattaatggatttaagataactggttgctcttttctataagtagtaataatgagatatggcttcagctacatatcagataccagatctcacttcctgttcctttatttcattcatccattcattcagcaaatatttgctgagcactaaaatgctccagacacagtgcatgaaccctgaagatataggcaaattgcataacccaagcaaagggccagagatgagcaacagcatggtacataccccaaactaagaacttcactatgggctagggatatataatttagaagaaagaaggttaggttggggtaggaggaagcataataaattatgaatttagagatgtaatcaaattatgaagggtcatgaaagccttgtacaagattttgagtttgatctccatagagtcatataattagattaattttagaaagctcatagtgtctgcagtgtggagagtagattagaaggaagcaggcctggaagcagggagatcatttgggagacttttccaggacagagaaaatggtggtctaaactgggatggttgcaagggggatgaaaagastagatatytaagagaaaatttaagaatacttatttagttcagacgttcctgaaagaatgagcctaaccatattcttgatcatctaaggaaggtctattccttctcaaggacagctaagtaaactaataattgattctaagtgatgtaattgaacagttcaaagcagttattcgtcattagaaattattgatactggtcagataatacctactgagagctagtcccattaattttcatcataattataatcatagcatttaagccatattatttctcagcatttcctatgttccagttttatagcactgaatattttaaatggtttatattacttaatactcacagtagctttacaggtagatattattgttatttccattttacaggtggagaccaaggcttagagaagttaagtactttgcctaaagttacacaggttgtaaatggtaaagctattattggaacctagtgactttttagttactggcccagctgggattagaacccagctctatcctgtattattatttccaagacttttatttttgttggggttaattgctaatattctgtacaacttcgttttagcccagtcttgcatataatcatattttctgcataaataagataagctagagtttgagtgagcacatagtgaagaatattgactatttgtttttttctttccaattagttagggtaaagcaagtgtaaagggaagtggatggtaaggcattttgaggaggcaatcaaatatgtttttttctaattatatatttccaagccaataatttctttgaagaagaatgttttaagcgtgtttctttaccatgttaggccagtaggtacagagaaaataatattagctctttatgtcagcataggtaacaaagccttaaaaaattcacagctgaatgcaacagtgaaggccgttgacaagagaggttgcattacttcaaccagggctactgcagtgaaccaaaaaaagaactgagttctaggcttccatctccaggctacatcttaactgactaagagggcagtttagctgtccaggaagaactcgattgctaactctcactgataattttgcaacagtgacaataaagaatgaattttaaaaagaaaaacttgtctccctgaactattgaactccagaaaaagtagtacttacagtctttgctttaagagaaaccagttaaaaaaaaaaaaaaaaaactcgaggggggcccgtacccaatcgcct

SEQ ID NO: 2475 - DNA, 636 bp, Homo sapiens
  SITE (31): n equals a,t,g, or c
  SITE (35): n equals a,t,g, or c
  SITE (40): n equals a,t,g, or c
  SITE (630): n equals a,t,g, or c
agaacacaatattgttttctgtctagtgtgngggnagtgnttttttatgtcctttgggagactgtagttgacttgccctgggggtatggacaagttttccatttggaagtttatttcatgttacttcatttatgcttatccctaccctcttctgtttggttcttgggtgttctgttactgtcctgtgttaacactgcattacaataccattaaatttggttacaaggattttraccttgtctttgtccctagtgcttcatacagtgctttggcatgttgttctgcacttattatgttgagtgagatttggaggaaggatgcaatccttgagcttcagggtttgtgagttcaagggttggggaacatgtcttcctcagtccttaagattgcccagatcctttctctaaccttatttcccttctcatttttgcagctttgtgtccctggtgatgttggaacattaatgatggaacatggccaaacttcagtcatgatcctgaagccatggtttcttccctgccagaaatgaaggttcagttatgaggcaaccctctagtaaggcattgtaaaagttactggatttggtttaataaaagttgaaataaaaaaaaaaaaaaaaaggggggccgntctaaa

SEQ ID NO: 2476 - DNA, 1320 bp, Homo sapiens
  SITE (831): n equals a,t,g, or c
ctaacagcgagaacgctttggtgaggacggagccctcacgacctcagcagtgttgcgttggggatcaggtttccgatggtgaacttggggacacgtccacaccacagcacgtgcctattgtgtttctcggtggctggtgtgtttgaggatggcgcgtgcatgcgttttccagctttctttgtggaggaagttacctgtgggtattaacctgtccccagccatcctctcactgagcttgggttgcctgggcctgggtttcctgttgttgctggaacgaatgaccacagacagtggcattagacagcgcaggcagacatgacctcctgggcttctgcgggtgccaacactgccgctccttctggaggctcagggaggctcttgagggcattgggacatcgtsctgccggccgccgggcagagccgktttgtttattttttragacttccgggaacatagttataaataactttaatttgccttggcctgcccactgcagtacagtcacgtgtcacataacattctgtctaccgtggaccacatatacgaccacgcggtcacataagctgacaatactgtatttttactccactttctctatttagatacacagttgccattgtgtcccagcagccttcagtamtcagtacagccatgtgctgtgcaggtgtytagctcaggggcatgrggccmtggcccagcccagtgtgcagtgggtggcaccttctggatttgtgtcagtcamtgtggagttcgcacaatgacagaytcacctgggaggccttccgtgsgsttctgtttctttctctmatttgattgtggctagaaacagnstgggaaccaggagtgcagyttctcggagtamgtggctgccccacggggtgggatgtgcattttcagtcacatttggggagagcacgcgtgttcttaagtttttagtgggttctagtaagaatggatgttgatttttagaattctctcctgtttattttttaacattttgtggtgggaatttgtgaaagaatacgaagtcaagagcatggtacggtgaggacccagcaccatctccaacctccccggggtccacgtggggtctgcgtgtggccgcctgtccctcagcacgatgtctgggtgtaaatctgagacatcacagcatgcaggctgcagacgtaggcatctctacaaaagaaggatgcgtttacaggagaatcgcttgaacctgggaggcagaggttgcagtgaatcgagatcatggcactgccctccagcctgggcgacaaagcycagactccgtctcaaaaaaaaaaaaaaaaaaactcgag

SEQ ID NO: 2477 - DNA, 1521 bp, Homo sapiens
ggcacgagaggacctgaaggtgcagctggagcacgtgcagactcggctgcgggagatccagccctgcctggcagagagccgggctgctcgtgagaaagagagcttcaacctcaagagggctcaggaggacatctcacggctgcggcgcaagctggaaaagcagaggaaggtggaggtctacgcagatgccgacgaaatcctccaggaggagatcaaggagtacaaggcgcggttgacctgcccctgctgtaacacccgcaagaaggatgcagtccttaccaagtgcttccacgttttctgcttcgagtgcgtgcggggccgctatgaggcccgccagaggaagtgccccaagtgcaacgcggcctttggtgcccacgacttccatcgtatctacatcagctgaacctgaaactcaggggactctggaacaccatggaccctgggggctgtgccccatctcctccccaccccaggtctagtggccccaccctccattccggaccccatgggcccagcccctgcccatctagttggtttggggaccctggtgcatgctagtgggcatgggatcagccaagcttcgttccatcttttcctaaaggtcagagctgcagcctagggggcactgccctacagaaaaggtctgcctgagaggcctgaggagcccagagcacttgactgagcttcccggaaactggccctaacctgtctgtctccgtggatgcatcctaaccctaaggaaaattccccaggctgtgatctaccctagagaaggctcgctccctgcctactggctcacaaatgaggaccagtgagccatgtccttgttccttgtttgagactgggctgcaggccccaggaagactttccttcacccaccatccccctaacctcggcagggcttctgtcctgtggagttccctggacaccttggtctggctcttgtgccaagggctgaaggaggtaccctcttggcagatgggggcatcacttgcttcctttgggaagctctaaggttgctgcagtcaccttcctcatcttgcaggtgctgaaccaacatcatcagtttctattctaatcaggccccttcccaatctccatttctctgccaagcccatttacccccacctcatgcatcccaaggctctactgggtccctggacctaaccctgctttcatcctggtggccttaactacagtggaggtggaacttcccaggaggggaagggacagaccagccccagccgctgggccaacttccaatcattccagctagaagagcttccccctgacaccctgtgactgagcctgtgtcctgtctgcctgcccagccatgctccatcggctgtgagggcagtgcccggagaggccagagggttggagctgcagggacccgtttggacccacagcctctgttctagagatgcttgtataggctgttaattgtgatgaataaacgttcaaccctcggcctgcagccagagtagccaggccgcgcaccccaaaaaaaaaaaaaaaaaa

SEQ ID NO: 2478 - DNA, 1103 bp, Homo sapiens
ggcacgagatcacttgtcaggatacaaaacatggtgggactctcagcgacctgggaaagcaagtgagatcattgaaggctctggtcatcaccatcttcaatttcattgtcacggtggttgctgccttcgtctgcacttaccttggaagccaatatatcttcacagaaatggcctcgcgggtgctagctgcattgatcgtcgcctctgtggtgggtctggccgagctgtatgtcatggtgcgggcaatggaaggcgagctgggagaactgtaactggtgcttcatcatcaagtctagagaagactttgggggcttcaggctccaattggcagtcaccgactcagtcaacccatcagactttttgtattcagctccagttagtcagaagaccagcccaggccagctgctgtttctgtggggagccctaatcttctgtgaatttccaaagggagcattggaggagattgagataacacatctttaaaacagaaagactggtcttggtctatcagtacctcttcctgaatctggtacccatctgccttctccagttcattctaaacactgctgggactagggtttttccatcaggagcaaatggaatccaggccttcccagaagtagaccatactgccttgaacttgtccatatgtacaaactgatcaccagctttctccatacatttttaatgcagacctgtaattgagttcagaagcctccaagaaaacagaaaggatcccctttctccagtttgtgctggaagaggagctgatcagagacatcaaataagagaaagatgggttgctagaggatggtagaactggaagcaaggcagctacctttttgcaaaaggaaatggtgttaggccccttttccagaagataagacagactcatagagattaaatgatcactatggtccttcttctgttaaatggagccaaagacgcctatgttgttctgaagtcttgtaatgtttaacttctgagaacttagattagtggtgtgatgatagagtctgtataacgcattgaaaagggtatcaggcttagttatttatccaataaatatttattgtatgcagggtaaaaaaaaaaaaaaaaaa

SEQ ID NO: 2479 - DNA, 968 bp, Homo sapiens
  SITE (261): n equals a,t,g, or c
  SITE (847): n equals a,t,g, or c
tttgtcccttggctttgctgcaagtctttttggaaagagacaagcatggcccagcccagaagttctagaagtccttggcctcatcttgcctcaagggcattgcttagagatttccagaatgtcattacttaatggaaaatctatagggtctgcttccttttgggacagcttggctctgcaccctggccgcctgtgtccttgtggctgggctgctcctgcccctgcctgccatcacttacctggcgtgtgcttggtgcgcanatcagctatatgtttctggagctgctttctaggagaaatctaatcatagaaaccaaactgaatggcattccttggcctcactctttgtaccctccatcttgggatccaggcttccacagtgcctttaggcctcccctccccttgaccccatcacacttgtccccattggtcactttggacttgctggtcctgctgcatggaagccctctccagcctactccacatgtgagtggggtttaaaccccactgacttgtttccttgtctgtgatgctgtccttctaccaatacttgtgtccagtcacttggtgtgtcctgtaatctatctgtgtctggaccaagactggtacactggacccaaggttcccagcaagctgatatgtggcttgtgtcatttgtccctgtgtcttctcctatctcactggcctcctatctccacagcctagtccatggagttgctttatgtagcaaattctccgtttggagcttttaaaataggattatttgccagaactgcatttacaaaaaaagtttgtgtaatcctggtttaaataaattacacaaagtaattcactggcagctagggtncctagtgtgtgctaggcataaagctgcttctgaacccactaaaagttcatcccagaatgatatctccactgagttcttaggtttattactagagatgaaaaaaaaaaaaaaaaaactcgag

SEQ ID NO: 2480 - DNA, 1544 bp, Homo sapiens
  SITE (808): n equals a,t,g, or c
gaattcggcacgaggttatccttggctgcaggtagtgaagaggtgtaccactctttaatgtttgtactgagtggcatgttcacaaaaaagctcagaattcagttgcattggcttttcaagagggatttgcagcaagggctggtttccaatatggtagtggaggaattggctaacataaaactagctcctgaaattcagacttgcgtttactgctctggctctatggaattagtaaccatgggaaagaggcaacgcttagaactgtgtaaagtgatggagtaggtagagacctgtcttgaagcatcggtaacagtaaatgaagcagcagcaagatcaggtgttctgtgccacattctttttccattcatgtttcatacaacattgtcttcaggaacatggttcagtgttctcccaacccacaagagacaagcaaaataaaaatggactaaataatttgctagtttttaattgggctctttggcacagactcaagtagacctgaactctcagctctgtygtgaacccgctttgtgaacaaggacaaagcatgtcatctgtctctgagccycagtctccctgttagtcagttacagagagagcgctccaagtttccttccaaagctgtgcactggctcgtttytccatcagctttggttttccagttggtctccagctcatctttgcctcacaagagcgtgccctgctagttgctggtgctgggagtgggtgggaaggtgattgggcgccagccccttccttcccaggcttcacacacacaccccaggaasccccgcggtgcgtcggactntctgtctagacatcatctgatttttatttgcaaatgcaggttgccaggtgacaggaccttttatgyttgtgccccacctgagtcccaggctcccggagtccccacagagccaagcataaggtctgccgaagccttggcgttctcaggtgagtgcagggtttgctcctggaggcaccgcaggaggccagcctctgctgccagctctgtcatctttgggcagattcgatgggactttagacacttgctttgctccctctggggtctggagtagatgtagacacatcctgtragtgaggtgaccagggtgatttaggagcaccattagaaaacctgacatcactgcttgtggttctgctgaccgtttcagccactggcttgaatggagtcattttggcttcttcactggcacctctctgaatttctaggaatgtgcctttacctttaccgagggcccctcttcagccaacattctcacgatgtggaataattgcttggaagtgtagaagggcttctcattttgagaagctgatcatccttccaggttgagccacaaataagtcctcctcctctactccctggggacattagttctggtccctcatctctaaaacattgatgtgcctaagagtaatacacattttggtcttcctctgaactttaatatagcttgcaaacaaatatggattcaatctgatttttaaagttttatttctaaaaaaaaaaaaaaaaaactcga

SEQ ID NO: 2481 - DNA, 677 bp, Homo sapiens
cggcacgagccgctgcgagaccgcagcccttctctggagtctcagagccgcaagacaccacgactcccagaggaccttgcgtcgggcaagaaagactacaccttccagaggcctctgcggcgccgcgacaggaagcggcgggcgagccgagtgtccttgcgcgtggatccgagcgaccatggtggcccgggtgtggtcgctgatgaggttcctcatcaagggaagtgtgcctgggggcgccgtctacctggtgtacgaccaggagctgctggggcccagcgacaagagccaggcagccctacagaaggctggggaggtggtcccccccgccatgttaccagttcagccagtacgtgtgtcagcagacaggcctgcagataccccagctcccagcccctccaaagatttactttcccatccgtgactcctggaatgcaggcatcatgacggtgatgtcagctctgtcggtggccccctccaaggcccgcgagtactccaaggagggctgggagtatgtgaaggcgcgcaccaagtagcgagtcagcaggggccgcctgccccggccagaacgggcagggctgccactgacctgaagactccggactgggaccccactccgagggcagctcccggccttgccggcccaataaaggacttcagaagtgtaaaaaaaaaaa

SEQ ID NO: 2482 - DNA, 1678 bp, Homo sapiens
ggcacgagcaaatatatagtagttccttattttcagttgtgaaaatgaaatggctaaagcagaagagacgtctattttagtcttttaaaaatgtgtgtgggtggtcttttttcctcagaagcccaaagcacatgtatattttgttatttctccttgctatattcctgagactatactaaaaactttaagaaaaggaacaagaaaaaggtaaattcatgtgttccccactgctgtgtctagaaccaagatcacattatatcattgttaaaattgtgttatctagaaagtgcaatatagggaaaacactctaagaatcttttaaaagcctagtgtttcccttatttgtcagaatatgtggtagtggcatccataagtatcttttaacttgcatttagcaggacaaatagtgtgatacttatactgatgacaatcatccccatttaatgaccagcagtcactgagcgctgtgaaaattcactcagtgataccccgtgttggtcttgaaggaaaccgtacatatgaatttttggatagctaatgtatatctctcaagtgccaacatttaaaacttgtaattatttttgatgtgagtatttcaggtatgttagtataccttcctgccttcttcttaaacatcatgctcagtataattcacattttcatgatgaaaagttaaagttatattcataatgtattattataagtatccagctctgatgtatgtaaaacacttcataaaatgtaaagggctataacaaatatgttataaagtgattctctcagccctgaggtatacagaatcatttgcctcagactgctgttggattttaaaatttttaaaatatctgctaagtaatttgctatgtcttctcccacactatcaatatgcctgcttctaacaggctccccactttcttctaatgtgctgttatgagctttggacatgagataaccgtgcctgttcagagtgtctacagtaagagctggacaaactctggggggacacagtctttgagacagctcttttggttgctttccacttttctgaaaggttcacagtaaccttctagataatagaaactcccagttaaagcctaggctagcaattttttttagttgcaactaagtaagatatactacaaactaaggatgctgctagactaaggaataaacagcaaggtaccaaagtacagcaaagcaacaacaaaggctctgtatttgcagaggggtctatcatgcttttaagaaaaaagaagagtacaggaaaaaaattcagatagacataagagtattttggatgccattaaactttgtcaataaccattaaaacataggcttaaattatcacgtattgttacaaagacacagttttgtctcattataaaataagattatatgaaatttatattctagaaatgattccaaatcatgtcctaagaatttctcccattcaaatgataatggaaattactgtcaaaaggaaaatctcaaagttaccattacgctgctctcttgtaaatgaactagggataaagatatgggttttatcaaaagccctaaggaatatatctcacattcacctcctatatgtatgtgtatatataaatgccactataaatgaaaatgtcacccagagataataaaataatttttaaagtttaaaaaaaaaaaaaaaaaa

SEQ ID NO: 2483 - DNA, 1679 bp, Homo sapiens
  SITE (20): n equals a,t,g, or c
  SITE (1517): n equals a,t,g, or c
  SITE (1530): n equals a,t,g, or c
aatccccctcactaattggnacaaaagccggagctccaccgcggtggcggccgctctagaactagtggatcccccggtctgcaggaattcggcacgagcccatgttgccctctaccagggtgtttactctcagatactgttggagttgccagctctcgcgggacatgatcagtcttttcaggcagccttgcagtttttgactctgttctttttggccccagaactgcatcccaaaaaggactccgtgtttacctccatgtttcattctgtgagaagagttcttgcagatcctgaaattcctgttcaggtcactcaggatattgagcctcatttgggagccttgttcacccaaatgttagaggttgggacgacagaggacttgaggctggtgatgcagtgtattctccagggactggatgtcagtaacatgtggaaagcagatgtgcaggctgttgtgtcagctgttacactgctgaggctgctactgaactgcccactcagtggagagaaagcaagtctgttgtggcgtgcgtgtccccagatagtcacagctttaacactcttaaaccgagaagcttctcaggagcagcctgtgtccctcacagtggtcgggcctgtcttagatgtcctggctgcactgctgcggcagggggaggaggccatcggcaacccccaccacgtcagcctggccttcagcatccttctcactgtccctttggaccatctgaagccgctggagtatggaagcgtcttcccgaggctgcacaacgtgctcttctcaatcctgcagtgtcaccctaaggtaatgctgaaagccatcccttctttcttgaactctttcaatagattggtgttttcagttatgcgggaagggcggcagaaggacaaaggaagcatagatgacctgcctacggtcctaaagtgtgcacgcctggttgaaagaatgtacagccacatcgccgcacgagctgaggagtttgctgtgttttccccatttatggtggcccagtacgtgttggaggtacagaaggtgaccttatatccagctgtgaaaagtctgctgcaggagggcatttacctcatcctggacctctgcatcgagcctgacgtccagttcctgcgggcctcgctgcagccgggaatgagagacatctttaaggagctctataatgactatctcaagtaccacaaggccaaacatgaaggagagaaaagatatacggcctaaggctatgggacagaagtgccgccagtgacactgtccagaggctttggctgcatggtctgaaagagctggagaatgaaagacttaagatgttctaattcgtagtatyggtatacatagaaaatcctttggggtttatgtagtatattttgatgtattttacatcgtgtttttcttactattttttaatacatagttttatgcagtaagtattgcaatagaatcctgaaaattgaccctgggatgagattaattcaatagaaaaattgctgactcttgggacctttctgtngtttggttctcgncttggctcagtggtttggtgttccctcgtctgcaytggaaactacataaaactttggctttttactttggtaatgggcgtataattcargccctgtttaaatatacttgcctttcaaattcttcaaggtaaccatgggaagtattcttg

SEQ ID NO: 2484 - DNA, 1425 bp, Homo sapiens
gctaaatttctccattttttcctctttccttttttttcttaccacacattaatgtgagaagattttacagactgccttttacccctatgtctgggtcactgatgacctctgtatggctaaatccagtggacataattcactggtagcttttgttgttgttgttgttgttttgttttttgtttgttttgagactatgtctccaaaacagtaacamcaaaataacaaaatggtactcattatcgtgtctactttgccatattctctcctcctcctgtctccacagcatccacttaagcccgaaccctctagaagccctcatccttgactcttcccccatytcactctatgtagctcattagtcactaaattctgtttgtacaattcctaaacttctattaaatttgtctgcttccctccagagtcctgctaattccctgaatcaggccactgccatctcatgcctgcgttgcactgaggacctccagtctggaagctcattttccatatctttacaaagcagatctatcactctgaactgttgtctcgacccgagttttgataggtattgtgctgggatctgaccattcaaaatacaatcactggaatctgaagaagtattctgtgggagtgaatggaaatatatatgacttttaaatgggcaaaggtaatgtttttctgtaagaattaaatacctgcagttgtattatttgaaggtgcattttcaggggcgagctgcaaaacatctgtcaggtcccaacatttgtctactggtgtttttttaaatgtggattgccaaaatctttattcatgatggacattatgtaggagtggttaatacttacatagcacttacctgtgtcaggcacactgatcaaaataaccgacgaagtattattcaacataaagaaaaatctaacttggatgtgaatgatcagagaacttaagttttaatttttaaacctttcagaaattgttaatatagatgtttataacttccaccttttaaattatttcacttattgaacagatattagtgaacttctaggtgctgaggaaacaacaaagagcaaagcaaagtccctgtcccccaggagttcgcgttttaacggggaagaaaaataagcaagtgaaatggacgactgtgagaagacggagcagggagatgttactattgcttgtagggtggtcacagaatgcctgcaaaaacaacccttttgaagaattgggaaaaaaataaaaaccatttggctgaaacagccctgagaagggcagcttcttccaccactctttcatcattttaccatctgtgggttatccccggggtcactgctatcccagcctaggttttatacaggatggagtacgaagttcccgcaactatccaaamggtaaaatgtgcttaaaaaaaaaaaaaaaaaactcgag

SEQ ID NO: 2485 - DNA, 1238 bp, Homo sapiens
ggcacgagtgaggtttcaccatgttggccaggatggtttgatctcctgaccttgtgatccaccctcctcggcctcctaaagtgctgggattacaggcgtgagccactgcgcctagcctcttgtggctctaatttattatgtagtactctgtggtctgtatattaacgtcttgcctttatcttttatattatatggtaaaaccctgatttttgtattttgaattttcttgtttaattgtacacatttttgtactgatatatcaatagctaatggcctctccccagaccaatggaaattggcatctttttagggggagagggttagattgggtctcaggctctgggaattttttaaaaagctcaccagatagtgctggtgtccagctagaattttttttttggattccacactaaaagcttaggccataaaagcaaaaataaataaatggaatgacgtcaaactgaaaagcttcttcaaaacaaaggaaacaatcaacaaaatgtaacaacctatggtctgggaaaacatatttgcaaaccatttatctgataagggattaatatctaaaattcatgaagaactcatataattcaataatagaaaaataatctgattagaaaatgggcaaaagacttgaacagatgttttttcaaagaagacataaggatggctgacaggtatatgaaaaggtactcaacagcattagccatgcagaaatgcagatcaaaaccactgtgggcgtcacctcacaccccttagggtggctgtcataaaaaagtgaagtgataaccaatgttggcgagggtgtggagaaaatggaccccttgtacactgttggtgggagtgtggattggtacagccatgatggaaaatagtatggaggttgctaaagaaatgaaaaatagaagtactgtatgacccagcaattccttatctgggcatatacgtaaaggaagtgagatcaccttataaagatatctgcactcccatgttcattgcagtgttatttacattagccaagctgtggaaacaacctgaatgtccactgatagatgaatggataaagaacacgtgatatgcatatataatggaatattattcagccttaaaatgcagatactgccatttgccacaacatggatgacctggaggcagtatgctgagtgaaataagccagacacaggaagaaaaatattgcatgatctcatatgtggaatcttaaaaaaaaaaaaaaaaaa

SEQ ID NO: 2486 - DNA, 1117 bp, Homo sapiens
ggcacgaggagaactaagcattaggagaagcagcatggggctcaacagtgaagtgacttgttccaggcgggtcctcaggagtggctgtgcagccccagtcacttttcatcacaccggagagggacgcacaaccccagtcctgtttagttgcagatataccgagaagggagagcccacaccgaccttaaggtcacttgggccctgaatcctatgcctctcgttccactgcttctcagttgccctcctacctggctggccaggtttggagtctctctcccctgctctggcattccagtcttggcctgaagcacgctatgcctctcatacagtctgccttttctagggtccaagcagcatcccaagttctgttgagatgcagcttgcagtccaggaggacaacggtcacccccatcttcccatgtttttcttgctttaagccctcccctaagctttcacatataatcaccaggggttcagaaattgtcagccagttctccttatgctttaagtagattttcttggggccagatgtcttgaaaaacgctctcctgactcagcagttcctggaatttttggcctatcatttatctcactgttctgagtttacttgtaagcctcttggcttaatgtttgaatcaagatgagcagtaataacagcttcttgtgtaccaattactcagaactcacttaaattgccttaacactttttaaatgttcttacacatttgaaattctttagggagggatttccagaactttcctaaatttctccacccatggcatgacagtacttagaggggcaagaagttcaattttagaataagctcttctgggcgcgatggctcatgcctgtaatcctagcactctgggaggccaaggcgggtagaatgcttgagcccaggagtttgagactagcctgcaatatgcgaaaccctgtctccacaaaaagccagacatagtggtgcatgcctgcagtcccagctacttgggggcgctgagttgtgaggatcacctgagcccaggaggcagaggctatagtgagccacgatcgtgccactgcactccagcctgggtgacagggtgagacgctgtcgtctcaaaaaaaaaaaaaaaaaaa

SEQ ID NO: 2487 - DNA, 1640 bp, Homo sapiens
ggcacgagctgacctgaccttttccctgccttcaggacttctgggcccagccctcttgccaggcatgcatatgtgagatatgcatatcatgtatgtgtcctcttggggtgagacttctgcacagccatgcctgcctctgaccagtccacttttcatgttggggctgtaggcctggggcaggttcagagtctacccaagtacctatgtatgagcaggcagcagcagggcatggccccatctctccttttagcctctgtgtttcattaggcattcatcctgccaaccagggcaggcccggcgtctgggctctgggaacaaatggggcccacatcctggagtggcaaattttgggggatgcgctacctgtcccagcgggccctgtgcctccaacccagagctccccacagacctggtgtaatttcacaagggccatccctttccccaggcttccctgagggaggcggaagtttgaacccttatgtggggtcaatggggctagggtagtggtatgaggtttaaaactatttaaggattaggaggagaaagagtcttcaggaaactcttgtttcactggactctgcagcctgcagaactggggcaagggtaggagttccagtaggggaaggagcaggtagactcttcagctgcctcagctgggactgaagacctaagctgattctctttcctctccactcctaagaagcaattttctgttcctctccttccaccactttttactttctgctatctcccatctcccgcttcccttccatttcctttctagaaaaccctggtatttagctcaggccaaactgcctcagcagaaaggtggccttggacaaaactggtccaagaatttgaagtggcagtacttgcggattggctctgtccagcaaggcctcagctgcttgttgcgtctgctttccctcccctaacagaagggtaccctggcttattcaggggactccttagtccacactgtgtcacctgcatgccttaatctttcattgctggggtgtggcttgggagatcctgggccagcccctccacacatctccctaagtcagagtggctgctggccctggtagatttgacttgctcttgcctcactcgacctccaaagtgggactgaagacagtggtcaagagacttgagttcgggacagtaagccaggggttaaggttctttcctttttttgaaagccaaagacccagtttgcattgtgctgctgcattcatggttagaagctttccatgcctaggttctagggaatttatttttctatgtgtatatattttcaaactttgtttcctgggtactgggcatgtgcctgtctgagccccaggtctgtctacaccccaccattcattctgtctgtctgttccctggacactgcctaaaagggtctcaagacagtgccctgtgggttcctaggactagggcccatcactgttctcttctgctgggaaatgcagctttaaaatggctaaccacagcagagggcagatgcttgatagattatcttttccttgctttcttgtttctgttttgaaagtgaaatggggttttaaattgttatttaaactctttttccaaataaaggtttaccttttttccccccaaaaaaaaaaaaaaaaaaa

SEQ ID NO: 2488 - DNA, 2060 bp, Homo sapiens
  SITE (8): n equals a,t,g, or c
  SITE (9): n equals a,t,g, or c
  SITE (44): n equals a,t,g, or c
  SITE (1938): n equals a,t,g, or c
acccgccnnaatttaaaccccccctaaggccaatggtacggccncccttttttttttttttttagaagaaatacggactttaatgaagagttttccctttggtataagtgagacccgtggaaacatccaaacagcaaaaggaggccaggatgaaaacggtcaactctcccttatccacaaggccaaaagagggggggccggcttgctgtggtgtggccaccccgggcctaggctgggccgggcctgtagaaggtactcaggaactgcaggttttgcgtttcccctccatgaaactgacaggcattcgggctgacttctgcctctcagtctcgcggtaagagacccaagtttttctagtcctagatggaaataaatttcatctgcctcaggtctctggtataaaaggtgcgatcccagttacctcacaggcctaggcgaggaaaatgccaagagctgtaaaagggcttggaaaagtcaaaaaggtgatgtataaatgtaataattgattatcattttgtgctcaagaataagcaatggaaaagaaaataggaaagtaagtctacagccctaaaatatatgcatataaaactttaaaagaatgcagttccaactctacagatggtatgtggggattgtctactgctttatagtctcaatgccccttttctcacctccacaaaatccacctgggagagttaactgtacaagaggcccaaattcagtcacccccaccccgccctcccagaaagggaggcagggcagaggcttcaggaggaagggctgcactttggcgtagagtacataggcatgcaacatgggagggcaggccttatgaaatgtatatacagaccccttggggtgaggggccccggccaggaggcactgagcaagggaggggtccatctcccgcctggccgggagtggggctctggggcaatctctaagggttgcatatccccagggagaggggacagctgccactcctgcctctgttatcccaacccaaaccggagagggtgctcagcaagaacacaggtcccagaagccaagaaggtgttggcatccctgtcattgaattcaggggtccaagaactgtttgcataaaatatcattagacctaagagatggtcaaaggcacaaagtttaaacatggggggggcgggtgttgagaggggtctgggataccctgaagcccagaggtgtgatttgttcccccttgcccagaagggtgactgttccactgggcctgtcaccacaggacattttccatgacaagcactcaccttcttggggaaggggcatcaggttggcacaggaaaggcccaggtgaggggccactctgtacattaatactttggtgattaatgtttggggagaggcaggattctcacccaggcttttgactcaaaccctctcactcagctggatatgaaacccagagtccatgctactcccagctctgacacaaggccaagcccacagaacactcccaaacgaggtcccgagagttagggaatagggtggaaaggattggagggcatcttctggaagagagcgctagggcagatcacagtttccgctccacaggttgctgtagacacagttcgctgccygcagagatgatgggcaagtgattgtccatgtggtagctgataaggtgactgacactttcaaagcggtgatccttagtccgaacctgggagggtgggaaggaagaaggtcaattcaggtgaagagtcaaataagacctcagcctccaaggtggaagagggtgaaacagacmagaggcttgaaggaggagaaaaaaatggtgggggagagtgtggcctgtcaatcctgatcattgaggcttctctagaaagagacagttgtaggaatagacaggtcagtgaagtgagaaaaggcaaaggcgacatcagccctkaaagagtgaagctnagagctatatacccctttcttgacctggaggaagttggcatgtctcagaagagtatacacagtgcaaaaaaagatgtggaggctgggcatggtggtccgtgcctgcaatcccagcactctgg

SEQ ID NO: 2489 - DNA, 823 bp, Homo sapiens
ggcacgaggcaagataaaaatgctttcaaagaaaactaaatgaagacacctccccagatatttactcggagatgtattagtgcttaacatccaataggaaaattgagcccattattcataatacacagaaagtctcattgaactcaagcacattctatgaagctggcatcaacattccttcaaggaattcctacagctggatggattgttccatatgaggattctctcactgcaataatagctttcactccagggaggaagctgtattcccttcatgctgttgctggtatttttagactgttaaactcttcagttgctgaagggtatccatttaccacatatttattaggctaccatatgggtagtcagtgaagggtgaagggcattgactgttggtatcctgagtgtctgagacgcctttaatccaaagatctcaaagtactccaccaactagaaatcactccccaaccctggagcttctttagaatgtacaaaatactggcccagttgtcagtcattaggtaaattttcagactttttttttttttgagacagagtctcactttgtcacccaggctagagtgtagtggcacgatcgtggcttactgcagtctcgatctcccagctcaggccatcctcccacctcagcctctcaagtagctgagactacaggcatgcatcaccacgccctgctaatttttttatttttattttttgagacggagtcttgctctgttgcccaagatcatgccactgcattccagcctggacaacagagtgagactccatctcaaaaaaaaaaaaaaaaaaaaaaaaaaaaaaa

SEQ ID NO: 2490 - DNA, 938 bp, Homo sapiens
ggcacgagagaagttgtcctcaactatcagtaggtttttagagatgaacatcactcgaaaactatggagtcgaactttcaactgttcagtcccttgcagtgacacagtgcctgtaattgctgtttctgtgttcattctctttctacctgttgtcttctaccttagtagctttcttcactcagagcaaaagaaacgcaaactcattctgcccaaacgtctcaagtccagtaccagttttgcaaatattcaggaaaattcaaactgagacctacaaaatggagaattgacatatcacgtgaatgaatggtggaagacacaacttggtttcagaaagaagataaactgtgatttgacaagtcaagctcttaagaaatacaaggacttcagatccatttttaaataagaattttcgatttttctttccttttccacttctttctaacagatttggatatttttaatttccaggcatagcaatgttatctattttaatgtgtatttgtcacaataacagaacatgcaagaacaatcattattttattttataggcatttgattactattctagacttctggtatcttcttactaacataagtatctcaagtagaaaagtttttgaaaactaacatttaaaaattaatcagttacagtaaagactttgaaaaagaaatgtacttgttaggaagtagcttaattaccccccattgcagtattattgttatatatatagttaatatgttgtacatcacaataatatataattcagtctctagtttccctagagtcatttttgaaaccactgactgcaaacctccctgacaatttttaaaagtagtaagccacattacatttatctttgtaaaaagatttatggtaactggtttcttacttgacttttataaatagtattttacatcttaaaaaaaaaaaaaaaaaa

SEQ ID NO: 2491 - DNA, 1896 bp, Homo sapiens
ggcacgaggtaaattattggttggtaagcctcttaagtcttaaaaggtaggttcccctccatctcttttttatacaaaaccaactttttactaggctttacttctgaattaaattcaagcggcggctattgacagcagcaagaacctttgctgtcccacgcgttcctcctgcagtgttctctgtgatgctgcttggaaggctgatggactgttcagctggtgtgatgatttgggtagctcagagccctcatggttggggacctgacacatgaagagccctgaatatcactatgggtgagtgtggccttactttttgctgcttcacattaacggtttggctttgcctgcagccagtattctgaccttaatgtcacacttgcagatgtcagcccaggcttggtacaggggcaaaccttttcaggcttgagcagaacccagttaggttccgggtgttgactgttctagaaatggatttccaggactacatgagtgggttcgtgtgttttccccagaaaatccagaactgatgataaatagaaatgtgaaaaactacttcagttacttgactgtttgttagtaaaaaaaaatcagtaattcatccttgcccacctaggtaggcggtttatccaacttctgggtctcttgcccatggaaatcaccatcttggatctgttgctctcccagaacagtattatgaatagggctaaaggtcagaatacccccactgcccttatgacagatgggaacatctcccaaataagacagtctcaagcattcatgtaataaaataactttattagaatcaggaatttgttaaaataatatccttcacatatagctaaagtgcaaattctcttgctctgtagtagaagcaagcacatctgtcagacctccgtggtgtgcttataaaaccaagacgagaagagttttaagaagtacctctggcagcataagagtacgaaaacacattttataaaggtttgaacaattaccatttggagccatttcatatatcgtgtatgtcttttcacttatttttcttaacctttcaaaaactactctgtgctatttatacaactgaagaactgtataaactactttagagcagtggcctcattactgtcaggaacggaattaccaaatcaaagagacaacactgcgtattcgccatcactcacacactgacaaagtgcagtagtgttagacatcatgggctctgtcactgggaaagggacccagtgacttccacctctctgactctaaatagcagcagtcatattggcacctgtaccatatgattcaaagagaagattctacttccattggatgacagcttggaaactcggccatattacatagagcactacatcatttcacaagttgcgagaaaaataaggccactccgaggcaatctcttctgcctcccagggggatgggacacgggacagtgcaaagaccgtggaagatggcagtaagtagatgaaactccaggaccaaagggatgcagcctggccatggctgaaggtttttgctccattcagtagaaactggtgctctaattcattatcaaaaatgcttacttggtgtccacatggcatttgttttctcaggttaacatctgcctacagaaaactcaggcagaggggtgagggcagatgcctactagcataacacctggtttgcagcacgatacaggtggaatgacaagcccagagaatttcagacgaaaacatctggcctgagttgctacaaatgaagtgtgagagaaacgcggatacacaaagaaaaccaaactgcccgcccaccatgtttccccctccaacatacagctctttatggctaccccctattcttaattagaaaaatagtctcaatatgaaaaaaaaaaaaaaaaaa

SEQ ID NO: 2492 - DNA, 1494 bp, Homo sapiens
ccaaggagcagcctcaagcccagagaagactgaggctacggggaacttcccttgctgcaggctgttgtaacactttaagggccccaggtctccactgccaagcaggacttggcacatgagcacccaccccacagcaccatcaggcagcacccatgggctccaccagcccagctctgtccctcccctaggtaaagatcacactgaagtcttcaagtccccagcaaccaagttgggggtggtttccttcctcttcaggcagccaggcccatggctggaaggccgggctggaggcccagggaatcggttactgatgtggccaccctattcccacatggggagcaccaggagccctggagccccttccacccaatcccatctcgcaggagagcagggtctgggctcctgcctcaccgctggttcagcagcaccctccccgccgggtcccaccttgccttttgaagaagagcccgcataatgagtggacggcagacagctatatttagtggtgcctcgacactcacgaaccgccagcgtggcgcctggatcttgcccagctgccagctccccccaccaggactgtggttcctcagtttctcctgccagccccggctcatctcagggcaaagctatagacatggtagatctcatcggggaggttctcctgcctctcctcggccaggaggctgaggcctgcactgcagatgatcctgcggaccacgtcaaggtcccggcacacgctgctgtccacgtcgtccagaatcacgccctcctgggccatgttgtctttgatgacgatgatgccgttggggcggaggctgcccttgcagcgccgcaggaactcggccaggtgctgatcggtgaggtggcctggggagggcagaggcaaggttaccagggcaccatgcaagcggatgtcggcactggatgggatgtacttctcagccccgctgagcccctcatttgtgcccagcattttgtgtgcacacatggcctcattggctctcagtcccgagagatttactaaaccccaattcatagaataggaaactgtggctcagaggtcatctacctaaagacacattaagccagaatttgacttgacgggatggcttacaagtcctgcctgatacctacacaccatgatgccccacccctgccaggcttggatcggaggagtgaacctgggccaagagtttggcattgcaggagctcccagagagactgccttccctacactagaagtccccacaaaggcttctgagaccacaaaatacaaggccagacctagagtgtccacagcaggcctgtgctgcccgcctcaggaggtggccgactgctgctagcggcctgccgccacgtcagcagcccagggcacagcgctcgaggtgtgctgttaggctaagagggtgcagggctagacacgaagcttaaactattcatcttattaaaaataaaacccttataaaactccaaaaaaaaaaaaaaaaaactcga

SEQ ID NO: 2493 - DNA, 2836 bp, Homo sapiens
  SITE (1615): n equals a,t,g, or c
gcgcctcgccgggtctccgcttatcacacctcaggtgcggtgggcttcgggtggggggcctgcagctagctgatggcaagggaggaatagcaggggtggggattgtggtgtgcgagaggtcccgcggacggggggctcgggggtctcttcagacgagattcccttcaggcttgggccagagtcccttcgcacggagatcccaatgaacgcgggcccctggaggccggtggttggggcttctccgcgtcggggatggggccggtaccctarcccgtttccagcgcctcagtcggttccccatgccctcagaggtggcccggggaagcgcgccgccctcttcttcgctgcggtggccatcgtgctggggctaccgctctggtggaagaccacggagacctaccgggcctcgttgccttactcccagatcagtggcctgaatgcccttcagctccgcctcatggtgcctgtcactgtcgtgtttacgcgggagtcagtgcccctggacgaccaggagaagctgcccttcaccgttgtgcatgaaagagagattcctctgaaatacaaaatgaaaatcaaatgccgtttccagaaggcctatcggagggctttggaccatgaggaggaggccctgtcatcgggcagtgtgcaagaggcagaagccatgttagatgagcctcaggaacaagcggagggctccctgactgtgtacgtgatatctgaacactcctcacttcttccccaggacatgatgagctacattgggcccaagaggacagcagtggtgcgggggataatgcaccgggaggcctttaacatcattggccgccgcatagtccaggtggcccaggccatgtctttgactgaggatgtgcttgctgctgctctggctgaccaccttccagaggacaagtggagcgctgagaagaggcggcctctcaagtccagcttgggctatgagatcaccttcagtttactcaacccagaccccaagtcccatgatgtctactgggacattgagggggctgtccggcgctatgtgcaacctttcctgaatgccctcggtgccgctggcaacttctctgtggactctcagattctttactatgcaatgttgggggtgaatccccgctttgactcagcttcctccagctactatttggacatgcacagcctcccccatgtcatcaacccagtggagtcccggctgggatccagtgctgcctccttgtaccctgtgctcaactttctactctacgtgcctgagcttgcacactcaccgctgtacattcaggacaaggatggcgctccagtggccaccaatgccttccatagtccccgctggggtggcattatggtatataatgttgactccaaaacctataatgcctcagtgctgccagtgagagtcgaggtggacatggtgcgagtgatggaggtgttcctggcacagttgcggttgctctttgggattgctcagccccagctgcctccaaaatgcctgctttcagggcctacgagtgaagggctaatgacctgggagctagaccggctgctctgggctcggtcagtggagaacctggccacagccaccaccacccttacctccctggcgcantttctgggcaagatcagcaacattgtcattaaggacgacgtggcatctgaggtgtacaaggctgtagctgccgtccagaagtcggcagaagagttggcgtctgggcacctggcatctgcctttgtcgccagccaggaagctgtgacatcctctgagcttgccttctttgacccgtcactcctccacctcctttatttccctgatgaccagaagtttgccatctacatcccactcttcctgcctatggctgtgcccatcctcctgtccctggtcaagatcttcctggagacccgcaagtcctggagaaagcctgagaagacagactgagcagggcagcacctccataggaagccttcctttctggccaaggtgggcggtgttagattgtgaggcacgtacatggggcctgccggaatgacttaaatatttgtctccagtctccactgttggctctccagcaaccaaagtacaacactccaagatgggttcatcttttcttcctttcccattcacctggctcaatcctcctccaccaccaggggcctcaaaaggcacatcatccgggtctccttatcttgtttgataaggctgctgcctgtctccctctgtggcaaggactgtttgttcttttgccccatttctcaacatagcacacttgtgcactgagaggagggagcattatgggaaagtccctgccttccacacctctctctagtccctgtgggacagccctagcccctgctgtcatgaaggggccaggcattggtcacctgtgggaccttctccctcactcccctccctcctagttggctttgtctgtcaggtgcagtctggcgggagtccaggaggcagcagctcaggacatggtgctgtgtgtgtgtgtgtgtgtgtgtgtgtgtgtgtgtgtgtcagaggttccagaaagttccagatttggaatcaaacagtcctgaattcaaatccttgtttttgcacttattgtctggagagctttggataaggtattgaatctctctgagcctcagtttttcatttgttcaaatggcactgatgatgtctcccttacaagatggttgtgaggagtaaatgtgatcagcatgtaaagtgtctggcgtgtagtaggctcttaataaacactggctgaatatgaattggaatgawaaaaaaaaaaaaaaaattccggaattcgatatcaagcttatcgataccgtcgacctccga

SEQ ID NO: 2494 - DNA, 1073 bp, Homo sapiens
ggcacgagaaaaactcaactcgtctcacaactcagaggtacaatgaaaaggagtttttccctctgtgattggaactttctcttgagccctttcccttaggggatactaggagacaattacatctctaattcaacctaagtttattcccttttagtggggttcaatttctgttagccaaaagtgctcagtccctcaaacagcttatcttttgttgtttctctaagattgtgtagaatttggaaagggtatagcttatttgaccttatggctttgtgcggaagccggggtccccagtagatctcctggcttctggataagtttctttgctgctgggttgctaggtgcctcattggcctccactgccaacttctgggtggttattacttagggttgtgactattgcttgggcaatgcacctgcaggtgctttctgggcaattccatttcatccggctcttgatggcaacatcagcaccttggggacactctgcgatatgtgttttgcttctgttttttgtcccggattttctgcagggtcccctgtctcaataaggaaaactccttctatcagtttatccagggtaggcaggcaggtacttctaggtccgacgcagtgtgcctcagtggaccaggatcatggacacaggacatgggtaagttcctgaactcctctctgcctaaggttcttcatctatcaaatgaaagtagtaatagtgagtattcactgaacacttcctatttggctgcactttttaatgtgtttcatattatgatgtgccaggcagagctctgtaataagtcagtgcttctcaaactctctgtggtaaatgattaccttttttcttgaatttccaatttgccacagatcaatatttctgcaaagtactttaaaagttacttcctatgagcttttacagtgacaaatgaaaattttaaaaaaaaccttaaaattgaaatcactgtacaaattagttattggttataaattactacaaacacttcaataaatatttaacaaataaaaaaataaaaaacttaattcctagaaaatgacataaaaaaaaaaaaaaaaaa

SEQ ID NO: 2495 - DNA, 1290 bp, Homo sapiens
ggcacgagttgcagagccaccttagggcacaggtggtggctggctgtgggatcctcttctcatgcatgacacctctaggcatcgggctgggtgcagctctggcagagtcggcaggacctctgcaccagctggcccagtctgtgctagagggcatggcagctggcacctttctctatatcacctttctggaaatcctgccccaggagctggccagttctgagcaaaggatcctcaaggtcattctgctcctagcaggctttgccctgtcatggcctgtcttcatccaaatctagggggcttcaagagaggggcaggggagattgatgatcaggtgcccctgttctcccttccctcccccagttgtggggaataggaaggaaaggggaagggaaatactgaggaccaaaaagttctctgggagctaaagatagagcctttggggctatctgactaatgagagggaagtgggcagacaagaggctggccccagtcccaaggaacaagagatggtcaagtcgctagagacatatcaggggacattaggattggggaagacacttgactgctagaatcagaggttggacactatacataaggacaggctcacatgggaagctggaggtgggtacccactgctgtggaacgggtatggacaggtcataaacctagatcagtgtcctgttggtcctagcccatttcagcaccctgccacttggagtggaccctcctactcttcttagcgcctacctcatacctatctccctcctcccatctcctagggatggcgccaaatggtctctccctgccaattttggtatcttctctggcctctccagtcctgcttactcctctattttaaagtgccaaacaaatccccttcctctttctcaaagcacagtaatgtggcactgagccctacccagcacctcagtgaaggggcctgcttgctctttattttggtcccggatcctggggtggggcagaaatattttctgggctggggtaggaggaaggttgttgcagccatctactgctgctgtaccctaggaatatggggacatggacatggtgtcccatgcccagatgataaacactgagctgccaaaacatttttttaaatacacccgaggagcccaagggggaagggcaatgcctacccccagcgttatttttggggagggagggctgtgcatagggacatattctttagaatctattttattaactgacctgttttgggacctgttacccaaataaaagatgtttctagacaaaaaaaaaaaaaaaaaa

SEQ ID NO: 2496 - DNA, 1629 bp, Homo sapiens
ggttaaatcaagatataataggtatcactaccctgtttctttcaagtcttttgatggtgacattaagctctttaattcttgagatgtggtattgcttctggcttaatatcttagtagggagggtaagttctaggggcttccatttagcccttactattaaaatgactcttatcagttgggtcagaaagccaatatgggagctctgccaatagtcaagtatgtctgttccaagtatttattcaggaactgaggagatamcaacaaagtaggcccattgtactatggggtccactgtgaggtggacttgagctaagcatttcatctattacctgaccactgtcagcactcactttgactgataggccacagtagcattttgagtccccaggaattagtaatccctgaaagtctgggtatttccttttctctaatccgtagtcactctagtaaatggcctttggggaagcttggatgaggatttacagtatgtacttgtacttgtgggaacactacaggtttttcctcaggggacctgggcttgttaattgacttgggtctagaaattagatgagaggtcaaaacttttctagtccaggttttcactaccagagctggagttttttcagttgtacagatgaawcyggtttggtaggctgcttgtggaatactgtgtgatcaattactgccaaagatcctggtgggccaaggtgttctgattaccagtacaactttactgtatttatagtagatttcccaccttgtctttggtgattacatgctgctacttggcctctgttattttaggatcccgttacccctttaaatcagggaacccacttagtggtggcatttcccatggccatacctaggggttgtgacagagaccttagggactgtaaaacctaaaatgtttatctgtggccctttataaataaagtttgccaacccatgtctaggggaacagggacacactgcaaaggggagcaaccacagagcttttcaaggatgaaggtgatcccctcactaatgcatttctttttttgttgttgtttgttttttttttgtttttttgagacagagtctcactctgtcacccaggctggagtacagtggcacgatcttggctaactgcaacctctgcctcctgggttcaagcaattctcatgcctcagctactctggaggctgaggcaggagaatggcttgaacctggaatggggagcttgcagtgagccaagatcgtgccactgcactcctccagtctgggcgacagagcgagactccgtctcaaaaaaaaaaaaaaaagcattcataaaatgaaactaagcggggaaaggtaggggagagtcatggctctcctcccagcagagtggaaatctttagatggtaattaagaaatgggatgaccagcctgggcaacatggcgaaaccctgttttacaaaaaaatacaaaaattagtcaggtgtggtggtgaacttctgtgggcccagctaactcaggaggccaggatgggaggatcacttgagcccaggagtttgaggctgcagtgagcagtgattggacaactgcactccaacctgggtgagagagcgagagcctgtctcaaaaaaaaaaaaaaaaaaactcgag

SEQ ID NO: 2497 - DNA, 1610 bp, Homo sapiens
ctgatgcagagatggaggatgtcaataaccctgggctcagggtcagagcccagcctggggactatgtgctggtgaaggtgaggagtccttttgggcttttggcttgcactgtgaaatgagtgttggtttggatatttgtggtaataaagttttttcctagagacacattttagtaaaataaaaatcccctctcaaccagtacaatggaagggcactttggattggattttagactgctccttactaatgccttcttattcttcttacctattctcctgccctggaagcgttctttgtgggaatttggtgagtttggagtatgcagtggcatgtagtttctcgctgcagagaggccaggaggtggagtgatttcgagtgagtagagagtgttccctgttggagatcaacattttctttgtgatctctgacggctcaggcctctttaacttacatgtgctcgagtttcttgggtctcttccctggactcacagatcagctatatggctgtgggattttctctccctttctttctctctttctttctccctttcactggcgatatgcttctcttattgtctccttccatttcttcctttctcctgccttctcttctcacactgcccagttctgctactgccaccttccctgtcttgttctcatatctgcttcgcctcagaaccagaagctggcaggacacagactgatgccctagagcatccacagaagttcctttaagggcagggaaaatgcctgttttgtttctgtttgtttatctttgtttatcttctagcacctagggcaattccgggtacaaaatatgtacttagtaaggatttactaatggacygacttgctcttatgataagacatgtgaccacagataactttggggtcacattcttttagctctcaattggaggaragagaacatttctcaccaaatgttggctgtaaatatcctaaggaaggatttgactggatcagccttggagttaggagggcagggcctgtgatgggcagtttcacctgaattttatggttagagctgaggaggagccatcttccaagagaaaagggagaagtggctgggactgacctgctttgacttcttaaattatatccattgccattccatgagacctcgctccctgccaggatcgggggcacacaggagccatgtggtctctgccagccggtcgcctccatcagattccttttgggggcttctcctctagaggctccacatgaagtcccagtgctacagtcctagttattttgccttcttctgcctggttttctttcagatcacctcagccagttctcagacacttaggggacatgttctctgcaggaccactctgagggactcttctgcatattgctgacctgagaggatggcctcagagctgacttgggcaatcctccccaacaggaaggggagacattgcctgccactgaggaaacaggtcatgaaggtggagataagctgcaaggggcgaagcaactttatgtcagtggaaaacgtgtctctttaaagctgctatgtgaacagcttttacagtcattaaatttacctaaactaaggttaaaaaaaaaaaaaaaaaactcga

SEQ ID NO: 2498 - DNA, 1945 bp, Homo sapiens
ggcacgagcccaactgagccctacctcccttaccaaagaagttcatggccaagccatttttatttagcaaataagggcttgttttccttgattgtccaaagcacaaggggagaaaaaccacccattggcttcatgtttacctgcactgcggggctgtcttgtctgtttcagttctgtttcacatgtggagttttcactgatttcaagaaggaatgtatgcatggagttgagcaggatacagtatcctgaatgagggctgaatgttctgcactagaagtgagcgtatcaagtctttgtaactaagaatgtgatgttagattgtagctgaggggaagaaacacaaatggcttgggttgtatctaaatcctgggtctgccaggtgaaaacttagatgttgctttcaaatgacactaatgatttctttcagtgctgtttagcatgagtggtcattgcaaagagctgtgaccactgtactacccagtatggtggctactggtcccatgtggctcttgagcacttgaaatatgggtaatctaaatggagatgtggaaaatacaaactggattttaaagacttagtagacttagtattttgaaagagcaaaatagcccattgacaattttatgttgattatacatacattaattttacttgttatcttttaccatttttaagtgcagctactaaaaatttaaaattctgtatgttgcttacattatattgctcttggacagcactatactaaaggcataaatgtaagattgtgtttcagagggcacccgagcactgcttggtttatatgtattttctaggccttccctttggttccctggttacctttaaaaatacatgtcatgatatagacatggcatatctgagacaaaccttggactgagacaaacctgagtttcaatctcaattgtttgtttgtggcttgcctctcagcatcttaaattctctgaatcttaagttcctccactgtgtaaaagaaataatatccctctgacctcactgtggttaggcaagagacaatgcagtgattttttcagtaatattatgagacattttattactataattaaatgattgtattttccccagattgacaaattcaaattttctattttgaaatcttattgcaaatgttaaaaaaacaaacaacccaccctttggctcctgttatgttgtcttccagctgctagtaatggaattgggacagctaatgttccctgagagccatggggaaccaggcagtgtgcttttcaggaactgtcttactttatcctcacaacaatcccaaaaggaaaaacctagttttatctctatttaatagctgcagtgactgaggcaccgcaaggttaggtgacttgcccaaggtcacacagcgaagcattgagcccgggcagtccagctctagagccgtgttctttgcctccgcccaatattgtccaccagtgaggagaagacggaaccaaagaaccaacagtgaatgaatactaacaggaatcctggctttcatggacatctattcttgtgatttgacagtgtatatgtgagatacttcctcttagaatgctttttctaattcatacagtaggcttaaatatgtcatggttttagagttttccttaaggaatacgttgattcccaggcacattacagtctgaatcagtcttaagaaattccaggatagaggtggaagaagttttagtaaattgttgtgcagcatggtgaccgcagttaataataatgtttatatatttcaaaattgctgaaagaggagatttcaaatgttctcaccacacccacacacaaaaaaaaatgataagtaggtgaggtgatggatatattaactagcttaatttaatttttctcaaaatatcacattatacttcataaatacattcaattattattagtcaattgcaaaaaaaaaaaaaaaaaa

SEQ ID NO: 2499 - DNA, 1455 bp, Homo sapiens
ggcacgagctcgtcccggggaagagactaaataacagagcccctctaggagaagccacgggatcccggcggcaaggagaacagaacactgaagactctagaaaagcaaagccggatttctggaaagtgcagaattcttttggttctttggttccagagagagagaagatgcttgtgccaggtggcaccagagtttgccaattgatccttcttattctgtgtgtacatgcaaagattggaccatgttacatgaaatagtgccagctggaggttctttgccagcaccatgccaagtgaaataatatatttactctctctattatacaccagtgtgtgcctgcagcagcctccacagccacgatgggtttgtttctgttttcttgggtggggagcagggacgggcggagggaggagagcaggtttcagatccttacttgccgagccgtttgtttaggtagagaagacaagtccaaagagtgtgtgggctttcctgtttctaaactttcgccactataaaaccaaaaaaaggaattgagatttcaccaaccccagtgcccagaagagggaaggggagtggctggagggagcagggggtgggacagtgtatcaaataagcagtatttaatcacctctggcgggggcctcgtgcaaggggagactgacaccaagaacagccagtagttcttctcccctgcactctgctccctgcgcggtaaccccaccactcctgaagcctgcccagtctccttccttccctgcttggtgagtcgcgcatctccgtggttatcccgctgtctcctctccaagaacaagcagagcccgggccactggcccttgcccaaggcagggaagaaggatgtgtgtgtccaggaaggaaaaaaaggtggatcagtgatttacttgaaaacaagctccatcccttttctatatttataagaagagaagatcttgagtgaagcagcacgcgacccaggcgtgtgtgaattgaatggagacgcttcttttctctttctttaatttttgtttttgttctttttttctttaaggaaagttttattttactgttcattttactttcttggtaacaaaaactaaaataaggaatagaaaagctgtttttcaggctgacagtccaattaagggtagccaagaccttgcatggtagagtaggaatcatagtgtcagtgaggtcccgtgagtctttgtgagtccttgtgtcatcgttcgggcactgtttttttatgcaagggcaaaaatctttgtatctggggaaaaaaaacttttttttaaattaaaaaggaaaataaaagatattgaggtcttcctagtgttacttaaattaagatcaaggtaagaaacattgtaaaaaaaaattacaaaagtgctatttgtttcctaaaaacagtgatttctattaaaaaggtgtcagaactggagaaaaaaaaaaaaaaaaaaa

SEQ ID NO: 2500 - DNA, 743 bp, Homo sapiens
  SITE (718): n equals a,t,g, or c
gtcctgawcaccgcactcctcatcgtcctcacctaccctgcctggaccttcatcgactgcctggactcggccagccccctcttccccgtgtgtgtcatagttgtgccattcttcctgtgttacaattaccctgtttctgattactacagcccaacccgggcggacaccaccaccattctggctgccggggctggagtgaccataggattctggatcaaccatttcttccagcttgtatccaagcccgctgaatctctccctgttattcagaacatcccaccactcaccacctacatgttagttttgggtctgaccaaatttgcagtgggaattgtgttgatcctcttggttcgtcagcttgtacaaaatctctcactgcaagtattatactcatggttcaaggtggtcaccaggaacaaggaggccaggcggagactggagattgaagtgccttacaagtttgttacctacacatctgttggcatctgcgctacaacctttgtgccgatgcttcacaggtttctgggattamcctgagtctcaaacagttggaaactagcccactggacatgaaagccaagacataggaaagttattggtaggcaaatcttgacaacttatttttctttaacaacaacaaaaagtcatacggctgtcttgctactaccagataaatgatgctgctgtgtgaaaggaaaaaaaaaaaaaaaaaaactcnagggggggccggtaacaaattcccc

SEQ ID NO: 2501 - DNA, 715 bp, Homo sapiens
gccccttttatttgcttcattgtgcaatggtataatttttatgcttttctattttcctgctttaaagagcttttaaagtttctgaggctctgccaaggtgttattacatttaaccctttgtccctgctttcttttctggtcctgaggtctcctattggtgtcacaggcaggtgctttgcatgccaactctgatttatccctgatgggcccttatgacgatatgaggcaacagttggtttgacttagcctgtggcagaggcagctgcacacatgtgggagggatatgaacttctgagaaaagagaaaatcccatgttgtacccgactctaataggccaggaacgagctttgccattggaatgtggcagtcctgcctctgcaggtttgttttgctgatagaaggtctggaacctggggcgctccctgcattccctggctctcccagcagtaggcatgggctgacggtgtcccatgtggaaggccttggctctctcatgaagtgtggcctgtaatcagcctcagcggcaagcctttactgttctctggttttgtccggattctcttttgtcgtctacaccctgacccatgccctcccaggccctggctggggctgtactccagagcaataggcttcccagaatctccagtctcacttccatagcaccagtggaggcttctgctgccacaccctgtctggaggcactgacctccctcga

SEQ ID NO: 2502 - DNA, 1040 bp, Homo sapiens
gtgattgtctctttctgttttgagttttgtttgcgtgtatcatttttgttctacattttgggaggggaaacattttccgttaaggaaggttgttgccagtggatttgactccaagggactagagtgtcgtggtgggggtggggaggggctgcagggtgatcattggctactgagcctccacaragagcatgtggtgccctgcctttgggagggtattttgctctcgttagttttgtgggcagcctcagattccctgttgagttgctgttaagaaatggagatttctggctctcattgggtaaggttttctgagttttatatcttattagatcacatccctttacccagaacaaatgcttcactgtcttctgattggcagtactcctgtggctttgtgccttgactcattttgttgtcttcagccttgaaggccccttcccacatggactgacatccactcatgtgcctgatccctgaagcctcccagcacccattcagttgcatccccagggcacaggactttgatctcttctgttgccctcgctaggttctccctggtgggttagtgctttgtatctgtctctctgcccctcactaattctacacccatgagaattagacattattctccttaaatatataaggaccatataatctgtatctttttggtgtgtgtatatggtatctggcacatggatctctgattaccagcctgacaycaacaaatcccctcagttacaacgtataggttaaacaaagcttttaaaagctcatgtggtatgacctcaaggttgctaacctggtcactcatggtaattagaaactctgattggcagctttgtatttcttgactaaaaacctaaataaactgattaggttttaggcgttctttcaaagaggttcttgagaagattgagaactatcctatttggtgcttagtgaaaagattttgaattactgtacgtaccagttgttgccatttctttattaaattcagaagtttttttgccaaaaaaaaaaaaaaaaaaaaaactcgagcc

SEQ ID NO: 2503 - DNA, 3511 bp, Homo sapiens
  SITE (779): n equals a,t,g, or c
caccaagtgctcctccacccctgataacttgagccggactcagtcaggctccagccttgccttggcctctgcggcgacgacagaacccgagagcgttcattccgggggcacaccctctcagcgagtggaatcgatggaagccctgcccatactgagccgtaacccaagcaggagcacagaccgagactgggagaccgcgtcgscgrcatcttccctggcctcagtggccgagtacacaggtcccaagctctttaaggagcccagtagtaaatcaaacaagccgattattcacaatgccatatcccattgctgcctggctggaaaagtgaacgaaccccacaagaattccatattggaggagctggagaagtgtgatgccaatcactacatcatactgtttcgtgatgctggctgccagttcagggcgctttactgctactatcctgatactgaggaaatctacaaactcactggcacggggccaaagaacatcaccaagaaaatgatcgacaaactgtataaatacagctcagaccgaaaacagtttaacttgatcccagccaaaaccatgtctgtcagtgtggacgcactcacaatccacaaccacctgtggcagcccaagcggcctgcagtgccaaagaaggcccagactcgtaaatgaccccggtgcagctggcgtccaaagggtgacccagactcgtaaatgatgcccttgtggctggcatccagagggtgccacggggtccttatttattgttttcatctatttgggtacgaantgtgcaaagtcacagaccttttgcaaagaggtttctagacagcagaagaaaacccctctctcagcgctcatctcacgcagaggatgccaggcagggtgaggatgggggagtagatgccgcttttgcagtggctcgcactgctgtggccactgctgaccactgaggctcccagcggagggtgttcacagccaggtcccgggccacggagctcccttacttgaagttctccttcagcatagattagacgtgatccactttgctttcttgcttctcacctcgcccccttgcacattgcctgacaccctcatattggccagctgtaatctcgtgactatgggactgaggctcaatcttggcttggggtgtttgaatgtctatagcaaaggaattcataatgggaaatctttttcatttgagaaattgtatgatatttattggttgtgtctactgccaacatttatatccaattctaagatttctgaaaaaaaattcttatcccttgctgctcagaaaaagtttacggaaaacaccagttcactaaaagcaccgaaatctgcaaagcctgtcttccgctagaacaacgtctacaaatgtgaagatgatgacttctggcacgcggtcatgagggtggggaatggcactaggagctgatgtttgcctcatttaaagtaggcaagccgagccaactgcagccatcattcattaagttttgggtagtgctctaatggtttgttcactttaataaagacagattttggtaaagtagaatatttttcattctgagcatgtttgtcccaaaaggtgatgcacttaagctgacagtcccttcagtggttttgttaggtcacggcttgtcctgtctggattctgcatctggaagcgctgcatgctctcagaggagcgtgccgtttcccctgtagatggatacttttgttttgttgcctatttaaaaacaattaagtggttatttgcagttatttcagaactccaagtaagtggatggctttgggttctttctgccttggtcccaatggtgttgatgcttctgtggagcgcggacattcccaggagcaggtgcgtgccagccatgctgccagacactgctgcaactgaccagctgccggaagattctggagccactaacattagttttgcacatattttcttgggagtgttacttgaatctatctcaaactgcagaaaaaatcaaaagatcaataattgggagaaaaagagacaaatttaactgttacataattttagatagacaaaaaacatgagtgagtcgtgtacataaggagggaacatggtacagaaggctagaaggaattataggtcttattcccctttcctcagtcctttgaagagaagtacagtctcttgcgattttgtatatatcgtgttcgacacagccgctctctgtcctgtaaatagggaactaaaggctgtatgatttctcaagtgctgagttacacagtcctgagtgagctttctgttaccatactttcacacgtgggctttatttctcactgtatgtttgatatgatattactgtatttattttaagaaagcactaagatgtaataaagtgatgaactaatttgctttacattgaatcgtatgtgtgaggttgctgtggctcatttcgctgaccaggcgacaccaactccttgctttataggagtttcacattgttctttaccatggccctatcgaagtcagtggaattggattctttttaatgaagagctagaaaatatctggcatagagctggaaaattgcattcccatgggacgtctgaatcaattctggattttctccatggaatgagtcagtgtgtggaacatcctgaaacttgtccttaagcgtgtagttttcactgttcgttgcgagtaagcactaatgtggcatggacattcctgatgtcccaagtccccaggccagtgttcgcctaatgattgacagaagcgtccckgcgttcttcakgcttggacacagcaacccttttaattagtcttgaaaagtttcagacacaggattaattttcgtggtggtgcttttgggcctttctggcttgggtggtggtaaagtcatgattttgcagttgataacactgacttataactctgtttatcaatgtctcctatattcaaagcccctgcagtggtatttgtgtctcgttgcaaatttctttcagcggaaagcttgcacaactttcgttgtgtctcagaattctaaccttgttatttaagacaagctgctctacccatttaggatataactttgtaaagaaagtgtaaacccaaakgattcaatgtatggatgaagtttatgtgtaaatccttggtaatgctagaawtctgggagccccagaagggttgaaagagaaatgaaacttgcgtgagtcccattattttacgcatgtatgtgcagatacgttctacccacacgtgtgcgtgcacatggctgtgtgcgtgcaccaaagatggactgctttccatgtgtccttttgactttctgcacgtgtcacgcggtgcagtctcttagcagacttcaggcccaaactgtattcttcactcaggcaaaattgaaaagtggaataattctaaattacttctaggttatacttttacctccctgaaattgtagttgtcacttggagggcaaaatatttattgaaataaaattttctgttaaaaattcaaaaaaaaaaaaaaaaaaaaaaaaattc

SEQ ID NO: 2504 - DNA, 2058 bp, Homo sapiens
caggaattcggcacgaggtccctttggagtctgttaagcccagcagcctgccgcctctcattgtgtatgaccggaatggattcagaattctgctccacttctcccagacgggagcccctgggcacccagaggtacaggtgctgctcttgaccatgatgagcccggctccccagcctgtctgggatatcatgtttcaagtggctgtgccaaagtcaatgagagtgaagctgcagccggcatccagctccaagcttcctgcattcagtcctttgatgcctccagctgtgatatctcagatgctgctgcttgacaatccacacaaagaacctatccgcttacggtacaagctgacattcaaccaaggtggacagcctttcagcgaagtaggagaagtgaaagacttcccagacctggctgtcttgggcgcagcctaacttttcacaagatggacccttcatttcaagcttaggctggcgttacttttgctgtctagtcaggactaatcacggtgtttcagtgcggagtgccaagagtcctatcctgacgtcaggctctgggtgtcaacctctgacttattctgcagatgctctgtgtgtgtgtgtgtgtgtgtgtgttcggggagagggtggtagcacagggcttgggatatcggcagtgtgggaaatgcgaagcatttctcatcatcatcatctctgctacagtcatgtttctgcatgtcagcgagcgacactgtccctgcctcaggttggaggttttatcagccaaagtgtttttttcatgtatcgttcgttccattcatccactctgtgccttgtcagcctttgaaaggcttggttgctcccaggctgctgttctcagggaccttaaaagggacctggttagtcttggggcagagagtatctacttgggcactctcttccaagaaagaccttgtctccattttcattagacaatgcttcttgtgtgtgttctggaagatcttctaaatggaatgcttgttgcactgttcccaggcgagtggctgccatgagacctgaggaccacacttgggggaccaatcatgtccttcaccactgtgccttagaatcgcccctggacagagttcctgggcagaggggaaagcagctcccaggccttactcaggcctcaggtccatgggttgggcagccagtctgggcccttctcaggatcctcatctccatcctcatcctcttccttcacagcatttacttggagctccttgtgacacaccatgtcagtcatgatgaatcggccaacagccagcccttgccagctgacgtcacagtctaagatgggaaactgtggtacagatagacatgaagagagcttagcagtgattgaggtggtgactaaatatacagtcattgaataaataccatgtagcaagtgtactttgtggagtgttgagtaagtggaaaatggaaagccagttgcatttagagatgataggcctaaagggaactgtcttctgtcgagaagtaaaggaaacttcatgaaggatgtagaagcttagctgcctcagagaagagagaccctgaagatctgaggcaagctggacaggagaggtggatatttgttgatggaagaattcaagtttataatcaattcccacttagcacctactgtgtgctaggaacttgaatgtgtatgtttgacaagtcctgcttggcctgatgggtgggagaaggaacctgagcctggctgagatggctaggcggagggctttgaagtccaagcagctgaactggctgggtgggtttctacctttgaaactgcaagacttgtttggagctcttaattacaatatctgatatttttacagtctgatcttttgacttctacatatagtggaaatctgccaatactaattggtggagatgggaactgtaaaagatcaagtatgctaattttaagcaaatgtaaaaactcataaaacaggtaaacagtggggtgatttcatttgccataattcacataagacgaattttaatctaaaagtactttcttgcttgtaaaaaaaaaaaaaaaaaaaaaaaa

SEQ ID NO: 2505 - DNA, 840 bp, Homo sapiens
aattcggcacgagttggctgcggctggtcatcttcccacctccacagtgggccgagctgccaaacaaggggtacacatgtgccccctgacataggccaggtggtctctgccctctgtagctcccatgagagagggctcctcggaccgaaacaggaggccactgcccttgcgcacacaccgtggccgggtcctcctgggcggagcgctttccgtgtgtgggaaagtcaagggcagccccgagcctcgaagcccaggctcccagccccgcgccatgttgcattcccgcctctactccttggtaggctggttgctttgagtggttctttttaattctttctgttggtttctccttttcctttgcctgggttttgctttaacctctctgttgcagagatgcagagcactcagagagcctatttctatcatcgctttcctattctccacctagaaccaggtgactggccgcccgagtggtgtctcttgtgtgtgtggtgcgtccaaagctgtgcaagaaatgcttctgcctaggttttctcgcgccccccccttgccttggcttttcctgcctgcttacacccccgtttccctgatctgcccctgggcttctgggcaggttccccgcactgtgcctatcgccgggcctgtaagtaagcaaactgggcaaatgaggggctgtgtctggaatttggagacgtcacatttaaatcttaaaacactgtaatcccagcaatctgggaggctgaggcgggaggattgcttgagtccaggagtttgagaccattctgggcaacatagggagaccctcatctctacaaaaaaattaaaaaaaaaaaaaaaaac

SEQ ID NO: 2506 - DNA, 2387 bp, Homo sapiens
agatggcggcgctgaggggtcttgggggctctaggccggccacctactggtttgcagcggagacgacgcatggggcctgcgcaataggagtacgctgcctgggaggcgtgactagaagcggaagtagttgtgggcgcctttgcaaccgcctgggacgccgccgagtggtctktgcaggttcgcgggtcgctggcgggggtcgtgagggagtgcgccgggagcggagatatggagggagatggttcagacccagagcctccagatgccggggaggacagcaagtccgagaatggggagaatgcgcccatctactgcatctgccgcaaaccggacatcaactgcttcatgatcgggtgtgacaactgcaatgagtggttccatggggactgcatccggatcactgagaagatggccaaggccatccgggagtggtactgtcgggagtgcagagagaaagaccccaagctagagattcgctatcggcacaagaagtcacgggagcgggatggcaatgagcgggacagcagtgagccccgggatgagggtggagggcgcaagaggcctgtccctgatccagacctgcagcgccgggcagggtcagggacaggggttggggccatgcttgctcggggctctgcttcgccccacaaatcctctccgcagcccttggtggccacacccagccagcatcaccagcagcagcagcagcagatcaaacggtcagcccgcatgtgtggtgagtgtgaggcatgtcggcgcactgaggactgtggtcactgtgatttctgtcgggacatgaagaagttcgggggccccaacaagatccggcagaagtgccggctgcgccagtgccagctgcgggcccgggaatcgtacaagtacttcccttcctcgctctcaccagtgacgccctcagagtccctgccaaggccccgccggccactgcccacccaacagcagccacagccatcacagaagttagggcgcatccgtgaagatgagggggcagtggcgtcatcaacagtcaaggagcctcctgaggctacagccacacctgagccactctcagatgaggacctacctctggatcctgacctgtatcaggacttctgtgcaggggcctttgatgaccatggcctgccctggatgagcgacacagaagagtccccattcctggaccccgcgctgcggaagagggcagtgaaagtgaagcatgtgaagcgtcgggagaagaagtctgagaagaagaaggaggagcgatacaagcggcatcggcagaagcagaagcacaaggataaatggaaacacccagagagggctgatgccaaggaccctgcgtcactgccccagtgcctggggcccggctgtgtgcgccccgcccagcccagctccaagtattgctcagatgactgtggcatgaagctggcagccaaccgcatctacgagatcctcccccagcgcatccagcagtggcagcagagcccttgcattgctgaagagcacggcaagaagctgctcgaacgcattcgccgagagcagcagartgcccgcactcgccttcaggaaatggaacgccgattccatgagcttgaggccatcattctacgtgccaagcarcaggctgtgcscsaggwtraggagtatgagaagccagacgtcctttgggtccatgtaccccacacgcattgaaggggccacacgactcttctgtgatgtgtataatcctcagagcaaaacatactgtaagcggctccaggtgctgtgccccgagcactcacgggaccccaaagtgccagctgacgaggtatgcgggtgcccccttgtacgtgatgtctttgagctcacgggtgacttctgccgcctgcccaagcgccagtgcaatcgccattactgctgggagaagctgcggcgtgcggaagtggacttggagcgcgtgcgtgtgtggtacaagctggacgagctgtttgagcaggagcgcaatgtgcgcacagccatgacaaaccgcgcgggattgctggccctgatgctgcaccagacgatccagcacgatcccctcactaccgacctgcgctccagtgccgaccgctgagcctcctggcccggaccccttacaccctgcattccagatgggggagccgcccggtgcccgtgtgtccgttcctccactcatctgtttctccggttctccctgtgcccatccaccggttgaccgcccatctgcctttatcagagggactgtccccgtcgacatgttcagtgcctggtggggctgcggagtccactcatccttgcctcctctccctgggttttgttaataaaattttgaagaaaccaaaaaaaaaaaaaaaaaaaaaaaaaaaaaaaaaaaaaaaaaaaaaaaaaaaaaa

SEQ ID NO: 2507 - DNA, 2064 bp, Homo sapiens
  SITE (1596): n equals a,t,g, or c
  SITE (2005): n equals a,t,g, or c
  SITE (2047): n equals a,t,g, or c
  SITE (2057): n equals a,t,g, or c
ccggagggccgctggtgtctgtgtacagggcgtgctgtctgtggaaacgcgagggcacactagcactttcctactgcstctgtcaccgggtccctccacccttgtctcctgtgcggccagcgtcagagccatggcgacggaggagaagaagcctgagaccgaggccgccagagcacagccaaccccttcgtcatccgccactcagagcaagcctacacctgtgaagccaaactatgctctaaagttcacccttgctggccacaccaaagcagtgtcctccgtgaaattcagcccgaatggagagtggctggcaagttcatctgctgataaacttattaaaatttggggcgcgtatgatgggaaatttgagaaaaccatatctggtcacaagctgggaatatccgatgtagcctggtcgtcagattctaaccttcttgtttctgcctcagatgacaaaaccttgaagatatgggacgtgagctcgggcaagtgtctgaaaaccctgaagggacacagtaattatgtcttttgctgcaacttcaatccccagtccaaccttattgtctcaggatcctttgacgaaagcgtgaggatatgggatgtgaaaacagggaagtgcctcaagactttgccagctcactcggatccagtctcggccgttcattttaatcgtgatggatccttgatagtttcaagtagctatgatggtctctgtcgcatctgggacaccgcctcaggccagtgcctgaagacgctcatcgatgacgacaacccccccgtgtcttttgtgaagttctccccgaacggcaaatacatcctggccgccacgctggacaacactctgaagctctgggactacagcaaggggaagtgcctgaagacgtacactggccacaagaatgagaaatactgcatatttgccaatttctctgttactggtgggaagtggattgtgtctggctcagaggataaccttgtttacatctggaaccttcagacgaaagagattgtacagaaactacaaggccacacagatgtcgtgatctcaacagcttgtcacccaacagaaaacatcatcgcctctgctgcgctagaaaatgacaaaacaattaaactgtggaagagtgactgctaagtccctttgctcctgcccgcgagagactgtcgggaagtygacccggattggcaagaaacagggtgtcttggaggtggtcccccagatctgcgcctgggggtcaggacagggcctgatttgagcctcctctctgaagatgatttggccgagcggaaggtgtggaccaccggaaagttcttaaaagttgctggtgacatttcttgccaattctaacactgtctagggaagagttcctagtctattgtgttcaaacagagtcaacaaaagtttttaattttttattacagaagggtgaagttcaatttaacatgcgttgtgttttttcagtaaacgttctgtatctttttgatattccatgacccagtgcacgctgtggcctgtcaccgccaccgtggccccgccagctggcctcccctttggcccacgccggccgcccccattctctgctgcgtagatgcccnggcccagggccctgactcctccattcccgccagtagctgttcctagtgtattttcgtctttctggaaaacagcattgagtggttgttttctgtgtaaagagccgtttgtgtcttgggagtttgtggcccacatgccgatagcacggtcatcgcacatgactctcccgtttgtctcagtgtccctgcaacaagcagcaccgcagactgtaataaaaggtggggttttgtgaatggttgtggcaagtgcgtccttgtgaagctcgtctccatgtggctttcttggagaaaggctcccctggggcaagagggtggaaggtttctttggacaggaggtgctgargctggctgcamctgctctctgaagacgccttcctytctaggttcattgttaatgttgctggrgccgggnaacggggttgggaagttcttaatttcccaaggagccagcccngatggacttnccttgga

SEQ ID NO: 2508 - DNA, 1127 bp, Homo sapiens
gctgcactccagcctgggcgasgagwgatattgkcactgtctsccccttgctaacctcctaggtgcttaggataaaacgtcaaatatttaacatggcttcacagacatcttgkatcatttggcccctggctaccttacctcacccaatttcctcctttgctctgtactctagctacactgkccgaggagttcctaaaacatcacgctgggtccgaccacaggatcttcacatgtgctgctccctctatctgcatcgctctttcctcttctcttgtttgcttaactcctacttaccctcgggcttaatcagcactttctcacctctcctagtctgttgctcttatttaagatcaaacagcagagaaatgtgaagtccactgacttccgggtggaacagggttcagtatgccaattaaattattgggtgctggctgggcacggtggctcacacctgtaatcccagcactttggaagggcaaggcggytagatcacttgaggtccaggagtttgagaggacaacatgatgaaactccatctctactaaaaatacaataattagccaggcgtggtggcktgmwcctgtattcccagctactcaggagactgaagcaggaggatcacttgaacctgggaggcagaggctgcagtcagccgagattgcatcactgagctctagcctgggggacagagtgagactctgtctcaaaaaaaaaaaaaaaaagttatatctaatgtgctcagaagttaacaatagaccaaaatttcatcaaggctgtgtgtgagggtattatctagttacagattacagaggcttggctgggcatggtgacttaacacctataatttcagcactttgggaggcccaggcaggaggatcgcttgagcccaggagttcaagaccagcctgggcatcacagcaacaccttgtctctgcaaaaaataaaaataaaaaattaactgggtgtggtggcatgcgcctgtagtctcagctactcaggaggctgaggtgggaggagtgcctgaacccgggagttcaaggcagcagtgacctatgatcgagcccctgcactccagcctgggcaaccaagcgagaccctgtctctaaaaaaaaaaaaaaaaaactcga

SEQ ID NO: 2509 - DNA, 772 bp, Homo sapiens
ggcacgagcacaagccgcggagtgtcagtggccactgcaggggatgtgcctcttgtggtcttggctctgggtccagcctaccttaaggtgtgtatttatcttccactataaaaactacaaacagctatttatttccaggcaagagttttaagaagaaccaaaatgcccccaaatctcactccactattgacggtttaaaaagtgaccacgtacgtgtggtgaaaaggttacaatagtgccagaaaaagcagcgtctgagcacccagggtcccatgcgccctgcttccctcgaaggtcactcttagcagctggtgcacatttccagagcacagctgggcctctccacaggcgcacctcagaggacctgcagccgtggttccagaccactacggtagagatacggcaataaagcgagtcacacaaatttcgtggtttcccagtgcatatggaagttatgtttacaggctgggcaccgtggctcccacctgtaatcccagcactttaggaggctgaggcaggcagatctcttgaggtcaggagttcgagaccagcttggccaacatggtgaaaccccatctctactaaaaatacaaaaaaattagctgggcgtggtggcgcacgcctgtagtcccagctgctcagggggctgaggcaggagaatcacttgaacccgggagacggaggttgcagtgagccgagattgcgccactgcattccagcctgggaaacagcccgagactccgtctcaaaaaaaaaaaaaaaaaaaaaaaaa

SEQ ID NO: 2510 - DNA, 1014 bp, Homo sapiens
ggtttaacataaatcaaatagttccaatgggttgcttcatatttgtgtgtactttaaagtcatgccagcttaaatgactgtgaggtacaatgtgttgactttgagttttgtaaattgataatttgttgctatgaaagttgtccatggtataactcatcactttttgaaggtacttagtatgtctgatactggcaagctgtcatgaaaaaattgatgcccagggaattccggggttttgctttcagatgtttgacatgtagatatttaattcttcttaagatttccctggacattgtcagtgtaaggtgtactgatctttaaacacaaactttagtttgggctcctgtttctcagcattctttgggataataatctgaatggtgtattctcaagttttttttttttttttttttttaagtgtatgaatcaccttggggatcttgttaaaaggcaggctatgatccagtgggtctgggatgagtcttgggattctacattttcgcaagctcccagataatgccagtgctgctggtccacagacagtactttaagcagcaagacaacactttgatggacaaagtggtgctgtgcaacacccatcacatacaaattaccagttgctttcctcattgtgttttggtgcatctaaagctaagatgatctggtgtatattcttgactcttgggtatccctgtgagcattaatgaatagtttaacaaccgaccatttggtctagcatgtatggagactaccaagacaggcttattgtgttggaagaagtgatgcttatgtttttagactcttatggaatataccaattcctgtatgttagccaaggttcttgctgcaaacagaagtgaatacaacaaactgctaacttgaaaagatgctgatagaggggttagaaaggcatagtgctgaatcaaatgtatttattttaactagctctgttcatgatggctggttaatttgggcaaaaagatttattgatgaatcatggagaaaaagtgggaa

SEQ ID NO: 2511 - DNA, 1642 bp, Homo sapiens
  SITE (5): n equals a,t,g, or c
  SITE (957): n equals a,t,g, or c
  SITE (1578): n equals a,t,g, or c
gaganagagagaactagtctcgagcacattctctgcccttggcctgacgtattctcccttatcagcacataccacaagtctttcaagacctataaaatcagtaccattttctctgggaagtcatcctgattcccctctttctgcgtatggtgaagaatgctttatggaatactctgcattcctttctctcaagacttagatttaccattaccatatggaaatttctaggctgtttccaatgcctaggtggtgctcagaagtgttagtggtttagtagaatcctaattgtggagaaagacagccaaatttgggaggtttttagcatagagtaaccctggcattcagggatgtttgctgtgcaagatgggtgtggtaccagaggagctgttcctggaggaactgaatctcagtggcttgaagtggtcagttccggcattggtatgttccccttctgtattgcacagagctgggaaaccactgaagtcatgtgctctgcagaacttgttcaactggtttcctctccacagacccctaattcagatttccacccttattcttttctgcatatgctcttagtctgggcttgttttaaggtttaccacagtagagttctcagtatagttatttatttgtcttgctgagtgtagagtgggtagggccaagtatgtactccctttgaaaagtgttatcagtaagacaagatagacaggtattatgtaaatcatggagtgtcagactccattagcaggtttatttctgtggatctaaccatttcacccccacactcatgtgtacatacacatatacatagctatcattatttagagcctactactagttgctgggtgaggtgtcagagccccggcattggaaagtagtcaactcacaggttggtaggaagaatttactgacagcagtataggtttgaaaaaggaaagttttattagaaagaagganctctgcagaagaatgcctcagcaagagagaactgagctcgcggtggattttccttagrgtatttatggaacttaaagcaggagcttaagggtagtttggsccrtattagccaataggycatgataaatgattacatttttagacgtaatgtcagcaagggttgcacagggagtttcggcatggcattccagagatgtatagaaagtctagttgcttacaaattttaggttgaaaagagagctggaaccaggtgccgattttagataacagggaagttaattacttctaaattcctcagataagaagttttgcctctgaatggtctccttagtggactccaggtgatcactagtatttggtatgtatcatctcatttaatccttacaacaaccttatgaagtttggtgtgttgctaatcctgctttatatatgggaaatggaagctcagagaagttagcgggtaacatgtcattcttggtttttcttatgtccttccctcttatctcagggaggaagtggggtatattcctttctgtagctggctgccgcctctgctcttcagaaccttgctttcttttgttcttattcctgtatctttagcccctccttcacgtgttcttntcttgcagactataaaaatatgctttttccacaatcatttaaaaaaaaaaaaaaaaaactcgag

SEQ ID NO: 2512 - DNA, 1534 bp, Homo sapiens
ccacgcgtccgcggacgctggacctttgccatcttcaacatagtcacacccaaaccagattccttggtgccagcttagatccctcactgtatttcatacctaatgcattaccataccctgctaattttatcttttaaatcttgcgtttctcctctccagtctgggcgacagagcaagactccctttccaaaaacaagcaaatgaaaaaatagagttttctctatcacacaaatgggaaggtttgtattgaatgttatatttatcctctatccagtcttgtcttgggagcacaaagcaaaaaggcccagcatcctccactatcttctgaaaacttgccctcaggcctgagcaagagggctgcccggttgcttccatgtagccagccagcatatgtgcagggccaagtctagagggaggagggggtggcacatgggatggtttcgtttaattggaagacagtgggtagatttggagctgggcatttgaaagatgttgagagttgtggatcatgggcaagaaaagcgctgttctgggactgcggggcaggaaaaggaaactgatgcttctgagggtgagtctgatgagataacatgcctgtgtgtgggcctcaggttagacagtgctkaggtctcccgtcactgggcatccagctgggtctacggccgtggctcctgccttctgcarccctgtcagggcccaaggccttccccatcagcacttgctccagcctactcactggaakttgtgttctgggtgggkgtgtagaatactcgmactcytacttggggcatmagggagctytytagcaatttcttctgcacctagggagagcccactgtaaaaaaggcctagycaaatcctcaggkgtacatggacatcaagattgggaacaagcggttggctgatcaaacctcctggttccgacgtsgtgcccatgaccacagagaattttctctacatgtgcacccatttaaaggactcggcttcaagggaagcagcttccaccgcattatcccccagttcatttgccagggcaggatttcacaaaccacggtggcaccaggggtctgcgcaggcatggcactaagtgtcccatggcacatttggccctcatggaggcctcaaaagggcaggaccagcaccctcttctacggaggaaggaacgggcacagcagggtgagccactgcgcctgatcaaggcatcaccgttgaacctcctaagaggaaaacataaggctgtgcaataccaggaactgggattctagaaacaaggagagtcagcaattaccagccagccaaggtcctggaagctgacgtagagctcgtgccgacggcagacctgccggccgtgggagccgcggacgtcatctgtcagggacagaaggggcaaggtcttttctggggttcctgctgtgtgcagctactatggggtaccagggtgggggatgccctgatgagcacatttgtcaaataaatgaatgacaggaaaccaaaaaaaaaaaaaaaaaaaaaaaaaaaaaaaaaaaaaaaaaaa

SEQ ID NO: 2513 - DNA, 857 bp, Homo sapiens
gcccacgcgtccggtataaatttagcattaccagtggattctgcgtattttatatgctctttttattttggttttgtcagtttgctactcgtgagtttatctttgaacagcttcccatggctatgggattaggtctgtactccagagcctgatatctatgggcctttttttcttagcctttctagtctttttaccccatatttcttcatgatatccataktttatccaacctaaacaaagagctagtccccaagcacactaacccgttacattcatccctctgcttttaatacaattgttcctctatagagaatacctttaaaaatatatataagttggctaagctcaaaaacaccacttctatgataatactcttacagattcttccatttgtaaatatgcatgctcatagtactcttacagcgttggtcctctcttataacawtgttaragtagatactgtaaactgaaaagtgacacataaaaatacataatggtgcagctcaggtatgtgtcatcttaatattcctattaaccttagaactttgtgactgtgttgggattacttgacatatttgtttatcaatcamcmcagtgacagtgacgacgawtkagtaaccagtgttttgtttttgaaacatttgaagaagtgttccatatttctgaagttattagtttagtttagtttagtttagtttagtttagtttagtttagtttagtttagtttagtttagtttagttttaacgacagagtcttgctctgttgcccaggctggaggttgcagtgagccgaggtcacgccattccactccagcctgggcaacaatagcgaaactcagtctcctaaaaaaaaaac

SEQ ID NO: 2514 - DNA, 819 bp, Homo sapiens
  SITE (814): n equals a,t,g, or c
ccacgcgtccgagttacttcctggaggaagtggtgtttcctccacccataggtgccctgcccccatcctcatggtggcagcaaatcagcatgtgctggggagaccctggggtagcagccactgacctcacacctggaggaagctgtgtgaccgattcatgagcttatgcctgaagacagagcaagcactccccgcaccacgacgatgacgttcacttgttttgtgtttttcgatctcttcaacgccttgacctgccgctctcagaccaagctgatatttgagatcggctttctcaggaaccacatgttcctctactccgtcctggggtccatcctggggcagctggcggtcatttacatccccccgctgcagagggtcttccagacggagaacctgggagcgcttgatttgctgtttttaactggattggcctcatccgtcttcattttgtcagagctcctcaaactatgtgaaaaatactgttgcagccccaagagagtccagatgcaccctgaagatgtgtagtggaccgcactccgcggcaccttccctaatcatctcgatctggttgtgactgtggcccctgccgtgtctcctcgtcaggggagacttttaggaggccgcagccttccatcaccggatcagtttttcctcttaggaaagctgcaggaacctcgtgggctccagggacccaggcccacatccatccagcgttcccgctggctgtgggacagacagggaggggcctgtacagaaacaccacactgtttattaaatcacaatgatttttattaaaaaaaaaaaaaaaaaaaanaaaaa

SEQ ID NO: 2515 - DNA, 739 bp, Homo sapiens
cagcgcagaaggaccagcagaaagatgccgaggcggaagggctgagcggcacgaccctgctgccgaagctgattccctccggtgcaggccgggagtggctggagcggcgccgcgcgaccatccggccctggagcaccttcgtggaccagcagcgcttctcacggccccgcaacctgggagagctgtgccagcgcctcgtacgcaacgtggagtactaccagagcaactatgtgttcgtgttcctgggcctcatcctgtactgtgtggtgacgtcccctatgttgctggtggctctggctgtctttttcggcgcctgttacattctctatctgcgcaccttggagtccaagcttgtgctctttggccgagaggtgagcccagcgcatcagtatgctctggctggaggcatctccttccccttcttctggctggctggtgcgggctcggccgtcttctgggtgctgggagccaccctggtggtcatcggctcccacgctgccttccaccagattgaggctgtggacggggaggagctgcagatggaacccgtgtgaggtgtcttctgggacctgccggcctcccgggccagctgccccacccctgcccatgcctgtcctgcacggctctgctgctcgggcccacagcgccgtcccatcacaagcccggggagggatcccgcctttgaaaataaagctgttatgggtgtcattcaaaaaaaaaaaaaaaaaaaaaaaaaaaa

SEQ ID NO: 2516 - DNA, 1537 bp, Homo sapiens
ccacgcgtccgcggacggtggatgacaaaacaactaccgtgtgactgtgatcttcagagatgtccagcttgaaggtggctgcaactatgattatattgaagttttcgatggcccctaccgcagttcccctctcattgctcgagtttgtgatggggccagaggctccttcacttcttcctccaacttcatgtccattcgcttcatcagtgaccacagcatcacaagggagagggttccgggctgagtactactccagtccctccaatgacagcaccaacctgctctgtctgccaaatcacatgcaagccagtgtgagcaggagctatctccaatccttgggcttttctgccagtgaccttgtcatttccacctggaatggatactacgagtgtcggccccagataacgccgaacctggtgatattcacaattccctactcaggctgcggcaccttcaagcaggcagacaatgacaccatcgactattccaacttcctcacagcagctgtctcaggtggcatcatcaagaggaggacagacctccgtattcacgtcagctgcagaatgcttcagaacacctgggtcgacaccatgtacattgctaatgacaccatccacgttgctaataacaccatccaggtcgaggaagtccagtatggcaattttgacgtgaacatttccttttatacttcctcatctttcttgtatcctgtgaccagccgcccttactacgtggacctgaaccaggacttgtacgttcaggctgaaatcctccattctgatgctgtactgaccttgtttgtggacacctgcgtggcatcaccatactccaatgacttcacgtctttgacttatgatctaatccggagtggatgcgtgagggatgacacctacggaccctactcctcgccatctcttcgcattgcccgcttccggttcagggccttccacttcctgaaccgcttcccctccgtgtacctgcgttgtaaaatggtggtgtgcagagcgtatgaccctcttcccgctgctaccgaggctgtgtgttgaggtcgaagagggatgtgggctcctaccaggaaaaggtggacgtcgtcctgggtcccatccagctgcagacccccccacgccgagaagaggagcctcggtaggtggtcgctctcagaccccactgtccaccggggcgcagacccctgactcggggacttgggatgttcctcttggtgtcatattccaactcagattgagccctacattgtgctgcacctggtcatacggagttgaatcagacctggttcccgcctcccccaaggctcatggtccttggaggacccgttgcagggtgaggtcaagagagttctgacctggatggcccatagacctgacgtcccagaatccatgcttctcatctgcaaaatgaaaatgtcaatacttacttcttagcactgttgagagggttacttacataaaggaattttggtgaaactgccaaaaaaaaaaaaaaaaaaaaaaaaaaaaaaaaaaaaaaaaaaaaaaaaaaa

SEQ ID NO: 2517 - DNA, 2146 bp, Homo sapiens
  SITE (20): n equals a,t,g, or c
  SITE (38): n equals a,t,g, or c
  SITE (2125): n equals a,t,g, or c
cgtgcccagcctattcatgnactcaactgggatctggncacactgcactgggtgttttgttctctgatgtgcacattgatgaatgcatattggtacaagggaaatgaatctgttttcagccatttaaaaaattgtgttgtaaaggcaaacaaaaatagcttgaacatttaaaaattactgtttaatattgtttgactgattttctaagaattatgtgaacaatgatgagtccagggcagcagccatcacaaatatgacagtccagcaaggcccatggaggtccctttggaagggacttgcacagctgattttctttttccagtgttgtttttacgggtgaaacgtggcttttgaaatactttagttgtttggcttagagctcccactttccccctaacatagtgcctgtctgttttttaaaacattttacccttcggcactattttctgctattcccattaatattatgtaacataaaccacttgctactgatttgggcatattacagactacaattactagttgctttgaatgcattggcactcttaattattgcaaaggagaattgaaaagtagtcttgtggtcctagttaatttagctttgggcaaactaagtggcttttcttctgtcctcttctcaaaaggccttttaagcagcagagactgggctaaatactggaactgaattccacttttctgcctgctcatttgctgccaaagaccacttggggctccttgtctagaatgctctaagacgaaatttggccagacacagggttccttgattgytctgttcaactaatagagaacytacattttgccttcttaatatcgactttcttttgtaccaggtttttctttctttcttttttgccttaggagcttagctcaaagttcagctaacctttgacactactagtgtcatttagtaacagtaatctttgacactactagtgtcatttaggagcttagctcaaagttcagctaacctttgacactgctagtgcgttcaagaaagggtagggaatgaagtacccttaatgcagggtcagcaaacttttcctgtaaaaggccagataggaagtatttttggctttttgggctgtttgcttttgctactactactgtgggaatgaccatggtcatggctgtgttccagcacaacttgatttaccaagacaagctgtgggctgtatttggtcctcaggctgtggcttgctagcccctgctctaatggattgtgttggcggcaatggcaagattcccttgctgagaacatgcagatgaataaccttatagctgggatgcagagaggagaaagttctgtaggtaataagtgcactgtattccctctgagctacttcctgggcatagttacatgtatggccagtgtgtgtacttgagccatcaggctcagacacttgttgaatatacctctcattgcattagtttgtaattgtgctagtgctgggtgctgagctcagctgcccggatgacctttccagactgaaggacatactcccctaacagctgggagtgctgctggctggccatttacttccagcccttatgaggagtttcccctgctgaagagccctgcctgccccagatcatacccccttcctgcctgtaacccttaccggctccatatggggtacaaagggctggcctcctcaccccaacttgggaaamcctctggggccatcccagctccagagccccttgtggggtcagtgagacctcattgtggccacattacagcccagtgcctctccctgacaagcctgtacccagccggctcagcccacagcactgtcctatgaaccttcctgcacgccattctccacctcagtatctgctttcggggaacccaacctgcgacagtgcttctgtgtgttttcagtcctgcaggtttgaactctgactttggagacttttccagttatctcgtggaatgacagattgtgcctgtatgatatcaggcacaattaatgcaaattaggcagacctatttattctagatgtgaatttgctatttattttaaatgttgattttatgtgttatgtgactctgaacttattgccaaataaaagtttgaattgtaaaaaaaaaaaaaaaaaaatntctcggtccgcaagggaattc

SEQ ID NO: 2518 - DNA, 1384 bp, Homo sapiens
gagcgtggataatccagaaaaggggaaaattgaaaattagtagtgttgtgtggaggaactgacactgaattagtgtggtctttttatgcattcggccattgttttgtcattgctcctcaattgtttccctactgctggacggaaaatttagattgtcttattcagaaaaccaaatgcctttctattgtctttccttattattattatttttcaaattaagttgatgtctcttttgtcaggcagttgaaaaatatgttttatgaggattgtgggttttgttagttcttaccacactgccacgccacactcagtttgagaaatacacacacgacaactccagactcatttcagaaatatttttatccatgtttacctctgcagctggtgcagatctcaggtgtgcaagaaatatttctttaaaaaaaaaaaaaccaaaaacaaaatgctgttttatttgtattttargacatttctgcctaagtcatctgggtarctcagaaatctctgttcactgcctgggataggtttatgcaattttaaatgttacataaatgaatgaaataaggtgaacatagtcattttttaaaaatagcattattatttttatgaaaaataaatagaatgctttggattcataaaaaggctatatttgcaaagtacttaactgggtatgacattggggaaaaatgtttaacattgatgataattctgctctcagatttgaaactgccttcagatttttgttctgctttagaggaacaaaaatggaaactcgggtgaattacgatgttgtttgtgaaaagacatgtctcaaaactctagctaatctgtccaaaaaaaaaaaaaaagcaacagtccccatactaaaaataccaatgaaacaaaaaagccccatttgatcttaaacatatatacatttagaagttttaagttaaatattaaggttatgtgtgcatttaaaaaattatcttactgattgactttaagaagttaacccaccaactactggttcttgtcttgacagggcttttatctacactgacaaaatgaaatactatgcaatcattaaacattctattttattttactctattttctcctattttatgatagcattttataatggtatatgaaggtgctcattatatgtggttcagtgagagagggtggctatagaatagaatgtactgtaccttcccatttttgtaaaaatatgtttagaacaaagacgaatacgatacatgttaatggtgggtagattatggctgatttttatgctctttatttttataattgtactattataaatgctttacttttgtaataaaaattaataaaagtcattttttaaagaaaaaaaaaaaaaaaaaaaaagggcggccgc

SEQ ID NO: 2519 - DNA, 1374 bp, Homo sapiens
ccacgcgtccgcttttagcaaagcttctttaccaagttttgattaaattgcaatataaaattaagttttttcacggtgctatattttgtggaatatgggtagcactcaggtttctttcttttttcttttctccttccttcttccttcattccttcattcctccctccccccgaacctccctccctctcttccttccctccttccttccttcctcaacctcgggcctcccaaaagttgctgggattacaaggccatgagccaccgtggcccggcctatatacccttattcttgattatttcttttttcatcttttcaatcctgcttacttttatcctcacttttctttctgccatgaaaactgcacctaatttaccacacttaagattggcaatttttgattcattgatgggagaagtacagtagaaaggccctgcagtttagaattaagttgtgtttgtttatttacatgtatgcccatttcttctaaattaaatctagaatgtgagactttgacatataaaagcatgataagtattttcttaaaaaataagactattgatacataatgaaaccaccattggtaattgaattttaaaatgatatgcaaaaatatttagaaatccagttgggaaatgtgtttttgcatatgtcaccagatacacattaggcagtactacaaatgttaattcttaaacaatactgtggtgatggcaatcagtaatttatttctttgtcctgtaacttatcattcttgtcttttgtaatgtcttacacagtattaacataactgtaccttttttttgttcttggtatccatacattttaagatggaaaatcagttcatagttgatatgatattgtatatgggcaaaatgtccgttaaactaaaattcagtaaaaaaggtaatataaactggcttgatttataaaagatgttttgtttggcagttatcagtcattataagcaattatcttcaaagacaaaaaaactggactaatttgttgccattctttatgggatgtttacaataaaattccaagttgtttggaatcaattgcactcttgctgctttatgccttaatttatgtaccagagaaaaattaaccagaagaaagaaatatggagttacctattcagctttagagattgtaacatgtaactcttaggtctttcttgtttctttgtcatagaatattttattactattactttttaatctgagaaactaggatgcttcttcctatcaaagaaaaggttttgttttttgttttcatcttagacattgcaaatattctttgggtcacttttaggataataaatatgatgtttacactttaaaaaaaaaaaaaaaaaaaaaaaaaaaaaaaaaaaa

SEQ ID NO: 2520 - DNA, 743 bp, Homo sapiens
  SITE (1): n equals a,t,g, or c
  SITE (5): n equals a,t,g, or c
  SITE (25): n equals a,t,g, or c
  SITE (41): n equals a,t,g, or c
  SITE (44): n equals a,t,g, or c
nattncgcccaaggctcctaaattnccgaccccacctatanggnaaagctggttaccccctgcaggtacccggtcccggaaattccccgggtcgaccccacgcgtccgaaatggtctaacatatatgaggacaatggtgatgatgctccacagaatgctaagaaagctaggcttctaccagaaggggaggagacgttggaatcagatgatgaaaaagatgagcatacttctaaaaagcgcaaagtagagccaggagaaccagcaaagaagaaaaagtagaaacaaatgaccagaatttctgtactgctaaacttgttgaaatgtttctttggacagattaagttgatattgtgggttattatgccacatctccatgaaaatgcatacgttaatgaactaataagtattgcctcaagaactttccactatagaattctttttttatttaaaacatgtatgtatttaaaactcaactggtgacttgtgattgtgaaattgataacacttggatgcattcttgctctcacagaattggtgacatgctttgagagttttgtcacatgttgacatgccaatgttcttataaaccttttataaaggaatatatttttaaagtaaatatattgtaatgtactgtgaacttgtagggtgcttttcaacagtctttgtacagtgtaaatagatcatggaaataaaattacttattcaatattaaaaaaaaaaaaaaaaaaaagggcggccgc

SEQ ID NO: 2521 - DNA, 736 bp, Homo sapiens
cccgggtcgacccacgcgtccggtgaaatcactgctccatatttgccagtggaggaaatgggcatagagtagagaatagcttcatatgtttacacgtttgcatagactacacacatgtcatgcgtttatggcaggtagctggtatttattccccaaagtaataatgttgaagtatgggtctcatcattcccatacacagaaacacaaaacactttgatcataaacttttttcttcagaagccaaactaacttgcagaataatagagccactggtttaatgtttcctcaagataggttttagtgtaagctagtattctgtgtgttcgtagaaatgattcaatacctgcagctggtgaattaggaattgtatttgttgccttttttatattagatgaggtgcaaaaattttaatgctagtcagtatgcaccaccacaggaaagttagatcccattagcacttgaaactacagctttggaaacttaggctaagttaatttggatttgttacttgattcacctactgaccttttcttttgtttgaagtgcttatcagcataatgagctaagtgtcatgcatatttgtgaagaaacaccctttttggtcccttttgggacagagaggtactccttgatctttatgaatgacaggttactgttttgccttattgcttaacttaatgtagtgaaataaagcagacaaagcttgaaaaaaaaaaaaaaagggcggccgctctag

SEQ ID NO: 2522 - DNA, 803 bp, Homo sapiens
  SITE (767): n equals a,t,g, or c
  SITE (790): n equals a,t,g, or c
  SITE (793): n equals a,t,g, or c
gagtttatatcagtttcacttcaattttttagggttgcataatttgccacaattttcatcagatattttggaatgatgtagcagaatacatcaagaaaatctccagttcttttgacaatttttgttagagctttttgattcttaccctcatggaaatacttgtgtataaatatagaaaatctcagattaaattattttcttggtagccttgcctgttcctattaagccacagaaaatattaataaggtgaatatgttaactttatttttcaaattattgttaatctcagcatactatgaagaacatgaatgtactgtacacacaaacaacttgatgtctcactaaatgaaagacacatgtgcattagatccatctacctttcaggcacagtcatggggtttttaactccacaacattaactggaattgtggaatacagataagatcataattgcaaagatgtgatattccctgaagaattttttatctatgatcaaaatgcaaaaaatttaatgtgttatggtaatgttccttattatccatgattaagtcacaccaaaatggcacaaagaccaggaaaccagccaagcattcactggaggcattactcagtgtctgagagattcagttgatttatatgaattaaggaatattttactatctagtatgtatcatttaaaataaaacaaaccttctaaagatgataattgtaaacatttgaattgtgtttttaattggaaaagtaatgagcttgtactgttaagctgnttcttattttatgttctatggcnttnttcaccaaat

SEQ ID NO: 2523 - DNA, 1010 bp, Homo sapiens
ccacgcgtccgaaattcttaaccatgggtcagcttatatcgaccttttgggtaaaagacattattcctttgaaacttcagaagcacgagtttgttttctgaaaaacacatgccattgcataccttttaacttgacatatgactgaaacttttgtcttaacaatccattttctacaaagactgcccttatatttattaaagatgacaaaaccaaaaccacttcttctttcatacattttctgctttcatgttctgtcattctgagatctttttttctttccctctctctgtcttcttttcccccagctgtcggcagcatccagcccctccagtcacagtcctcacagagcttcaggaaaggacccctttgcagagctctctttggaggatttcttataaatcactttaggtattgctacttgttgtgggagatggggacttaaatacttaaaaacaattaccaaacattaaacacaattcacgcttctctttcatttctttaaaggactctaggctccctctcctcctcctcctcttcctctattctttaggtgcagaatgaaaagataggacataaggaaaaacaacttttggaaaatatctgtaacataattatttaaagtaatctcatccactgctcacagtaaatggatgagatcggataaagtttgctttttaattaagggcaagtgaatacttaagccctttcgattagaaggattctgcatatgatccacactgcctctgtttgctggaagacagtgtaatttgttcttcttgatgctctagcccccagtttagatataccttctagatctttgggagtttatagtcttctgatttggcaagtttattagcacatctacttcagtaatagatctttggatgggcagtttaagggaaagtgtttttgtatataatgtattttttcacttttggaggattctttttgtataacttcaataaagattgtaagcaaaggttgaaaaaaaaaaaaaaaaaaaaaaaaaa

SEQ ID NO: 2524 - DNA, 1554 bp, Homo sapiens
  SITE (847): n equals a,t,g, or c
  SITE (888): n equals a,t,g, or c
ggcacgagtgcacctttagaggacttcagaggccctgccaagtctagcatgttcctgtctccaacaccgcctcctgcacatgcagagcagacagaaataccccacacattccccagcctctctgcccagtatgctcatccacagggttttctcactgctatgaaccagccccacagccccaggctcctgtcacctggctatgcccactcatcccacccgtctcgtgctgttgcttcccatagatggcgagcaccttgcaggcagccttctgatcagtactgttctcctagggcctggcacactgcagctgccctgtaaatgttcagctcagcgattgccaaataccagttagggaagaacactggcatctttttctattcattcccccttcaacatattttttgtacttttttatataaatgacttttttttttttttgagatggagtttcacccttgttgcccaggctggagtgcaatggcgtaatctcggctcagtgcaacctctgcctcccaggttgaagcgattctcctgcctcagcctcccaagtagctgggactacaggcacgtgtgaccatgccaggctaattttttatatttttagtagagagaggtttcaccatgttagccaggatggtctcgatgatctgacctcgtgatctgcccgcctcggcctcccaaagtgctgggattacaggcctgagccaccgcgtccggcctccataaatgacttttaaaggggttgtatgtttagtgtgaacaaagacagtacaaagcatataaaatacaaggtgaaagccccccccccaccacattagctgcgcccctgaagtgtctccagcagaanagatggatgaatggaaggacacacagatggacagagagcangaaagactgttagctctgctaacagtcaggactattccttctggactctgcgcctttgcctgcacagccaagtgttgatggcttgtttgttgttttcaccagagtgagctccttctggacatactgcctggcagcctgccttcctagggagctggcgccaaggcctctccctgatggcacacaaggagcctccttcctgtagcagcgcccagttttcatgtggatggattgtagttcatttgaccctccccagccgcgggccatccggcttgtgtccagcttttagctcttgccaatggtgctgcagtggccattcttgtagttatagctttgcgtactcaggaaggcccttctcccgactgcggcccccagcctggtccactaaatgcagcctgtggtcgggcagacagcattggggtccattaggaagaccaggtttgctgggcataagcttcacaggacgggagaacctgcccatggtggactgtcgttctccacagctcccttcccttgcccttcgggcctccaggatatgtttgcgggggtgggtgtggtgtccagctgttaccagcttctgagctagagctgtactgcctcacgtacacccccacctctgtaaatggtccttgattaaatcgtcctcatattaaaaaaaaaaaaaaaaaa

SEQ ID NO: 2525 - DNA, 1700 bp, Homo sapiens
gaattcggcacgagatgctccagaacttagggcctagagatagcaaacccgaattccaaaatgtctctgctacttatcaaccgtatgtggccttgggtaagtactgaacctcttttggcttcagcttcatcatttatgtgggaattcagctccacatagattctytgatctcctgcgctctttcagcaataaaagtggagcacattaatttgatgtgaatgtccccatggccgtatccacactgaatctggactttttaaagtgtctgtgatttgtttacatgtttagaggattttgatgactggtccagtgccaatgactcagaggcttaggcccatctgtgggtttggtttacgaacattgttatctttggtgggatccgctcagctctgatttgtttgcaagacagaccaaagaagcccacacatccacctttattcttctccgtcacagaaaagaaaccattttccatcttacaagcataacactctcaagtggtgaaatattagaaaagcagtgttcatgaatacatcgttaatgtttttaccagagcaacatcgagcttggctcagatctgccatggagcacagctagtctaagagctagaggcctggtgctttcaaaagacttcatgtgagatttttgtgtactttactcaggaaagtgtgaatctctaaaaaataataataataagcacatgttttcatgattcattaattctcctttttgttccattaaccatttcttggttgtgctcccaagctttcctggagcctccacaaaggagagtagccaggagtaatgagaggacggtcaggtgggcacttccaaaagctggagagacccttctgaggaccctccaccatcagcggggcctcaggggaccctgtcctaacactggtgtggctgctgggccagacgctcacctgcacagaactcctccctgctcccactctgaagggcgtttcagaattgactcatttccactgcagtctgccagaacccctgtaataaggagctgtgttatattacatctggggctgtgtgcatctttacaaatggagacacactattcaaagggaagatctctaaagtagggagcgtggtacttattctttgtttgaaacattccgatttgttgtcaggccttatttgttttttgtaagtgattgtatcggaggcttaagttgtgtggaatcagtcccacagtgttgaaagacaagtacctcttttctgacacttcttactacttttacaggtagtaacagctacaaatactctcccagaagtggagggacaccatttgtgggtggggagaaagagggagaggttctatgtccacttgcttcattaagaatgttaaggtttaagaaagttgattctgcttggagaatttctcaagctttacatttttttttcactgaagaaaataaacaaactctaagaggtgtgcatatataacatttctttagatctttacctaaawggaattttaatatattattggttgatgtaaattttgtttctgtggagttttgtttgttttgctttttgtagactgccatgtgcaagtaaaattcctgcttctgccatgttaaaattttaatatattttaaatgataataaacagagaaaacaaaatttaaaaaaaaaaaaaactcgtagggggggtcccggtacccaatcgtccctsatgagtg

SEQ ID NO: 2526 - DNA, 2058 bp, Homo sapiens
  SITE (3): n equals a,t,g, or c
  SITE (2031): n equals a,t,g, or c
  SITE (2040): n equals a,t,g, or c
cantgtctccctatccacccccatttccctttgaaataataactcactcataacagtatctttgccccttccacagttaagtttcagtgataccatactcaggagtgggaagaggaaatcatattcgtaatttcatttcgttgaagccctgcctttgttttggttctgaatgtctttcctcctcggtagcagtgagaccggtttcatttcatacttagtccattcagggacttagtgtagcaccagggagccctagagctggaggatatcgaatagattaaattttgctcgtctcttccacaagccctaaccatgggtcttaaaaacagcagattctgggagccttccatgctctctctctctcctcttttatctacttccctcccaaatgagagagtgacagagaattgtttttttataaatcgaagtttcctaatagtatcaggttttgatacgtcagtggtctaaaatgctatagtgcaattactagcagttactgcacggagtgcmaccgtgccaatagaggactgttgttttaayaagggaactcttagcccatttcctccctcccgccatctctacccttgctcaatgaaatatcatttwaatttcttttaaaaaaaatcagtttaattcttactgtgtgcccaacacgaaggccttttttgaaagaaaaatagaatgttttgcctcaaagtagtccatataaaatgtcttgaatagaagaaaaaactaccaaaccaaaggttactatttttgaaacatcgtgtgttcattccagcaaggcagaagactgcaccttctttccagtgacatgctgtgtcattttttttaagtcctcttaatttttagacacatttttggtttatgttttaacaatgtatgcctaaccagtcatcttgtctgcaccaatgcaaaggtttctgagaggagtattctctatccctgtggatatgaagacactggcatttcatctatttttccctttcctttttaaaggatttaactttggaatcttccaaaggaagtttggccaatgccagatccccaggaatttggggggttttctttcttttcaactgaaattgtatctgattcctactgttcatgttagtgatcatctaatcacagagccaaacacttttctcccctgtgtggaaaagtaggtatgctttacaataaaatctgtcttttctggtagaaacctgagccactgaaaataaaagagacaactagaagcacagtagagtcccagactgagatctacctttgagaggctttgaaagtaatccctggggtttggattattttcacaagggttatgccgttttattcaagtttgttgctccgttttgcacctctgcaataaaagcaaaatgacaaccagtacataaggggttagcttgacaaagtagacttccttgtgttaatttttaagtttttttttccttaactatatctgtctacaggcagatacagatagttgtatgaaaatctgcttgcctgtaaaatttgcatttataaatgtgttgccgatggatcacttgggcctgtacacataccaattagcgtgaccacttccatcttaaaaacaaacctaaaaaacaaaatttattatatatatatatatatatatataaaggactgtgggttgtatacaaactattgcaaacacttgtgcaaatctgtcttgatataaaggaaaagcaaaatctgtataacattattactacttgaatgcctctgtgactgatttttttttcattttaaatataaacttttttgtgaaaagtatgctcaatgttttttttccctttccccattcccttgtaaatacattttgttctatgtgacttggtttggaaatagttaactggtactgtaatttgcattaaataaaaagtaggttagcctggaaatgaaattaaaaaaaaaaaaaaaaaaaaaaaaaaaaaaaaaaaaaaaaaaaaaaaaaaaaaaaaaaaaaaaaaaaaaaaaaaaaaaaaaaaaaaaaaaaaaaaaaaaaaaaanaaaaaaaanaaaaaaaaaaaaaaaaaa

SEQ ID NO: 2527 - DNA, 1781 bp, Homo sapiens
gaattccccgggcccggggaattccccggggtggacctgggacgggtctgggcggctctcggtggttggcacgggttcgcacacccattcaagcggcaggacgcacttgtcttagcagttctcgctgaccgcgctagctgcggcttctacgctccggcactctgagttcatcagcaaacgccctggcgtctgtcctcaccatgcctagcctttgggaccgcttctcgtcgtcgtccacctcctcttcgccctcgtccttgccccgaactcccaccccagatcggccgccgcgctcagcctgggggtcggcgacccgggaggaggggtttgaccgctccacgagcctggagagctcggactgcgagtccctggacagcagcaacagtggcttcgggccggaggaagacacggcttacctggatggggtgtcgttgcccgacttcgagctgctcagtgaccctgaggatgaacacttgtgtgccaacctgatgcagctgctgcaggagagcctggcccaggcgcggctgggctctcgacgccctgcgcgcctgctgatgcctagccagttggtaagccaggtgggcaaagaactactgcgcctggcctacagcgagccgtgcggcctgcggggggcgctgctggacgtctgcgtggagcagggcaagagctgccacagcgtgggccagctggcactcgaccccagcctggtgcccaccttccagctgaccctcgtgctgcgcctggactcacgactctggcccaagatccaggggctgtttagctccgccaactctcccttcctccctggcttcagccagtccctgacgctgagcactggcttccgagtcatcaagaagaagctgtacagctcggaacagctgctcattgaggagtgttgaacttcaacctgagggggccgacagtgccctccaagacagagacgactgaacttttggggtggagactagaggcaggagctgagggactgattccwgtggttggaaaactgaggcagccacctaaggtggaggtgggggaatagtgtttcccaggaagctcattgagttgtgtgcgggtggctgtgcattggggacacatacccctcagtactgtagcatgaaacaaaggcttaggggccaacaaggcttccagctggatgtgtgtgtagcatgtaccttattatttttgttactgacagttaacagtggtgtgacatccagagagcagctgggctgctcccgccccagccyggcccagggtgaaggaagaggcacgtgctcctcagagcagccggagggaggggggaggtcggaggtcgtggaggtggtttgtgtatcttactggtctgaagggaccaagtgtgtttgttgtttgttttgtatcttgtttttctgatcggagcatcactactgacctgttgtaggcagctatcttacagacgcatgaatgtaagagtaggaaggggtgggtgtcagggatcacttgggatctttgacacttgaaaaattacacctggcagctgcgtttaagccttcccccatcgtgtactgcagagttgagctggcaggggaggggctgagagggtgggggctggaacccctccccgggaggagtgccatctgggtcttccatctagaactgtttacatgaagataagatactcactgttcatgaatacacttgatgttcaagtattaagacctatgcaatattttttacttttctaataaacatgtttgttaaaacaaaaaaaaaaaaaaaaaaaaaaaaaaaaaactcga

SEQ ID NO: 2528 - DNA, 1781 bp, Homo sapiens; identical to SEQ ID NO: 2527

SEQ ID NO: 2529 - DNA, 575 bp, Homo sapiens
ggcacgagccaggagtccttctccagagacttgatccgggcctggagctgttcattgacctcatgctgctcctccacctcacgctgggccttcttcctcaggccgtccagtcgctcaatttcctcttctgcttcatccacctgacgcttcaaagccttcaccctcaggcttagctggtctttctggtcattgacatgctgccgctcgtcttcaatctggatggatagttctttaactttccgctccagttttcgattggtagactgcagaactgtcttctccctctcttcagcctgtagccgctcctgcaacaactgattctgggactcaagctgagagaggctggcactaggcttctggaagccttctgagctggccaaccgggtcttcaggtccttgttctgtctctccaaggagattttgtcacactccaggtcctgccgagcagacctttcctgcatgagctctgtcctcagctgatccacctggtcccggccacgattcacccgatctgttagcagctccacggtgttcttctcctcatctaactctgtttccagccgtgagactttttc

SEQ ID NO: 2530 - DNA, 646 bp, Homo sapiens
ggcacgagcttactgaatgtagtgaccctgctgtggtaatgaacacttctagtgccttctaggcttaaaataccagacaaccccaaataacaaatgctcttttgtgttttgataggttggatttctgtttgcttaatattgggaatactgggggaaaaaaagatggtgttttcattctaaggattgtcctaaagaaagtgctactttatttttaagaaagtaaggccacttgttatataagaaataacaagttcccattgggtcccattttgcaaaaggggataaagaattagactgatagcattcttatttgattaattttttgttccactggctttgaaagacaaacgattgttaaagataaaattgtttttgttctttttcttataggtccttcagtcttggagactataagggagcctctgcacccagggaaaatgttaccctttacaggggggaagggtaaaccagtagggaatacagtacaatcccaaccctactgggaggggcgggagggaggtgttgccgtcactgtattaagtcgatgttgggaaacgttttaacatctggagcctttgtgggtggaaatatgtctccagttacaactccgcagtggatgtgaagaagcaaaaaaaaaaaaaaaaaa

SEQ ID NO: 2531 - DNA, 529 bp, Homo sapiens
tcatttagcatattgctgaaagtgggttaaagaggcccaattagtgagatcccagctgggacttttagatgggaaatatgcaggattgccagatgagatcatgggcctratctagtgtttatctgttaaatctgtttataactgcttaactcttgacttgcagacttttaaggcagccatttgacgtcacagggttgggaacgaggcttgtgccagtataaagccgctgtgatgtggggccattgggcccttctgtttttctcaactatgtgcatgcactttggagcttgacaaacagccgtgtccagtgaactccccccaaagaaaattgaagttgactcaccgtgaaaggcataccaccaaaagtgactcctaacccatgtacaattcagaaagaaagcactagttaacaagtgcccagtgtgtgattawttagttctagatctgtccagattttctttgttctggctctgttctcttcatggtggccctgcagtttttagatgttataaaacctccctacgattat

SEQ ID NO: 2532 - DNA, 963 bp, Homo sapiens
aattcggcacgaggttcggcgaagatagggaataaggaagcacaggagtaggggagaaggaagcacaggagtaggggagatatacagcggtcaggataagggggaaagggcggtggttgcgcaagaggtgaaacaagatgtgagagacaaggggtagggaagaaatggggcagcggttaggttcagaagcgcatagaccgtggcggacgggcaatgcgaggggcacagaaaggaactgaggggtgggctatttaaggagatggtcctcagccctctcttttctgcgtaggtctcctcctccaggccgcgcgcggatatgtcgtccggaaaccagcccagtctaggctggatgatgacccacctccttctacgctgctcaaagactaccagaatgtccctggaattgagaagttgatgatgtcgtgaaaagactcttgtctttggaaatggccaacaagaaggagatgctaaaaatcaagcaagaacagtttatgaagaagattgttgcaaacccagaggacaccagatccctggaggctcgaattattgccttgtctgtcaagatccgcattatgaagaacacttggagaaacatcgaaaggacaaagcccacaaacgctatctgctaatgagcatttgaccagaggaaaaagatgctcaaaaacctccgtaacaccaacttatgatgtctttgagaagatatgctgggggctgggaattgagtacacttcccccctctgtattaccgaagagcccaccgccgattcgtgaccaagaaggctctgtgcattcgggttttccaggagactcaaaagctgaagaagcgaagaagagccttaaaggctgcagcagcagcccaaaaacaagcaaagcggaggaacccagacagccctgccaaagccataccaaagacactcaaagacagccaataaattctgttcaatcaaaaaaaaaaaaaaaaaa

SEQ ID NO: 2533 - DNA, 1574 bp, Homo sapiens
  SITE (457): n equals a,t,g, or c
gtacggattcccgggtcgacccacgcgtccggcggcggcgacggcgacatggagagcggggcctacggcgcggccaaggcgggcggctccttcgacctgcggcgcttcctgacgcagccgcaggtggtggcgcgcgccgtgtgcttggtcttcgccttgatcgtgttctcctgcatctatggtgagggctacagcaatgcccacgagtctaagcagatgtactgcgtgttcaaccgcaacgaggatgcctgccgctatggcagtgccatcggggtgctggccttcctggcctcggccttcttcttggtggtcgacgcgtatttcccccagatcagcaacgccactgaccgcaagtacctggtcattggtgacctgctcttctcagctctctggaccttcctgtggtttgttggtttctgcttcctcaccaaccagtgggcagtcaccaacccgaagnacgtgctggtgggggccgactctgtgagggcagccatcaccttcagcttcttttccatcttctcctggggtgtgctggcctccctggcctaccagcgctacaaggctggcgtggacgacttcatccagaattacgttgaccccactccggaccccaacactgcctacgcctcctacccaggtgcatctgtggacaactaccaacagccacccttcacccagaacgcggagaccaccgagggctaccagccgccccctgtgtactgagcggcggttagcgtgggaagggggacagagagggccctcccctctgccctggactttcccatgagcctcctggaactgccagcccctctctttcacctgttccatcctgtgcagctgacacacagctaaggagcctcatagcctggcgggggctggcagagccacaccccaagtgcctgtgcccagagggcttcagtcagcygctcactcctccagggcacttttaggaaagggtttttagctagtgtttttcctcgcttttaatgacctcagccccgcctgcagtggctagaagccagcaggtgcccatgtgctactgacaagtgcctcagcttccccccggcccgggtcaggccgtgggagccgctattatctgcgttctctgccaaagactcgtgggggccatcacacctgccctgtgcagcggagccggaccaggctcttgtgtcctcactcaggtttgcttcccctgtgcccactgctgtatgatctgggggccaccaccctgtgccggtggcctctgggctgcctcccgtggtgtgagggcggggctggtgctcatggcacttcctccttgctcccacccctggcagcagggaagggctttgcctgacaacacccagctttatgtaaatattctgcagttgttacttaggaagcctggggagggcaggggtgccccatggctcccagactctgtctgtgccgagtgtattataaaatcgtgggggagatgcccggcctgggatgctgtttggagacggaataaatgttttctcattcaaaaaaaaaaaaaaaaaaaaaaaaaaaaaaaaaaaaaaaaaaaaaaaaaaaaaaaaaaaagggcggcc

SEQ ID NO: 2534 - DNA, 2735 bp, Homo sapiens
  SITE (66): n equals a,t,g, or c
gaattcggcacgagtggagctgtggtcaactcgagtgtggcagaagcacacagcttgccagcgcanaaaggcatgcttgtgatggactgtcatcgcactcacttgtcagaagaggtactggctatgcttagtgcctctagcactttgcctgcagtggtcccagcaggctgtagctccaaaattcagccattagatgtatgcatcaaaagaactgtcaagaacttcctgcataaaaaatggaaggaacaggctcgggaaatggcagatactgcatgtgattctgatgtcctgcttcagctggtgcttgtctggctgggtgaagtgctaggtgtcattggggactgtccagagctagttcagcgctccttcctggtggctagtgttctgcctggccccgatggcaacattaactcacctacaagaaatgctgacatgcaggaggagctaattgcctccctagaggagcaactgaagctgagtggggaacattctgagtcttccamtccamgacccagatcatctcctgaagagacaattgagcctgaaagtcttcaccagctctttgagggtgaaagtgagaccgagtctttctatggctttgaagaagctgacctagatctgatggagatttgagtgttggggtcatgagggggtgtggagtgggggtggggaaacatgtgagggagggtaaaggggcttagggaaaagggggcataccaggtggggtatttggtttctattttttaattttataccaccactcccccctgaagttgacttacacttccctgtggatttgtggattaattaggaaaaccaatagtaatcacgtctgagccaaggagctggcccattggtcattcacttctgctaaaaacaggtttttgtgactttttttttttttaaatttaaatcactgtgtttggtatttttctgacaaaattaagaaaaagaaaaaaaattatttgtgggcaaatgttaaatttttttgtttccccttttacctcaattgtatcatagtactgggtttttttgtttgttttattgtgtggccaatgtctttgggcatgatgctatctaatcattgttaatgtgagaacatttctgaagatgggaaagacaaattatgtagctcacaaactggtttattatatatatggataaaaaacttttttcattgtggtcttaacacttttatataaaaatgaaaatggaaaaaaagtcccactgaactctctcttccttctccttttctttccttccctctccagagatgttggtttctacagcaaccctagatataaaattgtggctttaaaaatgcatgaaaccacctttaattatccagaatgaatagatttgtcttttcctcaccaccttccctccaaaacatgacataaacaatattttttgcacttgtgatccttggcccctttccccattctcaacaccatccatccctctggacaaaggatcatacaggtgttattagcaagcaagagatactgaagcgatcaaacagttttagggtggaagccattcccagtttgagtcttcatcctgtaagcccccaggggcagtccctgctttactgaacttcatcctgttagatggagagcatgcctgtttaagggattactggtcctacagccaggagctaattgttcaagaagtgttgaactttaaaaagacaagaccacttgttgaaatccagcgtgctctgtggctttcccctatttctcttaatacttagggaagaatctgacaggaagaagcgcacaggggtgtgcacaaagaaaatgacatgaatctttatttttcactgccagcttcaaggaaagaaaattttttctacaatttgcatgagggatttttttaattgtatgtactcatggttgtaaaccaaaacgtactgtaccgtacagagaaaaggagcaaaaaaccaagtcttctgtttatcctgaggctttccacaatgttcccctcctgtgagccaaggaggcaaactgcacaagcttgtaaatggttcgtctttaaaatgtacataagtggaacatttaataaaatgaggggaaatggatttataaacttgttttttttctaggtgaccctgtttaataggctttcacagactggggaatgctcaagatgtgatgggcctggtggtacaggtgtgacatttgttaccacccatttctcccaccccaccctgcttttttgtttgtttgttttttcatcccccagcacactataatatagtgaactggaaaagtcccttccagaaacagcttggccagctttgtgaacctttgacatctgaaaacaaccaaggatccatctgggcttctcttccccagctttttgcctgatgccattttattgacagacaatggactttgaagtcagcctttgcctttgagaaagttcaagaactatggttggtcacgtctatctacaacctaatcctactctttggtagtctctgcagcagccacagccttagcagagctggggttcctgtcttctgcacacgattgactttcttgatgggtaattttttttaagattataccaacagtggatcagctgggttttggccaggaagttgtctttgtggactctgcctgcatggcttagtagtagaaggaaatttttttttggttttgttttttataattcagtttaatcaataaacatgtatttattgactrttaaaaaaaaaaaaaaaaaaaagg

SEQ ID NO: 2535 - DNA, 1121 bp, Homo sapiens
ggcacgagccagaaccttcctcttttttcttaaaaactcttcttaattgaatccaaagtatcttttaaatgttctacttgtgtaatcatgtcatctgtgaatattcagatttatcttctccttccaatccgtgtacatttaatctctttttctgtgccttatttcgggggctgggacccttcagtccagtgttgaagagaggcagccagtggaggtcttgtctcattcaaggactcagagcaaatgtgttccacatttaatttcactatgaaatataatatttgatgttcagttttgtagatgctatttatcagatcaaggaaagcccagtctatacctaatttgttaagggttttgctttttatcataagtgttgacttttatcaaattcttttttgtatctattaagatgatagatgattgattttcatatgttaaattaaccatggggtaaacaaacttacctttatcatgatatattattctttttgtatttcacaggaattagtttggtaatatgttgggtcaatgtttaaaaaagaaaatgatgtgtaatttttttcttttattgtagtatttctgtttaatttttggtatgaggattattcaggtctcataagagttaggagtatattctcttttaaaaaatatttgctaatttacactcccaccaacagtgtaaaagtgttcttatttctccacatcctctccagcatctgttgtttcctgactttttaataatcgccattctaactggcatgagatgatatctcattgtggttttgatttgcatttctctaatgaccagtgatgatgaactttttttcatatgtttgttggctgcataaatgtcttcttttgagaagtgtctgttcatatccttcacccactttttgatggggttgtttgcttttaccttgtaaatttgtttaagttccttgtagatgctggacattagccctttgtcagatggatagattgcaaaaattttctcccatcccgtaggttggcctgttcactctgatgacctatcattgttggacatttgggttggttccaagtctttgctattgtgaataatgccgcaataaacatacgtgtgcaaaaaaaaaaaaaaaaaa

SEQ ID NO: 2536 - DNA, 1971 bp, Homo sapiens
  SITE (1926): n equals a,t,g, or c
cgcgtccgccacgcgtccgcgctaccaagatggcggcgcccatcttgcggtccttttcctggggccggtggtctggtaccctaaatctctcagtattgttgcccttggggctgcgtaaggcccactcgggcgctcaggggttactggcagcgcagaaggctcgaggtctgttcaaggacttcttcccggagacggggacgaaaatagagctcccagagctcttcgaccgtggcacggcgagttttccccaaaccatttactgtggcttcgaccccacggcagactcgcttcatgtgggtcatctacttgcgctgctgggcctgtttcatttgcagcgagcgggccacaacgtgatcgcgctggtgggaggcgccacggcgcgcctgggagacccgagcggccgtaccaaggaacgcgaggcgctggagacagagcgcgtgcgagccaacgcgcgagctctgcgcctagggcttgaggccctggcggctaatcaccagcagcttttcactgatgggcgctcctggggcagcttcactgtgctggacaactcggcctggtaccagaagcagcacctggtggacttcctggcggcagtgggggktcacttccgcatggggacgctgctgagccggcagagcgtgcagctgcggctcaagagccccgagggcatgagcttggccgagttcttttaccaggtgctccaggcctatgacttctattacctcttccagcgttatggatgcagggtccagctgggcggatctgatcaactaggcaacatcatgtccggatatgagttcatcaacaagttgactggagaagatgtatttggaatcaccgttcctctaattacaagtacaactggagcaaagctgggaaagtctgctggcaacgctgtttggctaaacagagataagacatctccatttgaattgtatcaattctttgtcaggcaaccggacgattcagtggaaaggtacctgaagctgttcactttcctgccccttccagagattgatcatatcatgcagctgcatgtcaaagagccagaaaggcggggtcctcagaaacgactggcagcagaagtaacaaagcttgttcatggacgagaaggattggattctgctaaaaggtgtacacaagccctttatcacagtagcatagatgcactggaggtcatgtctgatcaggagttaaaagagttgtttaaagaagctccattttctgaattttttctcgatcctggaacaagtgtcctagatacttgccgcaaagcaaatgccattccagatggtccccgagggtatcgaatgataacagaaggcggagtcagcataaatcaccaacaagtaacaaatcctgagagtgttttaattgttggacaacatattctcaagaatggactttccttacttaaaataggaaaaagaaatttctacattataaaatggcttcagttgtgatgaaaagtccttctggttgtccaaataaacttacccatcattcattctcaagacctctgaagggttggctccagaacttagacctttgcttatgcaaatcagaaaaacagaatggactaggactcagtgtgagtaacttcattatttttatgggccggttaataaatatttgtttaataatgggatgttttattttctgatgtacaaagcttgattaccatagaaaaccatgattttcagggttaatctctttttaaaattatacttcagaagagaaagaaatgctgctttcctatcttacccttcctgctctcctttttgtagtgatgaggaacaatgaaaaagaggtagtgtaaggaattgtgaggctgggcatggtgtaagtgctccactttagagagtgtaccttaattactactgtatttgcaaattaagggaaatttaggtcatcatttgattttcngaaatctaaaaggaactgaccatcattaccaagtctttctatata

SEQ ID NO: 2537 - DNA, 1971 bp, Homo sapiens
  SITE (1926): n equals a,t,g, or c
cgcgtccgccacgcgtccgcgctaccaagatggcggcgcccatcttgcggtccttttcctggggccggtggtctggtaccctaaatctctcagtattgttgcccttggggctgcgtaaggcccactcgggcgctcaggggttactggcagcgcagaaggctcgaggtctgttcaaggacttcttcccggagacggggacgaaaatagagctcccagagctcttcgaccgtggcacggcgagttttccccaaaccatttactgtggcttcgaccccacggcagactcgcttcatgtgggtcatctacttgcgctgctgggcctgtttcatttgcagcgagcgggccacaacgtgatcgcgctggtgggaggcgccacggcgcgcctgggagacccgagcggccgtaccaaggaacgcgaggcgctggagacagagcgcgtgcgagccaacgcgcgagctctgcgcctagggcttgaggccctggcggctaatcaccagcagcttttcactgatgggcgctcctggggcagcttcactgtgctggacaactcggcctggtaccagaagcagcacctggtggacttcctggcggcagtgggggktcacttccgcatggggacgctgctgagccggcagarcgtgcagctgcggctcaagarccccgagggcatgagcttggccgagttcttttaccaggtgctccaggcctatgacttctattacctcttccagcgttatggatgcagggtccagctgggcggatctgatcaactaggcaacatcatgtccggatatgagttcatcaacaagttgactggagaagatgtatttggaatcaccgttcctctaattacaagtacaactggagcaaagctgggaaagtctgctggcaacgctgtttggctaaacagagataagacatctccatttgaattgtatcaattctttgtcaggcaaccggacgattcagtggaaaggtacctgaagctgttcactttcctgccccttccagagattgatcatatcatgcagctgcatgtcaaagagccagaaaggcggggtcctcagaaacgactggcagcagaagtaacaaagcttgttcatggacgagaaggattggattctgctaaaaggtgtacacaagccctttatcacagtagcatagatgcactggaggtcatgtctgatcaggagttaaaagagttgtttaaagaagctccattttctgaattttttctcgatcctggaacaagtgtcctagatacttgccgcaaagcaaatgccattccagatggtccccgagggtatcgaatgataacagaaggcggagtcagcataaatcaccaacaagtaacaaatcctgagagtgttttaattgttggacaacatattctcaagaatggactttccttacttaaaataggaaaaagaaatttctacattataaaatggcttcagttgtgatgaaaagtccttctggttgtccaaataaacttacccatcattcattctcaagacctctgaagggttggctccagaacttagacctttgcttatgcaaatcagaaaaacagaatggactaggactcagtgtgagtaacttcattatttttatgggccggttaataaatatttgtttaataatgggatgttttattttctgatgtacaaagcttgattaccatagaaaaccatgattttcagggttaatctctttttaaaattatacttcagaagagaaagaaatgctgctttcctatcttacccttcctgctctcctttttgtagtgatgaggaacaatgaaaaagaggtagtgtaaggaattgtgaggctgggcatggtgtaagtgctccactttagagagtgtaccttaattactactgtatttgcaaattaagggaaatttaggtcatcatttgattttcngaaatctaaaaggaactgaccatcattaccaagtctttctatata

SEQ ID NO: 2538 - DNA, 1986 bp, Homo sapiens
gcagataatagtcaaagtcattttgtttgtgctcatcataacttatgttccatattttttaacccacatcactcttgaaatcgactgttcagttgatgtgcaggcttttacaggatataagcgctaccagtgtgtctattccttggcagaaatctttaaggtcctggcttcattttatgtcattttggttatactttatggtctgacctcttcctacagcctgtggtggatgctgaggagttccctgaagcaatattcctttgaggcgttaagagaaaaaagcaactacagtgacatccctgatgtcaagaatgactttgccttcatccttcatctggctgatcagtatgatcctctttattccaaacgcttctccatattcctatcagaggtcagtgagaacaaactgaaacagatcaacctcaataatgaatggacagttgagaaactgaaaagtaagcttgtgaaaaatgcccaggacaagatagaactgcatctttttatgctcaacggtcttccagacaatgtctttgagttaactgaaatggaagtgctaagcctggagcttatcccagaggtgaagctgccctctgcagtctcacagctggtcaacctcaaggagcttcgtgtgtaccattcatctctggtcgtagaccatcctgcactggcctttctagaggagaatttaaaaatcctccgcctgaaatttactgaaatgggaaaaatcccacgctgggtatttcacctcaagaatctcaaggaactttatctttcgggctgtgttctccctgaacagttgagtactatgcagttggagggctttcaggacttaaaaaatctaaggaccctgtacttgaagagcagcctctcccggatcccacaagttgttacagacctcctgccttcattgcagaaactgtcccttgataatgagggaagcaaactggttgtgttgaacaacttgaaaaagatggtcaatctgaaaagcctagaactgatcagctgtgacctggaacgcatcccacattccattttcagcctgaataatttgcatgagttagacctaagggaaaataaccttaaaactgtggaagagatcattagctttcagcatcttcagaatctttcctgcttaaagttgtggcacaataacattgcttatattcctgcacagattggggcattatctaacctagagcagctctctttggaccataataatattgagaatctgcccttgcagcttttcctatgcactaaactacattatttggatctaagctataaccacttgaccttcattccagaagaaatccagtatctgagtaatttgcagtactttgctgtgaccaacaacaatattgagatgctaccagatgggctgtttcagtgcaaaaagctgcagtgtttacttttggggaaaaatagcttgatgaatttgtcccctcatgtgggtgagctgtcaaaccttactcatctggagctcattggtaattacctggaaacacttcctcctgaactagaaggatgtcagtccctaaaacggaactgtctgattgttgaggagaacttgctcaatactcttcctctccctgtaacagaacgtttacagacgtgcttagacaaatgttgacttaaagaaaagagacccgtgtttcaaaatcatttttaaaagtatgctcggccgggcgtggtggctcatgcctataatcccagcactttgggaggccaagatgggcggattgcttgaggtcaggagttcgagaccagtctggccaacctggtgaaaccccatctctgctaaaactacaaaaaaattagccaggcgtggtggcgtgcgcctgtaatcccagctacttgggaggctgacgtcaggggaattgcttgaaccagggaggtggaggttgcagtgagccgagattgtgccactgtacaccagcctgggtgacagagcaagactcttatctcaaaaaaaaaaaaaaaaaa

SEQ ID NO: 2539 - DNA, 1340 bp, Homo sapiens
gtgatggaacataggttaagatgccatactgttgaaagcagtaaaccaaacactcttacgttaaaagacaatgctttcaatatgtcagataaaaccagtgaagatatatgtctacaactcagtcgtttactagaaagcaataggaagcttgaagaccaagttcagcgttgtatctggttccagcagctgctgctttccttaacaatgctcttgcttgcttttgtcacctctttcttctatttattgtacagttaaagaagtggtgccgggtaggaaccacggttccttcgtccattagttggaaaagtaccagacctaaaactctaccaagctactaaaaccattgcacatctgtgcttcctaaaaggaaatatgcagcacgtggaggggaacacatacatgtcttgaaaataaactgctagaataaagaaatgctggagaaattgattataagagactatagctatttagtaaagtaagtaaaggcatatccattgtgtaaattaatagtttaaatataatttattttttccttttgatctgaatacttttaaagcttaagttttatcgtgtaaatacattagctaaactgaaaagtataagtaacatgctttgttgcagccaaaaaatgtaatctgcttttttatgacagaattattatagctgagctgacttactagcttttctatactatgtatatagaagaacatgtatattgagaaagaaaacatacttatatagaggaatttatgtaaccatgactttgtaattttgagaattcctcccagtgatggtcagtattcttttggaatgtaaaccgatttaatgccaaaccaccttaacctttgtttctcagtgttccttaacagcctgccttttattaatctcaggcttttttatgaacactctcatttcagtagaatttggaaaactaagcgtggttggaatttctttgaattctgttagtaatgcccaaaagaaaagtctcaagcagtccccctatccagtcatttttatggagtttcatgttgtccactatagctggacactgaaccttttgcctaatttattataaaggcctgaccctctattgtcccatcttcacccccattccagagcagaggagtctctgtggaccatgaattgcactgtctccctcctcatttctaaatgaaaggtattagatataaatttttttgaaaggttagttgtttgagatgctaagcaggataataaatttagattttaaaatgttccctgtaaaagtcagcccatgacaaggaaatttacaaaatactagagtatctagaagggtgaaaacaaaaaaaaaaaaaaaaaaa

SEQ ID NO: 2540 - DNA, 719 bp, Homo sapiens
ccacgcgtccgcctgcacgcaacagaagaagtcctcctgtcaggcgccagagaggaagaagggatcgtctgtctcgacataattccattagtcaagatgaaaactatcaccatctcccttacgcacagcagcaagcaatagggagcctcgagccttccaccctccgaatgtatctccccgtctgctacatcctgctgctcatccaccccagcagaatgcagtcatggttgacatacatgatcaggtacaataacagaatgtcttggaaatacagaagctgaaattttgtggcagtttgagattttttttttggctttttgttgcaaatttcttttagtttttacctaaaatgaagttatttaagttcctcattccttttaagaattgagatttaaattctacacagcttccatagaagaaagttgaacttaaaaaattagtatcggcccagcacggtggctcatgcctgtaatcccagcactttgggaggctgaggcaggcacatcacttgagcttaggcattcgagacaagcctagcacagtgaaaccccgtctctactggaagtacgaaaattagctggatgtggtggtacatgtttatgatcccagttgatgcagaagaatcacttgaactcaggaggtggaggttgcagtgagtcaagatcgcaccactgcactgggtggcagaacgagacttcgtctcaaaaaaaaaaaaaaaa

SEQ ID NO: 2541 - DNA, 688 bp, Homo sapiens
ccacgcgtccgagagttgggaacgaagtcatgcaagggacagaaagatgctgtcggtagtgagtggatggtcagcagtgggcggaggtgagacgtgagtgagctgaggaggttggctggagcgagatcctgagggtttctcttcgtctccacggcctggtgtaaggggctgcccccgcccccaagtttaaatgctctctagttcacgctctctaagcttcatcatgtcagttctgatcctcattcctggggcgagatcatgtggtgggcccttggtagctcaagattagcctggcagtgtctcatgtccatgtgccatgctgggggcatccaatttattgcaagtgctttggagagcaatttggcattgtttagtgaagctgaagacgcttaaaccccatggctcggtggtcctctctctgcatgtgtgtgtatgttccagaaaaccatcctgacatgcatgtgcagccttgtaactgtggttcgttatattgttggtaatggaaaaatattaggcacaataggagcctggatggctacctcatggctgtttatataatggagtgtatgcagcagtaagatgaatgtatgaggttgaaccatatggtgtggtttcacctaacactagagcaatatatgctgagtggagaaatctgaatgtatagctgagaggaaaaaaaaaaaaaaaa

SEQ ID NO: 2542 - DNA, 1940 bp, Homo sapiens
cccacgcgtccgacttcatcaaggccagctaatactgtgttaaaccgggctgaaaatgagaaaacttgggagatggaggaatggggaaatggcagtgggataggtagggaaggattactcttaattgttttaaaagccataggaaagtcttccttgtacgtggctgtaaatttataagaactattgtgtcacataaaccaacaagaatcaacctttgctgcttcagataatttgatttttccagcaaggaaattaataagttactgattcttcagcatagaaacaactgagaagaattaatgcaatgtttcttcactagaaaacccaacccttcatttcttttcattgctccaaaacccagttttcaactaatggttttctcattaaactaaatgtttagaaaagttgtttagagtttttctttttcttttacatagtcctcctgatccagtataagactatttagtaacgtgcatttgtatggtactatctaaagtaagttagattgatgtaagagatcgggtagctgcggaacaaaattagttatatcctaattaggtacagtgaatgacacaaaatcattttagcaatgcttcttaaccttttggggtcacaggcgttttgagactgatgaatcctagggacttatttacccaggaaaatgcgtatataacatacatatctccctaaagtttacaatattgtagtggttcatgggccccctggttaagagcccattctaaagtacaatagggcatcatcccttttcctgcaaagcccaaaagtatatttctagggcatgaaaataacttgagtctattttaaggaattgtttcactctagaggtagataggggacctggctagaatctgacattaaaatatactttttaaaaaatattatatttggggtggggaaagtgattaaaaggtgaaaaaaaaacatagtattcagaagttttggaggttaatgtctttctctaagatttgccactttagaaattcaacagaaaagaggtaaaacagaaatggaatgtatctggaacatttttggcctccatagtgcagatatactatattaacaagtaatacatttatttacctgtcagatctccaggttttaagattttgagctttctagtattaggattcattaaatgttcaattcatttcatattctaaggaattaggttatttacttactaattcaggatgttaaaataacatccaagtcggacaaccaccaccaatgcacacagttaatgagatttctaaaatataataagtacaatgtaacaaacgtatagaattttgcatttgttgccaaaattagatgtttaatgacagcttatttagttcccatttgtgggacttctggaacatagaaaccattatcttacctggttatcccttgactaaatagcatatctgcaggaaaatatcttgtttgtagtgatatgccccaatagtgattgatttcactcttgaaatgagttatatcacttaatttgtataaatgttatgagtggagagacatgtacatgttaaaagcatgttgcattatatattcattttttaaactctataaatgttaagaataatataattgcagaaatatttttcttaaatacaatgtgtaacaaaattctccgtagcaactcacccactttgcagtttatgtgatccacacttttaaagaaattccataaatgtatattttgtattatgtattatttcctggtccaaagaaaatatgtgaattcagttctaactttaagaatgtactgtttgttttcaagttcattgaaaaattgcattcagcctgcgaatggttgcagattgtatgttagatgaaaagtagaaataatttctagtttggaaaactggtgccactaaataaacaggcaattacataaaaaaaaaaaaaaaaaaaaaaaaaaa

SEQ ID NO: 2543 - DNA, 1526 bp, Homo sapiens
aattcccgggtgtgtgtctgtgtctgtctgtgtctcgcatggcgcgcggccccggacaagcgctggggattyccgtttraggcgtcactactgtcactgccatcaccccacggagccmcttctagaggggagtagacccggcccttcgccgggcagagaagatgttgcccctgtccatcaaagacgatgaatacaaaccacccaakttcaatttgttcggcaagatctcgggctggtttaggtctatactgtccgacaagacttcccggaacctgtttttcttcctgtgcctgaacctctctttcgcttttgtggaactactctacggcatctggrgcaactgcttaggcttgatttccgactcttttcacatgtttttcgatagcactgccattttggctggactggcagcttctgttatttcaaaatggagagataatgatgctttctcctatgggtatgttagagcggaagttctggctggctttgtcaatggcctatttttgatcttcactgctttttttattttctcagaaggagttgagagagcattagcccctccagatgtccaccatgagagactgcttcttgtttccattcttgggkttgtggtaaacctaataggaatatttgttttcaaacatggaggtcatggacattctcatggctctggccacggacacagtcattccctctttaatggtgctctagatcaggcacatggccatgtcgatcattgccatagccatgaagtgaaacatggtgctgcacatagccatgatcatgctcatggacatggacactttcattctcatgatggcccgtccttaaaagaaacaacaggacccagcagacagattttacaaggtgtatttttacatatcctagcagatacacttggaagtattggtgtaattgcttctgccatcatgatgcaaaattttggtctgatgatagcagatcctatctgttcaattcttatagccattcttatagttgtaagtgttattcctcttttaagagaatctgtkggaatattaatgcagagaactcctcccctattagaaaatagtctgcctcagtgctatcagagggtacagcagttgcaaggagtttacagtttacaggaacagcacttctggactttatgttctgacgtttatgttgggaccttgaaattaatagtagcacctgatgctgatgctaggtggattttaagccaaacacataatatttttactcaggctggartgagacagctctacgtacagattgactttgcagccatgtagtgaatggaaagaaattatgcaccttttatggaccaaattttyctgccagtaagaatttcagttgtgggcctccagtcttctggaatgtcttcactgcagctgctggaaatcactgctttcattcccacaaaaccagtattacttttttttaaaaaaaaaaaaaaaaaaaaaaaaaaaaaaaaaaaaaaaaaaaaaaaaaaaaaaaaaaaaaaaaaaaaaaaaaaaagggcggcc

SEQ ID NO: 2544 - DNA, 2576 bp, Homo sapiens
ggcacgaggttttttttttttttttttcacactttttatactgattttatattgaaatgaaaatattttggatagactgggttaaaaaaaaattaagttcacctgcttctttttactttttgaaatgtgactgtcagaaaatttaaagtcacatatgtggctcacactatttctgtgggacagccctgcctctagctaggggctttggtgagaaccagatgagttgatgggtctcctctgggccctgcttccctggctgctgaggtgcaggaactgtgaggggagggcagcctgtcacggtgcccaacacagggcagggctggacaggtacaagtggaacaggcggataagctgggaagggcacagagaaaaggagctcctcgtgacagcactttcccaccttttattattcaacacatggaagggggtggagacacaaggatagggcaatggtgagtttcaataaataagagaaacaggatggacaggcagtgggcccatgcctgcacggccccacataaataaccaggttgctgagccagagtggaagtcagggctgggcctggcagccgcctgcactgcccagaagcactggcaccacagggacacagaaaccactgaggcccaaggtgtgctccagccccaccaagtcttctccctaaagctcctgagatcttggggctggctgggcaggctagggctctgtatcacagtcctgccgggatcaagtctattttttcagtttcattaaaaacagctgggggaggggcaggcacatgcattaagccccttccgtaggcagagccatggatggacagccccatgggggccttgaaggcagaggccctggaagcagcaaaaacggggctggataaagctactaatgggagggatggtagagcccagctccccagtcccccacaacccagcccagaacctacaaagagctgaagaggccctgggtactgagacgtctctccttacttcacagtcagaaaaatggacccagcgatggccacagatgtgcccaagattagaacccagggactcactctcctagcccaggactttctgctaccccttccctttatagacctgctggaagaggagggggacgcacatctgctctagggccctgtacagaggcaagggtgtggctaattaccaaggaatggggccaggggtgacgggcacaggcccctcccctctgccaagcccagcctctgatgatacagagaatcccgtgggctcctaggatccagccagggcaggcacgggggtcggggcatccttcaggggagcaacatggcagcagggccaggggcggggctcagcctgctcctgtacacagtgcccgccggccacctgcctcctcactggggcagacgctcccacctccaggccttggtctttgctgtctcgtctgctgggccattgcttctcggtcctcacagtcccagctgcagctccacctcctccaggaagccttcggaacctcccagggcagggccgcagtgtccttagactagaccgcccctcagatgaccaggttgctctcacttagccggaccacatagcggttctcctcggccttgttctctgctgggggcttcagccactttgtacggcttccgccacttcctagcagggcctgctgctcaggggggaggccaggctgtggggagtcagggagatcaccccacgagggcccagcctccgtgatggtcttcacctcagacaccattgaacttgtccgctgctcaggaattcgagccacgcggaacctgcccacagacaagatggtgatctcgccctgacgccctgccttggccccggccttgggaaccctggtcgggttaggcagaaggctgggaacaggagtagtggcggctacagcctcaggggacagcagcacctcgggccacttcttctggctacagcgggagcagcaggggccagagagcgaggccaggccctgcacggtgtggagatggtggcggtgcgggcagatgtgtggcacgttcgggggcgctggcggcagcttggacacaggcctgtggctcgtctgcaccagctgtttgctgtggtactctttcagcagctcctccagggccgcagcattctctttcttctctgtgatcaagcgcaccaggaccccaatggtgtcctcattggcatcctcagtccggtaggcagggttgattccactgcctccacctccagggccgggcccgacctccttgtgcgccgtgcagtggtagcccttccgcttgaggaggttgcacaccaggatgcccaacagccccatgaggcagaagacagggacgatggcgatgaccgcgtactgggcggctgtctcctctgggccacctgcccgggtgccgttcccaggctgccgtgtctcaccaccgctgctggcccctgctgccacctccacgccacgtcgggcccgccgcccccactcatcacagccatgagtacccagaggtgcccaggaacatggttgacatggaacgcggggaaccccccaaggcccaaaccacccaggccagcagtctccacagagtgtatctcga

SEQ ID NO: 2545 - DNA, 6705 bp, Homo sapiens
  SITE (405): n equals a,t,g, or c
  SITE (2722): n equals a,t,g, or c
gaattcggcacgagcagagatcgcgagcgaggcaccagcctgcagccggcccccagcacatcctcagccgcacagacactcggcgaggtggaggtgagggcgggcgccagcgaactcggagaggggctcgctcactcccaggcgatcccagccgccaccgccgccgcaccagcagcagcaacagcagcagcagcttccttcctcagactcccctcgagaggctggccaagcgggtgtagccgttgggggaggctcccgccgggggaacccggcgaggacaagagcagggcggccgccttccrctcgggctgtccggcggcggctgcctccgcccgygtgtccgtcaagggtgccgcgggatgtgtgtcagtttacgcctctgagatcacacagctgcctgggggncgtgtgatgcccaaggcaagtcttggttttaattattattattatcattattgttacgcttggctttcgggaaatactcgtgatatttgtaggataaaggaaatgacactttgaggaactggagagaacatatatgcgttttgtttttaagaggaaaaccgtgttctcttcccggcttgttccctctttgctgatttcaggagctactctcctcctggtgaggtggaaattccagcaagaatagaggtgaagacaagccaccaggactcaggagggaaacgctgaccattagaaacctctgcataagacgttgtaaggaggaaaataaaagagagaaaaacacaaagatttaaacaagaaacctacgaacccagctctggaaagagccaccttctccaaaatggatatgtttcctctcacctgggttttcttagccctctacttttcaagacaccaagtgagaggccaaccagacccaccgtgcggaggtcgtttgaattccaaagatgctggctatatcacctctcccggttacccccaggactacccctcccaccagaactgcgagtggattgtttacgcccccgaacccaaccagaagattgtcctcaacttcaaccctcactttgaaatcgagaagcacgactgcaagtatgactttatcgagattcgggatggggacagtgaatccgcagacctcctgggcaaacactgtgggaacatcgccccgcccaccatcatctcctcgggctccatgctctacatcaagttcacctccgactacgcccggcagggggcaggcttctctctgcgctacgagatcttcaagacaggctctgaagattgctcaaaaaacttcacaagccccaacgggaccatcgaatctcctgggtttcctgagaagtatccacacaacttggactgcacctttaccatcctggccaaacccaagatggagatcatcctgcagttcctgatctttgacctggagcatgaccctttgcaggtgggagagggggactgcaagtacgattggctggacatctgggatggcattccacatgttggccccctgattggcaagtactgtgggaccaaaacaccctctgaacttcgttcatcgacggggatcctctccctgacctttcacacggacatggcggtggccaaggatggcttctctgcgcgttactacctggtccaccaagagccactagagaactttcagtgcaatgttcctctgggcatggagtctggccggattgctaatgaacagatcagtgcctcatctacctactctgatgggaggtggacccctcaacaaagccggctccatggtgatgacaatggctggacccccaacttggattccaacaaggagtatctccaggtggacctgcgctttttaaccatgctcacggccatcgcaacacagggagcgatttccagggaaacacagaatggctactaygtcaaatcctacaagctggaagtcagcactaatggagaggactggatggtgtaccggcatggcaaaaaccacaaggtatttcaagccaacaacgatgcaactgaggtggttctgaacaagctccacgctccactgctgacaaggtttgttagaatccgccctcagacctggcactcaggtatcgccctccggctggagctcttcggctgccggtcacagatgctccctgctccaacatgctggggatgctctcaggcctcattgcagactcccagatctccgcctcttccacccaggaatacctctggagccccagtgcagcccgcctggtcagcagccgctcgggctggttccctcgaatccctcaggcccagcccggtgaggagtggcttcaggtagatctgggaacacccaagacagtgaaaggtgtcatcatccagggagcccgcggaggagacagtatcactgctgtggaagccagagcatttgtgcgcaagttcaaagtctcctacagcctaaacggcaaggactgggaatacattcaggaccccaggacccagcagccaaagctgttcgaagggaacatgcactatgacacccckgacatccgaaggtttgaccccattccggcacagtatgtgcgggtatacccggagaggtggtcgccggcggggattgggatgcggctggaggtgctgggctgtgactggacagactccaagcccacggtagagacgctgggacccactgtgaagagcgaagagacaaccaccccctaccccaccgaagaggaggccacagagtgtggggagaactgcagctttgaggatgacaaagatttgcagncycttcgggattcaattgcaacttcgatttcctcgaggagccctgtggttggatgtatgaccatgccaagtggctccggaccacctgggccagcagctccagcccaaacgaccggacgtttccagatgacaggaatttcttgcggctgcagagtgacagccagagagagggccagtatgcccggctcatcagcccccctgtccacctgccccgaagcccggtgtgcatggagttccagtaccaggccacgggcggccgcggggtggcgctgcaggtggtgcgggaagcagccaggagagcaagttgctgtgggtcatccgtgagaccagggcggcgagtggaagcacgggcggatcatcctgcccagctacgacatggagtaccagattgtgttcgagggagtgatagggaaaggacgttccggagagattgccattgatgacattcggataagcactgatgtcccactggagaactgcatggaacccatctcggcttttgcagtggacatcccagaaatacatgagagagaaggatatgaagatgaaattgatgatgaatacgaggtggactggagcaattcttcttctgcaacctcagggtctggcgccccctcgaccgacaaagaaaagagctggctgtacaccctggatcccatcctcatcaccatcatcgccatgagctcactgggcgtcctcctgggggccacctgtgcaggcctcctgctctactgcacctgttcctactcgggcctgagctcccgaagctgcaccacactggagaactacaacttcgagctctacgatggccttaagcacaaggtcaagatgaaccaccaaaagtgctgctccgaggcatgacggattgcacctgaatcctatctgacgtttcattccagcaagaggggctggggaagattacattttttttyctttggaaactgaatgccataatctcgatcaaaccgatccagaataccgaaggtatggacaggacagaaaagcgagtcgcaggaggaagggagatgcagccgcacaggggatgattaccctcctaggaccgcggtggctaagtcattgcaggaacggggctgtgttctctgctgggacaaaacaggagctcatctctttggggtcacagttctattttgtttgtgagtttgtattattattattattattattattattattatattttatttctttggtctgtgagcaactcaaagaggcagaagaggagaatgacttttccagaatagaagtggagcagtgatcattattctccgctttctctttctaatcaacacttgaaaagcaaagtgtcttttcagcctttccatctttacaaataaaactcaaaaaagccgtccagcttatcccatcctctgattgtcttctgacttaagggatttactgtggtgtaggttctgccagccaaccctacaagctgccatttccagtcctagcatttaagtaggatgttgttgcctttaacttttcttatccaggggaaaattgccattttagggtcagcatgaacagctctttcttgtatgcgatttaaaacaaactggaaaggaaacttcacacgtcaaaatccatagaagcgcctggacgaggcttaaagtgctttgtgagtgaataggagccattcgctaattctagacccacagtgtctggtggtggggcttcccttgtggggcttctggtggtggttttgccttttcttttccctcctccatgttcttctaaaacatatacatatatacatacacacatacacatattcttcaggtctctaagcccctggaagcagcattgtgtgatattctcagaggcaggggaaaatagagggaaaaatagagactattggtatgttctccccatcagcgagttattgtaactggtcaccactggacgggaaggagaacagaggagagggaaagagaagcccaacctctgtgatcatatgagggccaaggctgagcagtgtagacagagaccctttgaaatgcatttgtctctcaaatagactagtaaacaccgacttctcctttgggttacaaacaccatttcaacctttcgggagagtcagagctaggatgtacaagaactgattctaaccagaagtccgcaagtactgtggacaagaatgcttaaccatgctgcttcagccttgagagacctaggttcttacacatatgcacacacgcatacacacatgcacgcacacacacatacacacatgcacgcacgcacgcatgcacaccaatttatgtttttattaagtgccttgaaaaaatgaagaaaaatgtattttccctttatgtaaaaattagtgaatatcttatgaattaaggcattcctctttccctaaccccgatggctccattcccaagtaccccaactcactgctgatcctattaaaggaatgagtcctgctacccgagtggtagtcatagccctagatgactctcaactactcttcaaagggaggcatcaggaatagaatgaaactgtgtgaaggataagattgttcgcatcaagatccaaatcttgatttcatattaacgcctaaggattgcctgtgtgctggaaatatatttgaaactcaaccagtatgcccagcctattgcatatcattgtcagaccatttttgctgctgtggtcacccacgatttcatttgtcttatacccaggtgaaaggggaagggtgaatgggactggctggttcctttaaatgttaacttatggaaatgctagttcaaatggtaatgtcacagtgttttgtatgcagagagcaagagttcaaccaacagctgtttattcatgtgtgtgtgtctttgctgctttgagttctctgtatctactgtgtatgtgaatggtcatgtgggactcagtggtggtgttgtgactttgacctagggtccgagtgtcacagctgatcttggcactcggcactcattggcacagtggtagttagaggtgaaaagtagagctgtcaagcccaagggcttagctttagggctcctcctgagttcggcccacagtagaagcaagattttaactagccccttttcctcttcaccctcccatgatgcgcagtgttcagaaagctggtaagtcctagggatttccagaagtagcctgcagaagaaggtaagtttgaaagccactccaggggtcctgatgctgtcatgctcagtgagccattttacagttctccaaagtctagccctgtttcggacctgcacttcacctctaagttatgtacaactcaacctgcatccctctaaaagtcctatatccatattcaccattggctaatttgaggccctgagtgggcyttgaatgctaaaaagaagcagggtacgsagggctacatgtagataccacaccaaggctggaggctgstctgtcrtaagacagaaagaaagacgctgggcccaattttgacttggccaggggacaccttggtgtgtttgttatctttatctgtgggtaggctagctgacccatctccttgagtcattccctttgggaaaccccactgccagtattgatctcctttttgccttgtactgaatgacacattacctccacactctcccggactaggtggtcaacagggccacagggttgctttctgtctttggtggggcaggggagttgacagggatgagggtccaaggaataagcatgaatgacaagaaaacaagggaaagagttaacctgtcacatagcaggttaactttttcagggtttgcagttagaggtattcgaccattcactggctgagccagatcacgggaacttgagagcttttactgtgattcttcaatgtaaaaaataaacaacaatgtcaaactgtgtttatatgatttgtataaagcctttttaagattactatttaaataaacattataccagagaaaaaaaaaaaaaaaaaaaaaaaaaaaaaaaaaaaaaaagggcggccgc

SEQ ID NO: 2546 - DNA, 1415 bp, Homo sapiens
acgcgtccgcccacgcgtccgcacaataaatgtgagcaatttcactgtaagcagatcccatgctcatgaggcatttaacacagcttttaccactcttgctgcttgcgtggccagtatcgttttggtacttttgtacctctatctgactccatgcccctgcaagtgtaaaaccaagagacagaaaaatatgctacaccaaagcaatgcccattcatcgattctcagtcctggccctgctagtgatgcctccgctgatgaacggaaggcaggtgcaggtaaaagagtggtgtttttggaacccctgaaggatactgcagcagggcagaacgggaaagtcaggctctttcccagcgaggcagtgatagctgagggcatcctaaagtccacgagggggaaatctgactcagattcagtcaattcagtgttttctgacacaccttttgtggcgtccacttaatttgtgcctatatttgtatgatgtcataatttaatctgttcatatttaactttgtgtgtggtctgcaaaataaacagcaggacagaaattgtgttgttttgttctttgaaatacaaccaaattctcttaaaatgattggtaggaaatgaggtaaagtacttcagttcctcaatgtgccagagaaagatggggttgttttccaaagtttaagttctagatcacaatatcttagcttttaccactattggtaatttcagagtaggcccaaaggtgatatgactcccattgtccctttatttaggatattgaaagaaaaaataaactttatgtattagtgtcctttaaaaatagactttgctaacttactagtaccagagttattttaaagaaaaacactagtgtccaatttcatttttaaaagatgtagaaagaagaatcaagcatcaattaattataaagcctaaagcaaagttagatttgggggttattcagccaaaattaccgttttagaccagaatgaatagactacactgataaaatgtactggataatgccacatcctatatggtgttatagaaatagtgcaaggaaagtacatttgtttgcctgtcttttcattttgtacattcttcccattctgtattcttgtacaaaagatctcattgaaaatttaaagtcatcataatttgttgccataaatatgtaagtgtcaataccaaaatgtctgagtaacttcttaaatccctgttctagcaaactaatattggttcatgtgcttgtgtatatgtaaatcttaaattatgtgaactattaaatagaccctactgtactgtgctttggacatttgaattaatgtaaatatatgtaatctgtgacttgatattttgttttatttggctatttaaaaacataaatctaaaatgtcttatgttaaaaaaaaaaaaaaaaaaaaaaaaaa

SEQ ID NO: 2547 - DNA, 925 bp, Homo sapiens
ccacgcgtccgccagagtcctggccctgagcgggaatcgcagtggccgaggctgagcggcaggtagaaggggcgtctccggggcttcacagggaacacaggggcttcggcccaaccacaagcggatcgccccgaccctcactcctggcgtctgagtctctggcgtagccatgctgagtgggcggctggtcctgggtctggtctccatggctggccgcgtttgtttgtgccagggcagcgcgggatccggggccatcggtccggtggaggccgccattcgcacgaagttggaggaggccctgagccccgaggtgttagagcttcgcaacgagagcggtggccacgcggtcccgcctggcagtgagactcacttccgcgtggctgtggtgagctctcgtttcgagggactgagccccctacaacgacaccggctggtccacgcagcgctggccgaggagctgggaggtccggtccatgcgctggccatccaggcacggacccccgcccagtggagagagaactctcagctggacactagccccccatgcctgggtgggaacaagaaaactctaggaaccccctgaaccccaagagagggaggaccaggatccgaatgggctgggtgagcacgaattaccgaggccttccctttgatacagtccaggatttgtaagggatgaagacccctgggccccattctgttggggtccatacatactctccgaagatagcaacttgcttcaggtcaaagtgaacccgagaaaagagaagaatcactcactactgctcttgccctggactattcaggaagggcagcccggatgttccatgttaaatcgtgacagaattgcaccagacctgatgagttggaaacaatcctatacattaaaagaaattacactatgaaaaaaaaaaaaaaaaaaaaa

SEQ ID NO: 2548 - DNA, 699 bp, Homo sapiens
  SITE (683): n equals a,t,g, or c
tcgacccacgcgtccgctcttggaaaaaaattatgttagtcttctataattatagaaataataaatgttcacaatagaaaaattgggaattttagaaagagtagaaaaagaaatccctataatatccccacccaaaggcagttactattaaatttgggtatatttcctaccagcattttttctcatgcatgcatttcttttttacgtagctgtgatcatgaaaacaagataattcgtgtcctgtgttattcatttgacatattccataagtaagctccattatagaaagtaacttaaaatgatgttgtatgtttgtttttgtttgtttatgttttaataaagcatgtggattacttctataagacgaaagggaaaatgtagatcctatgcacaagtatttatttccctccaaaccccctttttataatatgtattgttgattttatagagtgacctgatcagtacatgtaggggctcaaatcacagctattctttaatacttcgggttacttcattgctattattgtttgttactaatatgtaagatgaggaaaagacaaccttttggtgggtgttgggactgggagggagggcattgaggacagatgaaccaaagctggatatggaaggaaacccaacttcataccaaaaaaaacaaaacaaaaaaaaaaaaaaaaaaaaanaaaaaagggcggccgc

SEQ ID NO: 2549 - DNA, 1236 bp, Homo sapiens
ccacgcgtccgagacaacatccggcccagcagctctggggggtactgggtgggcatgtcgaccatccgccctaaccctgggttttccatgctggatttcttatctgagagaccctggattaaaaggatgatttttaagctctttagtcaagagacggtgatgaagtttgtgccgcggtacagcctcgtcctagaactcagcgacagcggtgccttccggagaagcctgcatgatcccgatgggctggtggccacctacatcagcgaggtgcacgaacacgatgggcacctgtacctgggctctttcaggtcccccttcctctgcagactcagcctccaggctgtttagccctcccagatagctgcccctgccacgcaggccaggagtcttcacactcaggcaccaggcctggtccaggaggagctgtggacacagtcgtggttcaagtgtccacatgcacctgttagtccctgagaggtggtgggaatggctgcttcattcctcgaggatgcccgggccccacctgggcttgtctttctgtttagagggaagtgtaacatatctgccatgaggaacataaattcatgtaaagccattttctcttaaacaaaacaaaactttctaagtacagtcattctctaggatttgggaagctccttgcacttggaacagggctcaggtgggtggagcagtaaggcactacccagagagcttgctgctgcggccctgtcctgcggcctcaaagttcttctttactatatataacgtgcggtcatacctttcttcgttgtggtggggatggaagagcagagggagcatggcccaggggtgttgaggccagcggtgagagccgtgttagccaagacatggaactgtgttctcaagggttatgtggggcgtgggctctccatagtgtgtatgaaaaagcttgttgactctagcggctcagagaggactttgctgggtttctttctgtgaatatctccgtgctgaccatgctggaattggatgattctgcaattcgggacctactgcaggggtccgtttagtaacgtcttgtctgtgatctttgttcttgacctctagaccccaagatgtgaacagtgcacgtgttaatgtcatctttgctcatgtgttataagccccaagttgctgtatattttcacaagtatgtctacacactggtcatgattttgataataaataacgataaatcgaaaaaaaaaaaaaaagggc

SEQ ID NO: 2550 - DNA, 413 bp, Homo sapiens
ccacgcgtccgaagaaataaaaatgtctgtttacagaggacatgataatatacgtagaaaatccaaaagaattgacaacaaaactcctgaaagtttttttagtccttattagtcaattagcaaggttgaaggatacaaggttaatacacaaaagccaatcacttttctatatggcatcaacaaatgaaactagaagttaaaaacacattgccatttacattagcacctaaaagaatgaatacttatatatatatacacatatatatggacctatatacttatagctataaagctaacaaaacatgcaatatctgtgcaaggaaaaaaaaaaaaaaaaaaaaaaaaaaaaaaaaaaaaaaaaaaaaaaaaaaaaaaaaaaaaaaaaaaaaaaaaaaaaaaaaaaaaaaaaaaaa

SEQ ID NO: 2551 - DNA, 639 bp, Homo sapiens
ccacgcgtccgaagcactttcacttgaagaacctaaaatgattgactcattcatagtaaatatgggcatgtaaactaataaatatgcactggatacatatatggatttatgaagaaggcgatttagtcaagaggatgtaattaaaatatgtggtctctaaaatattccagttacaagatatttgttttattaatatttgctggctaaaaacaaatgtggtttttatatatttttgtagtgtgttgagaagagcaaaagctttataaatatacctgatgcgctgtagaatgaaaatgtaaaagataacctgtatgtgttccgagctttaattttttgtttacaaattgaacagtgttacatgggctgtccagtcctgattatagagaggaagaaatggtaacagtatggcagataagaattacaattatagaaaatgaggggaaaataacaaacctgttttatgaaaattcactggtgctgtttacattggaataaaaagctctataaggaaaaaaaaaaaaaaaaaaaaaaaaaaaaaaaaaaaaaaaaaaaaaaaaaaaaaaaaaaaaaaaaaaaaaaaaaaaaaaaaaaaaaaaaaaaaaaaaaaaaaaaaaaaaaaaaaaaaaaaaaaaaaaaaaa

SEQ ID NO: 2552 - DNA, 744 bp, Homo sapiens
  SITE (271): n equals a,t,g, or c
ggccccaggacagccggagctcggcctgcggtgggggcgcttcctgtggacgctgcgcctcccatcgcccgggtgcctgtccttgcccagcgccaccaggctggaggcggagtgggaggagctggagccaggcccgtaagttcgcaggcaggggtgggtgtgggacggggctgcttctctacacakcctcyacgctggccttcaccttcacccctgcatcgtcggtgaccctgggaccctccaggcagcgtggcctgtggcaccgtgaggnttgggacccaccgaggcgcagaggcggcccgaatgcagccctggttcaggcccggagagggtttgcgggtagttgcacggacaattcggcggggtgctgcctgttgctgccattagcccaggaggaggtcgtgggacggggagggtgggatggacggcggacaggcagtccccacgctgctgggtggcgccgggcttggtggggtcttccactgtgtgcccttctcgccgaggccggtcccccgggtgtggggtgccctgctgcggactcctccgcgagccccatcgtcgcgcctgtggacgcctaggcaagagcggccctctgcagccaagagaaataaaatactggcttccagataaaaaaaaaaaaaaaaaaaaaaaaaaaaaaaaaaaaaaaaaaaaaaaaaaaagggsggccgctctagaggatccaagcttacgtacgcgtgcatgcgaagtcataactcggctata

SEQ ID NO: 2553 - DNA, 678 bp, Homo sapiens
ggcacgagacttactgaccggcctgggctgctctgagacatggaggaagccagtgaaggtggaggaaatgatcgtgtgcggaacctgcaaagtgaggtggagggagttaagaatattatgacccagaatgtggagcggatcctggcccggggggaaaacttggaacatctccgcaacaagacagaggatctggaagccacatctgagcacttcaagacgacatcgcagaaggtggctcggaaattctggtggaagaacgtgaagatgattgtccttatctgcgtgattgtttttatcatcatcctcttcattgtgctctttgccactggtgccttctcttaagtaacagggaacctctcccacctgcccttcttttcagggacaaccctccataaatgtgtgccaagagggtctcctttcctgtcttcctctacagagaatgctgctcggtcctcctacccctcttcccgaggccctgctgccacgttgtatgccccagaaggtaccttggtcccccggaaggagagaaaaaagagagatggactgtggctgcatttcttgggtccttagagtgggctggagagacctagagggcccagcatgtggctgggaaactgttggtggccagtgggtaataaagacctttcagtatccctaaaaaaaaaaaaaaaaaaaaaa

SEQ ID NO: 2554 - DNA, 2785 bp, Homo sapiens
gataaagaagaaagtaggtgggttacatgaaagcagttatacatcaaaaatatggttttcttcatcttcttttcctccttttcctttctcttcatcgtatctcttcagccacattcacccttaacacaaaaagttcctcctgaaatcctcatgctattttcttggctcaaatccctttgattaccccagattttttggaagaaatccttccaaaggtatttttcatctcaaaaagtttttttgcattcattaccttacttcatgccctcttctttcaaagttccagagagcactgcattcactttgctgcattaagagggaaatagcgtcttctctcctcctatcctgttattgactctcttgtggcttctttcttcatcagagaagcaagtggctcaaccagggcttagaaaaggcacagtgatcaagtctgttcagagccagcctctggctggtgaacatccttgtacttcctgtcctgatctcactcacccctaakgaggcagagagaagggtaaccagtgtggctatcttggctcatcctcgtgggtacaatcaatagctgaggcatgggcttggttgtagagaaacaagtggggccagaggagaggggagaaaggagggaggggagaaagattcccccattggaaattctgctgggattcagtatcctagctattctgatgtcctagatttgaatctgggtttctaaacatatgctctacattatgaaaatgcccaaaaacacatataaattggcttttcttctgtgtttgtcctacattgcagttctataactattttattaagctctctagaactggttcttatatttaccaacactggttattaggttttgaaactcaaaataagaaccatttgtaggcatctgtataaaacaaaatacttattgatcatctactaagcattataccaggctttataacttcctcattcttcttctaagtgttcagtgacttgtggctatttctctaattaaattgaaactcctggtgagaaactttaaggctctccaacaagcaatgtatgttccctcactgtaacttctgtcccagccatacaaactccttctcagttcaccttctctcaagtccaggctttcttcagtgttacttgtgtacctaaaatatgcctatagttcacctcacctccatcctacgtcctatcactgatacaaggggaaatatatatatataatacataaagtcttccttatgatgacttcaaaagaccaagggagggtgkatgggttttttttcttacctcaatattcaaatccctgaggttgkcacaaacaatatcaaatcatgattaaataatgatttaattttcttttgtaagttcttaaaattagkatattaatgataatctgcttgaaatcaagccttattgctcttcccatggaattcgaatgatgmcaatwaattataaacccatcackgtattttcttcattctgtamcatgtcaagatcagcttaatwaattctctgggctacatttgaagtttcttggttaaaaatcagagatccaatgtatcttaaagttaaatttttagatatctaaaaaacatagcatactgcatctgtaaaaatggcatgctgaactttcacaaattattcagaaacaaattttatttagagaaatttaagctaaaaatgcagcaaaccagaaatcagttactgaatgcttcacaatccccagaaaatgagaattatgtaagaaaggaataaaggcaaattttacattgaccctcacagagcaaaattacaggagttctgttctctttgattactaactcagaaataatttatttcaagcttttagcactgaagatgttagttcaaaaaccacatgtttattcttatgcctgtgttgataaaactttgctaaatattttatatgtattaaaaatggagaatgaaagagatgtgtttcaagagccttttacmgataaaycctaacaatcaaataggaaatrgamcattaatgtgaataaaatgctctggcaaggtaggaagaaatgaataactggaagtagagagtccttagcattacaaagtggtaagatttctaaaacagtcatcttgtgagttttttatgcactgttaatagtaacaatacgttccatgaattatgcagttgggatgatttctccttgtgtggattgccagttctagaaatcagtaaaagtgaagaatgagttgaaaaacctatcagcctactgaatctactaaagcctctaaaatattcaatgtctaattgcagcaatttgtatttcataggtgccatatcaaaatcttctccattgaggtcatgattgagtctttaaaaaaaaatttccagatgtgaagatatatatatatacattttaagtttccagcattgtgtgtacaagaaaccaaaacctccatggagggcatgctgatgagttgcatggcacaattgtcatttctgttttgattgcatgtcctatttttgaacctgtaaaagtgtgtagtgcatatatgtgtgtcctatatatggcaatttgtctgatagtgtgtttgagtyctttctggctctttttctagcagagttcaatccacagctttcttcattggagaatttgtgaaataaaagtgagttaatttgtgttacacactctcttaaataacctagacctacaaattgcttgcctaaggctaaaaaatagaaaattcaaagaaacatatgaatgatctcagttggcctttgatgagtaaaaaaaaaaaaaaaaaaactcga

SEQ ID NO: 2555 - DNA, 2163 bp, Homo sapiens
aatggcccagccccacatggcctgcagacagtgctctgtaaatagttgttttaatttagctgaatgttagcattttagtctttggcattttagcgtttgggaggtagattaataaagtatattccttcaagcctgctgttgataccatgaagactgggcgcctcagtcccagccctgtagctgtgtgtcttgggccaccagtggcctgcaggacgaaggtactgttccatcacctgcggtgtgcctcaggatcaccaggtgcaggcccccaccctcggagatgctgctgcagtgagtggttccactgcctggataacccttgaggaacacgtcagttactgtcacgatggggcaggtggagctccttcctattttttggggtgctccctgtttgtaaaggggagtttgttcattgggaaagacctgggtcttgacacggccctgccacttagtcccctaccctctccattccccaggctccacccgtgctgctcaggtgcaaatggacttgagagcatctatgtgctggtgaagcatgaggtctgagtagaaaaggggtatcccttgagaccaccttgggaccagtgcttgcaagcagcgagatatttccccagcaaaaccaggcagctgctaattaaatgcttagaaccaatgaaagctggctgtggtcctgcctgtgagctgcctactgctgccttctgaatgcatatatctgctactgtagccccgggttgtcaaactatggcctgtgggccaaatccagccacagtcggttctttaaagttttatcgaaacacaagcaatggaaatgcccatttccattgttgtctccagttgctctgctccgagggcagtgttaagttgtgcagcagaggcccctccatgcaaagctgaatatgtttactatttgaactttttcagaagttctgcttaaggacaaaataaagcctaaatccaagaacacttttaaaaatgaggaaatagtgaacacaatagacggaagtctggaagtttctacccatgccaagaaaagcattttatgttttgttcacatatgttgtgcaattcaaatttttttccctatattctctgactagacacttgtactgagtcaattggcgagtgtgtctgtctaaaagcacaatatcaaaatatcacttaaagcatctttacatagtgtgtttaagaaaaagttgttattcagcagaaaggtaattccaattggtctgcatatttatcagcacttggtattgtctgtttcttattttagccattctgataggtgtgtactgatatctaatcatggctttaatttgaatttccctaatggctgatggtgaacatcttttcatgtgcatttctgtcatctgtatgtctttggtgaagagtcttcaaatcttttgttcatcttaaaattggattgttatattaccattgggtttaagaatctacatattatggatacaaatatgttgtcagatatgtgttttgcagcattttctcccagtctgtagctkgyctttaaaaaaaaaattttttttyttttttttttttagagatgggatcttgctacgttggccaggctggtctcgaactcctggcctgaagtgatccttctgccttggcctcccaaaatgctgagattgtaggcatgagccgccatgcctagcccagcttgtctttttgtttacttaccagtgtttttcagagaacaaaaattttaatttgatgaagtccaattaattaaatttttaaaatagagtgtgatttttttgtcatgtctaagaaactattgtctagtcctaggtcctaattctcctttgttttcttctaaatgttttattattttacatgttaacgtttagatttatgatctattttaagttttttttaagtatgaggtttatgttttttgtttgtgtttaggagcatatggatggatgtctagttgttccagcaccatttgttggaaagacyatcctttctctgctgaatttcttttatatcyttgycaggaattagccatattggtatgggtctatttctagactttttattktctcccattgatctgtacatctctccttttgccaataccacataagtcaagatgactatagctttgtaataagtattaaaatctggtaatataaaaaaaaaaaa

SEQ ID NO: 2556 - DNA, 1278 bp, Homo sapiens
  SITE (23): n equals a,t,g, or c
  SITE (86): n equals a,t,g, or c
  SITE (1128): n equals a,t,g, or c
  SITE (1168): n equals a,t,g, or c
  SITE (1194): n equals a,t,g, or c
  SITE (1220): n equals a,t,g, or c
  SITE (1225): n equals a,t,g, or c
ttttttttttggggggccccaancccccaaaatcaacgggactttccaaaatgtcgtaacaactccgccccattgacgcaaatggncggtaggcgtgtacggtgggaggtctatataagcagagctcgtttagtgaaccgtcagatcgcctggagacgccatccacgctgttttgacctccatagaagacaccgggaccgatccagcctccggactctagcctaggccgcgggacggataacaatttcacacaggaaacagctatgaccactaggcttttgcaaaaagctatttaggtgacactatagaaggtacgcctgcaggtaccggtccggaattcccgggtcgacccacgcgtccggtgctgggcagtgctgccaatcccctggcctgcttcctggccatgggtgtgctgtgcaggtccttggcagggctgggcggcctctctctgctgggcgtgttctgtgggggctacctgatggcgctggcagtcctgagcccctgcccgcccctggtgggcacctcggcgggggtggtcctcgtggtgctgtcgtgggtgctgtgtcttggcgtgttctcctacgtgaaggtggcagccagctccctgctgcatggcgggggccggccggcattgctggcagccggcgtggccatccaggtgggctctctgctcggcgctgttgctatgttccccccgaccagcatctatcacgtgttccacagcagaaaggactgtgcagacccctgtgactcctgagcctgggcaggtggggaccccgctccccaacacctgtctttccctcaatgctgccaccatgcctgagtgcctgcagcccaggaggcccgcacaccggtacactcgtggacacctacacactccataggagatcctggctttccagggtgggcaagggcaaggagcaggcttggagccagggaccagtgggggctgtagggtaagcccctgagcctgggacctacatgtggtttgcgtaataaaacatttgtatttaatgattggcattaaaaaaaaaaaaaaaaagggcggccgtctagaggatccctcgaggggcccaagcttacgccgtgcatgcgacgtcatagctctcttcctataagtgaagtcgnattataaagctaggcactggcccgtcgtttacaacgtcgngactgggagatctgctagcttggganctttgggaaggaaccttactttctgnggggngacataattggacaaaactacctaccggagatttaaaggctctaagggaaaat

SEQ ID NO: 2557 - DNA, 1649 bp, Homo sapiens
  SITE (648): n equals a,t,g, or c
gcggaaatcccggaagtgacagctttgggggtttgctgctggctctgactcccgtcctgcgatgggttgcgacgggggaacaatccccaagaggcatgaactggtgaaggggccgaagaaggttgagaaggtcgacaaagatgctgaattagtggcccaatggaactattgtactctaagtcaggaaatattaagacgaccaatagttgcctgtgaacttggcagactttataacaaagatgccgtcattgaatttctcttggacaaatctgcagaaaaggctcttgggaaggcagcatctcacattaaaagcattaagaatgtgacagagctgaagctttctgataatcctgcctgggaaggggataaaggaaacactaaaggtgacaagcacgatgacctccagcgggcgcgtttcatctgccccgttgtgggcctggagatgaacggccgacacaggttctgcttccttcggtgctgcggctgtgtgttttctgagcgagccttgaaagagataaaagcggaagtttgccacacgtgtggggctgccttccaggaggatgatgtcatcgtgctcaatggcaccaaggaggatgtggacgtgctgaagacaaggatggaggagagaaggctgagagcgaagctggnaaaagaaaacaaagaaacccaaggcagcagagtctgtttcaaaaccagatgtcagtgaagaagccccagggccatcaaaagttaagacagggaagcctgaagaagccagccttgattctagagagaagaaaaccaacttggctcccaaaagcacagcaatgaatgagagctcttctggaaaagctgggaagcctccgtgtggagccacaaagaggtccatcgctgacagtgaagaatcggaggcctacaagtccctctttaccactcacagctccgccaagcgctccaaggaggagtctgcccactgggtcacccacacgtcctactgcttctgaagcccgcactgccaccgctcctgccccagaaggttgtttagtttccacgtaggcaggtcgctttgtgcctctgagtgcgctgctgtgtgttctctctatagttctgtgtcataaagctgtcctggccagccttcaagctggtgtggccactcttgatgtgaggcgtgtcggttccaggggggacatgggaggggctgcacagtggcccgaggtcatgcttgcttccacctgcaggtgcatttggtcctttccatggccaggaagccctgtgggctgcactttttatgcttgcagtaacaagagactccagagtcctcaccggtgcagagttggcacatattaattaactaaaattctaatgatcttgctaccagcaataaatcaagtaggccaagtgaaactgggctttaaaaaggatggatttcaaatacactgtgcccactagaagcttcgaagggcctcgtccctctgctacagccctgggaggagccaggatccttgttggtctagctaaatactgttaggggagtgtgccccatctcatcatttcgaagatagcagagtcatagttgggcacccrgtgattgggttcaaaaataaagctggtctgcctcttctcaaaaaaaaaaaaaaaaaaaaaaaaaaaaaaaaaaaaagggcggccgc

SEQ ID NO: 2558 - DNA, 1727 bp, Homo sapiens
agaaaactgtgttgtgcttttggagaacagattctccatctgtatccgaaggacttggtaatggaagcaggctggctgttgaccctgtccattcctggggcacattcacaaccccaaggacaagccgtgtccttggtagaggggggtggtaggtgaaatttttaagtctagccctccagcgctctcccacaagggggcggcagtctaccctcttcacataaagaactgcgtatgaaatgcagcctgctacagggtaaaaggcagcacctgggaagacctgaattgtacttccctccttgccgtgatttgctgcctgttactgcccctcatcamtgtcttgttctatccagcatttcttcatctatgaaaatagaagactggattggatgactgatgacatccactgtggatagctacactgctatcctggcgatgaggccatacagttggtgaaatgtgtgtaacacacccaaaaaatgtgccccagatgtgttgggttctctttttttctccaggtctgcttttcttgtctctactctgccccgactttttttctttcttctaggtttagaagccaagcccacagagactttgtgagagatgcgacttggtccccgctcaatcactccctgcttaccacagtgggctgggaccatcaggtcgtccaccacgttgtgcccacagaacctctcccagcccctggacctgcaagtgttactgagtagattggatttaagacaaaaagcaagtcccccatgagtgtccacttctttgccctgccctctcagcttgtgagacaacacaggagccttctatagtatgttgatatgctagatctgtgccgttaataggcatcgtctctcagcctgagggaggctggattctgggttcctgtagtcacagggaggaaaagctttcttaaaaatggacatgtatgtgcgtgtgagtgtgtgtgtagatttatagtttttggtagtggcaggaataaaaaaaatccatcctacatcttccctaagcactgcctctctctcaccccccaaaacaagttgacgaaagggttttatgtagctgtctatgaggaattggccgtgtctgggtgggttatgggatgtgggcatccctgggttcttggaagcagctcttatgctactcatagagatgggattgactttatttttttatagtgcttaattcaccattatgagaaatgcttccagtcacaaaaatgcagcccagctcactctgaggaagaagcaggacttggtacggttttacacaactccttaccattaaactgaatcagaaatccattttctggctgaataaaaagtttggcttgcctgtgtaatgcccactcccttccccctggctccctagtgatgggacatatatgagagagaagtgtttttctatcatagacaccataggggaaagtttggggatgaaggagagcttaaaggtgtttcaattaagttagaaaactgacacaggctgttgagaattctttgccacttttcccaccccaaaacagcatggggcctgacatcttctgccctggtcccctttctcttgatgtggaaagtctgaatgcagtatttatagacttctaaggttttaaaatccagtatcaagaagaaaatcagaaatactggttggtgaaataaagagtttaggcattgttggcctgtcttttttgaaaaaaaaaaaaaaaaaaaaagggcggccgc

SEQ ID NO: 2559 - DNA, 2314 bp, Homo sapiens
acccacgcgtccgggatttctctgtattataaaattagtatataggttgcatagttgattcatgtgcataatttatagtttaaaagtaaagtggtcagtacatatggcttagctctatgtgttagtttttaaaaaaatctacattgttttgagtgtttggttattaatagtttatggatataactgctgcacagtagtaactccttcatctactggaaggaaggtcaatttttcagtcattagaaataggtagctaaatgagatgcttcttatttttgcttggaggtgccaggtttatttgccaactttccacagttagaaagcactttggatcaccactgtcagatatttagatttctttttgagtctggaggattgtatttcttatcaaaacaaatatccaagtttatgctttaaaaatatttaagtttttattaattgcagaatatgagaataaaggaacgaccaaatgctgtaccatattgcctgactcactctgccactaaatggagccccacttgatcctcacctggctttctagattatttatttcctgtatattcccctacattttagtcatatctaacaacttactgggtttttttttttttttttggaaaattttgtaccctttctggcttctccactctatgcttttctcaccactttaaatgtccattttccatatgtcactgttcaatctcagtgcattaaaataatctttatcctttaaggccctgctcaagtactatacaaaaaaatacaaataaacctctttcttctgcttctttaagccgttagtacttattgagtcttgttgtagttatcttagcttcctctctggagcataagcttctggaaggtgtgaatcatgtcctgtacagatctgtgttttctgtagggcctaggaccattcttgtcagaacttgccatttaaagaatggcagatgactgcttcccagagactacacttgacaggaggtctaggcaggtcctagcagtaagggaatgcccagaacaattgagctgttggtttcaggaaaggctaggatgaatgccaggcacacgttctgcaaggcccacagaacatggtatgaaggaggtcttattgtttgaaataggtaaaggtctaatctgtgaatggtcactgtcaggatattcagggatctagtctgagatgcttggttttgtatctgaattctgaattccaaggtctgaaagatctcagagtggggtgagataggaatcaggactaggaaaaacgagtgtgtcagacatgaacttggtgtgagtggggaggagtgtgtggagaccagacagagactagtttggcaattaagtctaagttagaggctcgagcaacagggaataaagtgagagataagtcctggagttaagatatgatattaaaacatgacaggcagttagattaaattgacttgaagctgatttgctaagctgttgactgagtatacttaaatttcctttccttagagcccagttcattcctagttctaggtaaagtcgtttggctttctgtaaaggggtaggaacctttttattccttaaaggtatgactatctatttgccaattaattccatgttccaaggatcccctcatggagaaaatgttgcactgagttaaataaggaaataactggacgaatacttgagattattcccttcataagaataattactaattgtgaattgatggtttgaataccatgctaaaatgattgaacctcttttctcttgtgaagtgattgtgaagttacttgtacctttatgtttttaaaatttgatgataatagcaataaaagctttagtgcttttatgatctctttatttggtttgtagttatggcacatcagaaactcgcatcaaaatagaatcaagattattgtaaaagggacctcaaacgtagatttcttaaaaaaaaaatgttttttattttcaagatggaatcttgctgtgttgctcaggctggtctcaaactcttggcctcaagctgtcctcctcaccttagcctcctgtagtcccagcactttgggaggctgaggtgggtggatcacgaggtcaggagttcgagaccagcctgaccaacatggtgaaaccccatctctactaaaaatacaaaaattagctgggcatggtggcgcactcctgtaatcccagctactccagaggctgaggcaggagaatcgctggaacccaggaagtggaggttacagtgagctgagattgtgcaactgcactccagcctgggcgacagagcaagactccgtctgaaaaaaaaaaaaaaaaaaaaaaa

SEQ ID NO: 2560 - DNA, 1161 bp, Homo sapiens
  SITE (1): n equals a,t,g, or c
  SITE (899): n equals a,t,g, or c
nggccccccccgggtcgacccacgcgtccggttcattcccacttcacaccttggtcctgctgattagagagctcatcagaggggcctggaaaggctgagcaagtaccagtgacaatggccatttaagaattctcaggccccatgtgccagccttcttgggaactgagctggctttctgggttttctcatgcctggtcttactgcttcttcctcagggctcttgttctcccagaagcctcagggtaatgtgttggttagcacgtaactactaggattggggccctagggattatagccaggactctaatctgcctaccatgccatttaacaagagatcccactctccagctgccttgtgtccctagggtcctggccatgtgtttagtgtgctaaactttctcctttgttctcaggccttccaggtagtccccttcctggacttaagagtgcaaactcttctctgtggttctagccttgggcagaattatatcccagagaccacagagcaactgtcaagctgcttaccccctcacccagggctacagcctgtgcccagccctctaatttgtgcctctcttgtgttgggggtggtgggggttattcctttccctttcctgctctggcctccttgaaagttcagagtacccagtacaagtcagctttaaagtacagcttttagtgtttcctgggttgtttctctggggctttagtgagggacctttgccctctggtttttcttgcctcctggtttagggagcatctcacacttgttagtatctggttgttgggccagccgtgcctcctctagatctggagccaggccaggcaggggcmacgtgtgggcmagtcagccactacaagatttttgctaagctttgggctgttggcagcatcttggncctcatgcctgggcctgaatgaggctctttcttaagtgtttttacaagtttgtgttttatttatggagtgacttatcccttccattcagagcagccccacccagccaccatgctgacgggtatttttcctcataaagtttataaccagttatttatatgaatctttgttatgtccatttgtttgtattgcgtattttgattataaaataaagtatcttaacagacaaaaaaaaaaaaaaaaaaaaaaaaaaagggcggccgc

SEQ ID NO: 2561 - DNA, 1462 bp, Homo sapiens
ccacgcgtccggcggcggcggcggcggcagcgccaggagctgctacagcagaggcggaggttgctcctgtacgcgtacgggccgctcggccggagccgcagcccggaggcgccgggcggtgcgctgggagctgctggtgctgctgctgctgctgctgcccaccctccgccgcccgggcccccgctgccgcccgggccccggctgccgtctgcgcccccgtcgaccccgcccgcgagtgcgccccagccaggacgccgcccccggccgggtctccacttcttggccgcaccttccatgacagcgcccgcgagaagatggctgcgaagggcgcgcacggctcctacctgaaggtggagagcgagctggagcgctgcgcgccgagggccactgggaccgcatgccggagctggtccggcagctgcagacgctgagcatgcccggcggcggaggtaacaggcgaggcagcccgagcgcagcgttcacctttccggacaccgatgactttgggaaattgctgctggctgaggccctcctggagcagtgtttgaaggagaaccatgccaaaataaaagactccatgcctttgctggagaagaatgagccgaagatgagtgaagccaaaaattatctaagcagtatccttaaccatgggaggctctcggtaagtcgtcagccttcaagcctgagacctcctctcctcgtctgtcttgcctcgcatctgtccagtcctccctgagtcatttggtcacctgagcaacaagtctctcttacaagctgcccttgcacttacagtagccactggctgcacatggccccttgagcacttggagtatggctagtccacattgagatgtgctgtaagtataaagcatacacaaggtttcaaagacttagtacaaaacaaagaatagaaaagagcagtaactttttatgttgattacatgttcagatggtatattttggatatattgggttaaataaaacatgttattaaaattaatttcaccttttacctttttcagtgtgactaaaaaaaatcttagtagaaatttttaaattacacatgtggttcacatttgtggcttacatcatatttttttggacagtgcttggttgacttaatatgtgcctggccctttgggctccttgggtcagggggctctcaggaaaataaaacctcagtgaacctgtgacctagttagaaacaggcaaacatgcagagttggctagggacagaagagctccataacagggcaagcccatttaagtccacgtgtatttatcaagcacctactgagtacaagacactgagggaggtagaggacccacctctccctcccagaaggagtatggtcacaactttctctggactttgctgctcaaaatgtggtccacccaccagcagtgtaggcatcattggggagctggttagaaatgcaattaagagaaaaaaaaaaaaaaa

SEQ ID NO: 2562 - DNA, 2393 bp, Homo sapiens
ccacgcgtccgatcagaatatttatgcctgatggttaattttagacatctacttgactggattgagagacacacatagctggtgaaacacaatttctgggcatatctgtgaaggtgtttctggaagacactgagataaccctgacccagtgtggatgggcactgatatggtttgcctgtgtccccacccagatctcatcttgaaattgtagttcctataatccgtacatgtcgtgggagggacccagtgggaggtgattgaatcatggtggttgttactgccattctgttttcatggcagtgagtgagttctcatgatccaatggtttcataaggggctgttcccctttggctcagcacttcttcttgttgctgccatgtgaagaaggacgtctttgtttccccttctgccatgattgtgaggcctctgcagccacgtggaactgtcagcccatttaacctctttgctctttataaattgctcagactcaggtatttcttcacagctgtataaaaatggatgaatacacggcaccatccaattggttgagagcccagatagaataacaaggaagaggaaaggtgaattatctcctgaaattgaaacatccttcttctcctgcccttgacatgagaatcagtgtctcacagctttggcctcagaatcagaggtacaccattggcttccctgattctgagtcctttatatctggagtgagtcatgctgccagctttcctggttctccaacttggagacaggctattgtgtaacttctcagcctccataattatgtgaaccaattcccctaatgagtcttctctcatctatctacatatatcctattgattctgcctttctggagaaccctgactaatgttattacaataatacaaaattcactagtttatatagaagacttggtttttgtctttgccccattttgtatttgtattataactgtgtatctggaaaatggaacaagtttttatcttcttcatatgagggccaaagcttttttctcaccaatatttttggagatttttaagattttcttttgtttggacatacaatcttatggaggctgagaaataaaattttttctattttatttttcagccccagatgtttgcttttgcagattcttgagcacattgagagcatggagagcactccaaggcatggagtggggtgcctaaagtttcagtgattacagggagttgagagactcaactgggaaaggaaaagtctaaaaggaggcaatttggaagataaaaattttctcaaaggagcgattaaatttctaaataattcttagtaaaatcatgtaaacaggaaaggaaatagaattaagttccatattggtggaacacatagcagaggtttgagaagggagaatttagtcaactgagaagttctcatgaaaggagcaagtgaagatcacagagacaccttgaaacaaaaagccaggaataacttccaacccaagaggagaacagagaggcctcaaaaccaaagctaggataagaaacttgtagcccaagagttatcttccagacaaagaagcctgagattccaacgcagcttcagagagtactcactcaaaatgttactgaaactgaaggctttttaatgacttagccatgcatgcaaaaggcattccctaaggtggcacagaagacggagcccccatatccaaagatagccaaggagaaagaaagacccctgttgccagagccagtgggcaaaggcaacagaaaaggagacaagggtcctaatgggatgagatcctttcggatttaggcttttatacaaactcctgagaactggcagggtgacagccataaatggggtaccaacatttctactcattggattacaagttctcaggcatccaaaatgatgaacaaaatggacaatttctagggcttctgtgggaaagtatggaaaggtctttttgaaccttttaatgctgtcaacggaagaatgatgaggttcataaatttggaaaggagacatttcttcatttttatgtttatttttatttttttttgagacagagtttcactcttggtgcccattgcacaccagcccgggtgacagagcgagaccctgtctcaaaaaaaaaaaaaaaatgggagaccaaggcgggcagatcacaaggtcaggagtttgagaccagcctggccaatgtggtgaaaccccgtctctactaaaaatacaaaaattagccgggcatggtggcggtcacctgtagtcccagctactcgggaggctgagtcaggagaatcacttgaacccgggaggcggaagttgcagtgagctgagatcacaccactgcactccagcctgggtgacacagtgagactccatctcaaaaaaaaaaaaaaaaaaaa

SEQ ID NO: 2563 - DNA, 2193 bp, Homo sapiens
aaggtacgcctgcaggtaccggtccggaattcccgggtcgacccacgcgtccgcawagacattgaacagtaccaggttcattggctttgctcaggcttgaagccgagtggagttgctcaggggtggccattagtctggtccttgccgcttcactgcatgccgggcagcttgggtggctatccccatgtgtggttttaacacatgtggaccgatgggcttctgtctcagtagtctgctcgcatggtgtgttgactgtttcttctctctgtgtagctttggtgtgaagcttatggacttccaggcccaccggcggggtggcactctaaatagaaagcacatatcccccgctttccagccgccacttccgcccacagatggcagcaccgtggtgcccgctggcccagagccccctccccagagctctagggctgaaagcagctctgggggtgggactgtcccctcttccgcgggcatactggagcaggggccgagcccaggcgacggcagtcctcccaaaccgaaggaccctgtatctgcagctgtgccagcaccagggagaaacaacagtcagatagcatctggccaaaatcagccccaggcagctgctggctcccaccagctctccatgggccaacctcacaatgctgcagggcccagcccgcatacactgcgccgagctgttaaaaaacccgctccagcacccccgaaaccgggcaacccacctcctggccaccccgggggccaragttcttcaggaacatctcagcatccacccagtctgtcaccaaagccacccacccgaagcccctctcctcccacccagcacacgggccagcctccaggccagccctccgccccctcccagctctcagcaccccggaggtactccagcagcttgtctccaatccaagctcccaatcacccaccgccgcagccccctacgcaggccacgccactgatgcacaccaaacccaatagccagggccctcccaaccccatggcattgcccagtgagcatggacttgagcagccatctcacacccctccccagactccaacgccccccagtactccgcccctaggaaaacagaaccccagtctgccagctcctcagaccctggcagggggtaaccctgaaactgcacagccacatgctggaaccttaccgagaccgagaccagtaccaaagccaaggaaccggcccagcgtgcccccacccccccaacctcctggtgtccactcagctggggacagcagcctcaccaacacagcaccaacagcttccaagatagtaacagactccaattccagggtttcagaaccgcatcgcagcatctttcctgaaatgcactcagactcagccagcaaagacgtgcctggccgcatcctgctggatatagacaatgataccgagagcactgccctgtgaagaaagccctttcccagccctccaccacttccaccctggcgagtggagcaggggcaggcgaacctctttctttgcagaccgaacagtgaaaagctttcagtggaggacaaaggagggcctcactgtgcgggacctggccttctgcacggcccaaggagaacctggaggccaccactaaagctgaatgacctgtgtcttgaagaagttggctttctttacatgggaaggaaatcatgccaaaaaaatccaaaacaaagaagtacctggagtggagagagtattcctgctgaaacgcgcataggaagcttttgtccctgctgttaatgcgggcagcacctacagcaacttggaatgagtaagaagcagtgcgttaactatctatttaataaaatgcgctcattatgcaagtcgcctactctctgctacctggacgttcattcttatgtattaggagggaggctgcgctccttcagacttgctgcagaatcattttgtatcatgtatggtctgtgtctccccagtcccctcagaaccatgcccatggatggtgactgctggctctgtcacctcatcaaactggatgtgacccatgccgcctcgttggattgtcggaatgtagacagaaatgtactgttcttttttttttttttaaacaatgtaattgctacttgataaggaccgaacattattctagtttcatgtttaatttgaattaaatatattctgtggtttatatgaaaaaaaaaaaaaaaaagggcgrccgc

SEQ ID NO: 2564 - DNA, 372 bp, Homo sapiens
acgcgtccgcggacgcgtgggcaacaccctcctagccttactactaataattattacattttgactaccacaactcaacggctacatagaaaaatccaccccttacgagtgcggcttcgaccctatatcccccgcccgcgtccctttctccataaaattcttcttagtagctattaccttcttattatttgatctagaaattgccctccttttacccctaccatgagccctacaaacaactaacctgccactaatagttatgtcatccctcttattaatcatcatcctagccctaagtctggcctatgagtgactacaaaaaggattagactgaaccgaataaaaaaaaaaaaaaaaaaaaaaaaaaaaaaa

SEQ ID NO: 2565 - DNA, 2731 bp, Homo sapiens
  SITE (579): n equals a,t,g, or c
  SITE (1532): n equals a,t,g, or c
  SITE (2362): n equals a,t,g, or c
gctggggaaggtgcagggggcctgggagactgcctctccgaagcggtgaaaccctcacccttccgtccctcccagccaccctccctaaaacttcccctgacagagggtggcagccccaggctctttgcataatcctgtggcttcgctgtcttcacccagcaccagcggacagggaagggcagagaaggccaccatggcgacactcctctcccatccgcagcagcgccctcccttcttgcgccaggccatcaagataaggcgccgcagagtcagagatctacaggatcccccgccccaaatggccccggagatccagcctccatcccaccacttctcccccgagcagcgggccctgctctacgaggacgcactctacactgtcttgcaccgcctgggtcatcctgagcccaaccatgtgacggaggcctctgagctgctgcgatacctgcaggaggccttccacgtggagcccgaggagcaccagcagacactgcagcgggtcagggagcttgagaagccaatattttgtctgaaggcaacagtgaaacaggccaagggcattctgggcaaagatgtcantgggttcagcgacccctactgcctgctgggcattgagcagggggtargtgtgccagggggcagccccgggtcccggcatcggcagaaggctgtggtgaggcacaccatccccgaggaggagacccaccgcacgcaggtcatcacccagacactcaaccccgtctgggacgagaccttcatcctggagtttgaggacatcaccaatgcgagctttcatctggacatgtgggacctggacactgtggagtctgtccgacagaagcttggggagctcacggatctgcatgggcttcgcaggatctttaaagaggcccggaaggacaaaggccakgacgactttctggggaacgtggttctgaggctgcaggttctgacgctcacgggctgggcatccccgcctgtcaggacctgcgctgccgagaggaccagtggtaccccctggaaccccgcactgagacctacccagaccgaggccagtgccacctccagttccaactcatccataagcggagagccacttcggccagccgctcgcagccsagctacaccgtgcacctccacctcctgcagcagcttgtgtcccacgaggtcacccagcacgaggcgggaagcacctcctgggacgggtcgctgagtccccaggctgccaccgtcctctttctgcacgccacacagaaggacctatccgacttccaccagtccatggcgcagtggctggcctacagccgcctctaccagagcctggagttccccagcagctgcctcctgcaccccatcaccagcatcgagtaccagtggatccagggtcggctcaaggcagaacagcaggaggagctggccgcctcattcagctcctgctgacctacggcctctcctcatccggaggttccgctctgtcttccccctctctgtctcggactccccagcccggctgcagtctcttctcagggtcntggtacagatgtgcaagatgaaggcctttggagaactgtgccccaacaccgccccattgccccagctggtgactgaggccctgcagactggcaccactgaatggttccacctgaagcagcagcaccatcaacccatggtgcagggcatcccgraggcaggcaaggccttgctgggcctggtacaggatgtcattggcgacctgcaccagtgccagcgcacatgggacaagatcttccacaataccctcaagatccacctcttctccatggctttccgggagctgcagtggctggtggccaagcgggtgcaggaccacacgacggttgtgggtgatgtagtgtccccagagatgggcgagagtctgttccagctctacatcagcctcaaggagctctgccagctgcgcatgagctcctcagagagggatggagtcctggccctggataatttccaccgctggttccagccggccatcccctcctggctgcagaagacgtacaacgaggccctggcgcgggtgcagcgcgctgtgcagatggatgagctggtgcccctgggtgaactgaccaagcacagcacatcagcggtggatctatccacctgctttgcccagatcagccacactgcccggcagctggactggccagacccagaggaggccttcatgattaccgtcaagtttgtggaggacacctgtcgcctggccctggtgtactgcagccttataaagrmccgggcccgcgagctctcttcaggccagaaggaccaaggccaggcagccaacatgctgtgtgtggtggtgaatgacatggagcagctgcggctggtngatcggcaagttgcccgcccagctggcatgggaggccctggagcagcgggtaggggccgtgctggagcaggggcagctgcagaacacgctgcatgcccagctgcagagcgcgctggccgggctgggccatgagatccgcactggcgtccgcaccctggccgagcagttggaggtgggcatcgccaagcacatccagaaactggtgggcgtcagggagtctgtcctgcctgaggatgccattctgcccctgatgaagttcctggaggtggagctttgctacatgaacaccaacttggtgcaggagaacttcagcagcctcctgaccctgctctggacccacacactcacagtgctggtggaggcggccgc

SEQ ID NO: 2566 - DNA, 2783 bp, Homo sapiens
gacccacgcgtccgcacaagagagcagaggagccccaagtcttggggaccacagaagatgccatgtgctccacgatgtcggcccccacctgcctggcccacttgcctccctgcttcctgctgctggcactggtccttgtcccctcagatgcctctgggcagagcagcaggaatgactggcaggtgctacagcccgagggccccatgctggtggcagaaggagctggggaccctgaaccagacctgtggatcatccagccccaggaattggtgttggggaccactggagacactgtctttctgaactgcacagtgcttggagacggtccccctggacccatcaggtggttccagggagctggtctgagccgggaggccatttacaactttggaggcatctcccaccccaaggcgacagcggtgcaggcctccaacaatgacttcagcattcttctgcaaaacgtctccagtgaggatgcaggcacctattactgtgtaaagtttcagaggaaacccaacaggcaatacctgtctggacagggcaccagcctgaaagtgaaagcaaaatctacctcttccaaagaggcagaattcaccagtgaacctgcaactgagatgtctccaacaggcctcctggttgtgttcgcacctgtggtcctggggctgaaggcaattaccttggctgcactcctactggccctggctacctctcggaggagccctgggcaagaagatgtcaagaccacaggcccagcaggagccatgaacaccttagcatggagcaagggtcaagagtgaggggtcagccccagagtgaggaccctctgagttggagaggagccagggctcctcaaccatttccctacctccagtcccagcctctaggtgcccccaggcctcatgacaaactcctagatccctacatctggttttggtccacctagtgaaattcccttctttgcaccgggcttccctctaaaatgtctccctttctctttttggcctgttcaagacctccttgcttttcagtccctggctcagtctctcctcaacacccttgcccctgctgcagccctttctggtgcgccctgcccctttccccacctcgctacatccttcttggcctccaacatccaactcagagtcttcttcccaggagatgtctgtaagaatctctgaactcaaccagccagaccatctgtgcccctccatctacacctttctccccactccttcctgccttccttccatccccctcatggctggcttgggcaggtataatattagaatgcaggttcagcaactataacaaagctcttaaataacagtggcttaaaccagtggaaatcaaccagaaagttgaccatcagcaggccaagcaatacagagactccctggtattgagacccaggattcactgatctcattgctaccaggtccaccttctaggcagccagactggaaaagaaggcaggaaagggggagcaggaccctcccctttaaagtgcacagtcaggaacttggccacctcacttatctctacttggctggaatgtggtcacatggtcacacctagctgcaagaaacactgggagatgtagtctttatttctggcagcaatgcgcccagctgcaagttttcactagagaaaccagatggcagatatcaggggataaccagttatctccaccacagcagcatacagacagcctctcacctgccctgtgggacacctgagttcaatgcccagctagctagccagcacttcttcccactatcacctcccctggggcagcatgatgtggggcagtagttcccaagatgagtgattttgcccccactggacttttggcaatgtctagagatgtttttggttggcacaacctggggggtgctaccaccatctagtggactgagaagccctgacatggggaagagtgtgcatgcccaggagtcagacacacctgcctttaaccctgaggcctctgcctcctccctgtgcaccctcagtgactaatcagagtcccttcccatcacggaacatccaggatactaatgtggacttctctgcattgtgtaagaaccaattcaagaccaggcacggtggcttatgcatgtaatcccagcactttgggaggccgaggtgggtggatcacctgagttcaggagtttgagaccagcctggctaacatggtgaaacctcgtctctactaaaaatacaaaaaattagccaggcgtggtggtgtgcacctgtaatcccagctacttgggaggatggggcaggagaaccgcttgaactgggaggcagaggctgcagtgagctgagatcgcgccattgcactccagcctgggcaacaagagcaaaactccgtctcaaaaaaaaaaaaaagaaccaattcaattctgcatttactgagggcctactatgtgctgtgtgcactgcgtgcactcgatacatgtaaattccctgttctctttccaggcaaacatttattagcactcactatagcggcgagtagatgagtctagatgtttttcattaccacaaacagaaaaacagcttgaactaagccagcgacaacagtaatttagtctgagaatggaataaattattgaattaccagacattagagagggtagggaaggtaggctgaatactaacccccaccccaaagatatccatgtcctaatctctggaacctttgactgttaccttgtatggcaaaagtaaaaataaaaagaaaaaagaaaacaagaaaaaaaaaaaaaaaaaaaaaaaaaaaa

SEQ ID NO: 2567 - DNA, 625 bp, Homo sapiens
  SITE (623): n equals a,t,g, or c
ggaacttctgagctccagtgatcctcccaactcagcctcctgagtcgctaggaccacaggctatcatttgctttctgtcaggaaatacacagggcagatcacatcacttttcattggaatgctcatctgcaggcacttgatgttgtgtatcagtgttttctgtctgctgatgactctcctgttccccttcgttcttgtagttttgtatatktkactcaccttcagatcatcttggcagtattgctttctccacttcatttgggatctttccttatttctaattgatcatgtttgccactgttgacagtggcagatccgcatgcgttatttatttcaagaaccctatcccacttctctgcatgcctgcatatattagcctcataaatcaccaagaaaataaagatcttaatgtactctttcaactagctgttgttcagcaagacaccctaaggagagtgaaaactaaagaacaaactggggtaagatatttgttaaaataatatataacttcatataattgtaaaaagattaatatytagactatatattttttaaaaaccctgtgactcaagttataaaaagacaacccggtagaaaagtraataaaggacttaagcatttcnta

SEQ ID NO: 2568 - DNA, 831 bp, Homo sapiens
acgcgtccggtgggcctccttagggagacaggtgaccctgggtgccacccctgccccgtgtgtgccccgggtgttctcagtggttgctgaaggcaggtagagggtgctgtccagtatcccccatgtgaaggtcacttcccttctcatggagtcagctgagcatcagctcagccctgccatgtccccactcaccctcctcgcctcctgtccggccctgggtttctagcggtgcctgaggcatcactctggcccattgacagatgagaggtctgaagccttcctggccacaggcatcactttctcctcctcctcatgccctgccttgtccttgtcgtgttgccatggggttctgagaggctgggagttcacagacctcagacacagctgagtccgacaaccattggggtggggctgcatcagtctccggagtggcccgccacctcctgaagcagggcctggcccacccaaggtccctggggcaggcgggcaccgtcattcgctgccattggcttctcagatgtatttcaaggactaagtgggctctaagatctaagatggcccggcgcggtggctcccgcctgtaatcccagcactttgggaggccgaggcgggcggatgagttgaggtcgggagtttgagtccccgtctctactaaaaatacaaaattagccggacaaggtggcgcatgcctataatcccaggtactcaggaggctgaggcaggagaatcacttgaacctgggaggcagaggttgcagtgagccaagattgtgccactgcactccagcctgagcaacaaaagcaaaactctatctttaaaaaaaaaaaaaaa

SEQ ID NO: 2569 - DNA, 1468 bp, Homo sapiens
  SITE (561): n equals a,t,g, or c
gcttccatatcagaagccttgacttaggagtcagacctgggttcaaagcctagtttcatcatttcttagctatgtgactatggggtgtttacttaacctctctgagatttctttccttgatttataatgtggcatgaacaatacctgccttgcagtgttgcatgtggtgatgtgtcttgcttggagcttcctgtggagtttgctccttcatgggttcattcactcctttttttcattcatttcttcatgtgctgttacatgtacctaggaacatatagcttagtagcttagcagcttagcactaggcgctgggcacaaaagggtggagagggtgtgtgcttagccttttgwggctggtaactctgggcccagagttgaggggaatgatttgactggcgaggcagactctgcttggtcccattgtaaaccagtcatagaagagatgcctgtcctgggtaggggccctctcttccttccggtagtgctctgagcattgcctggatgacaggcctattgagcagtagcctgggacttgggagggaaactagggctggagagcanctctgggaggcattggggagggcgtaggtggatgagtcaccatcctccctcaaggacgtcttgggcaagttgtctggccccattagccagcaaccagggaaatgtagctgcaggaaaatcacctcgtttcctcgggatgttttttcttaggctggtttcctttacaagctgcaattatgttccatcccacgcaattcagtaagtggcacttttcagagaaactgtcttggtgatcatttgggctgctgtgggccagggagttgaggagagaagggagtgagagcttctactgagtttagttggttttgtgtccatgagccatttacaaactttgcacctgattgggctcagttgcagtttcttgtatttccctaccagccaagctgttgaagctgctgagcccggaatgatgttatcactgaggcagatgacaaaccctctagttgctagaaaccaaactgctccccgagctggtgtttccgttttttgtactgactgcttatttgggcttgatatataatggtgaaaacaggaactgtttattttaggtgataagaaaccaacattatgacaagaagatgtcatcttagttactctgttaccagtaccataggccagatactatctagatgcttataaacatcttatctaatccttgtaataataagccccaagctaggttttatatccccattttatggatgggggaactgaggccaataacttcatataacttatccaaggccacaaaactagtaataaacagagtgaaattcaacccaaaaacaaactacaaatccaaatttctttacctctatgctgtctgtacttgctgttactagcaaagttctcttggtgggagttaccccatcccctctccaaaaaaaaaaaaaaaaagggcgrccac

SEQ ID NO: 2570 - DNA, 1411 bp, Homo sapiens
gtttcaatccaaatgttgatttacttattctgacacctcatgtcctcttttagctctgcacttttctgccctttattttttggttcacacttttttctaagtatatgggttcagatggccttttacatgattgaaaactgtaaaggaaaaaggtagtagtcaacagtacaatcatggctttaataaccctttattttatgtgacaccaaaaagaattgaaaaatacaaggattgcaatttttaaattatgacgtaggcagctttgaatacatttatgtgttttccctatcaaatgaaaatataaccatatattgtatatatatatatatccttaaaaattggtttttcttacttgaatgttaatttttaaaaatttataatggcattgattaatgttgatgtgatttattgaatctaattcatgtaaaaatgatatattgtgaactgtgatactttcattatcacatcctgtgacatacatggtagttatatgttgaatgttgttgactgacttttattgactaggttactaaattttatctgaatttcatcttaactytgtggcctttatatctcctaagacatctttatatacactttgaaagattaaagaatgtggaaaatatagttgaataaaataactatgatggtgggataattttactaatgcaaataaaatttattcgaagttaatctagaaaaaagttagtgtttatctagggtctattccagtcttccagaagagttctttgtctggttaacacaactgctgtcccactgcctactagggttaattaggttgaccagcctggctagtgagtatctgcttcttccatttctgcttgtggtttctcctttactcattgtgtatttggtgaagagggcagcttcccatatggagggggaccttcagtctaggcgatacyggaarttcagcttccactaatacataaattctggtttcattgacctaatataataaagttaaatccacatatctgggtaaatatctttttcctcgtgccgaattcggcacgaggtcaaattaaggatataaactttccacaccttcctgtcgtgacagataaaagcacagaaaggacaacccttgaaatcatgtaacgttggtcatttcaatattttgtacctgttttaaattctgttagtgtatttacttcattgtaaatatttttgagggtacctttgtattttgcttttgaccttggttctgtgatttggatgtcaacaacttccctaaaaagcaccagtgtgttaggttctaatgtcatgacccaatttgtgttattcatctttaatcctgttttcagtctctatgtgtacagcagtatttttaataaagaattacagagataaatttgaaaaaaaaaaaaaaaaaaactcgcggcacgag

SEQ ID NO: 2571 - DNA, 875 bp, Homo sapiens
  SITE (521): n equals a,t,g, or c
tcgagttttttttttttttttttaaatgaaaaactaacttgggaaatacattctttgatggggctagccacacatatgttttacaatacttggtctgcaatgctgtcttttgggtctgagtttcttctcaggagggtatctttgggccagcaataacaatcattgttcagttatacaaactttataatttctgaagtaatttcctatacatcatttcacttagtctttacaaaaaccctatagagaaagcagggtaaagtctgaaataataaataataatcagttaatggaaatagagtatctacatcctggaaatgatggctatgttatacactatgctagctctagacattcttgtatgtggatgaaattagcttcaatacaaccatatgaacagattgggtccagaggcagagggaggcacacacagatcatttgacttgcgtgcttcagatgaggaaacacgcatagagggttaagtggcttgcagaagggcaaccaytaggcaggggtagagcagnacttgaaactacacacacccaacaaatagttcccatatgtgcctggccttggggtagggagacagatgcaagaccagtaggcccttcctccaaggagctaccagtcctgcaggagaaagacatccctcattattcaaataatacattttcaaattacaatagcaagaagtgccctagaaaagaaaagagatctggggtttcttccacttgtgtctacagccacaagccctggccccagctccctgctctctctcctctgatgcaggattatacttgcagtctcagacacccaagcaagggttattcttgggaaggggcaaccacacggcttctaatccttctcgtgccgaattc

SEQ ID NO: 2572 - DNA, 1026 bp, Homo sapiens
ctatcagcaaagaggattttgcaaagccacagaacaatgtgtgaccagcagaagcagccacagttccctccatcttgtgtgaaaggttcgggactaggggctgggcagggtascaatggtgcctctgtgaaatgcccagttccatgccagacccaaactgtctgtgtgacrggccctgctccatgccctactcaaacttatgtgaagtaccaagttccatgccagactcaaacctacgtgaagtgcccagctccctgccagaggacctatgtgaaatacccaacaccctgccaaacctatgtgaagtgcccagctccctgccagacaacctatgtaaaatgcccaactccctgccaaacctacgtgaagtgcccagctccctgccagatgacctacatcaaaagtccagctccctgccagacccagacgtgctatgtccagggtgcttctccttgccagagctattatgttcaagctcctgcaagtggctcaacctcccagtactgtgtcactgacccatgctctgctccctgttccaccagctactgctgtctggctccccggaccttcggggtgagtcccctgagacgctggattcagcggccccagaactgcaacacaggatcatctggctgctgtgagaattcgggaagctctggatgctgtggttctgggggctgtggctgcagctgtggatgtggcagctctgggtgctgctgtttgggaattatccccatgaggtcccgaggtcctgcatgctgtgaccatgaggatgactgctgctgctaaacatacgacagctcaactccagaatgcactgccccgctaccccttctggaacatgcaccagcttctggccccytctctgttagtgccagtgatgtagaacctcatcamtttgcctctgtgstttgyttctctaccaaggcagcctgccagagttagtamagtccccaaamtttggcatgaataaagctctgaatgcatttcgtggtaaaaaaaaaaaaaaaaaaaaagggcggccgc

SEQ ID NO: 2573 - DNA, 596 bp, Homo sapiens
ccacgcgtccgctgtttttcaaagtgggtaatttagtttaatggaatataaccactcattcatccttccatccaacagaggcaagtttggacctgccttgcctttttctgcttttaacatttgtattcaaagttgtacaccattgtcaaatgtataatgtagcagtaaatcattagaggaagtaagttaagtcctgttaatactgttctcaaatataaacatatttctttaatctcttccctatagttttttttttatagtgagataatggagttggtcttagccgctgcaggagcccttcttttctgtggattcatcatctatgacacacactcactgatgcataaactgtcacctgaagagtacgtattagctgccatcagcctctacttggatatcatcaatctattcctgcacctgttacggtttctggaagcagttaataaaaagtaattaaaagtatctcagctcaactgaagaacaacaaaaaaaatttaacgagaaaaaaggattaaagtaattggaagcagtatatagaaactgtttcattaagtaataaagtttgaaacgattaaaaaaaaaaaaaaaaaaaaaaa

SEQ ID NO: 2574 - DNA, 695 bp, Homo sapiens
  SITE (6): n equals a,t,g, or c
acactntccccggcccgcctgccggcccccggtccggcattcccgggtcgacccacgcgtccgcccagggacgtgtctgtgctcctgcgtgtgaccagggttgactaaactcctgccagcatgtcttgccagcaaaaccagcagcagtgccagccccctcccaagtgtcctcccaagtgtaccccaaaatgtccacctaagtgtccccccaaatgcccaccacagtgcccagctccatgtttccctgcagtctcttcttgctgtggtcccagctctgggagctgctgtggtcccagctctgggggctgctgcagctctggggctggtggctgctscctgagccaccacaggccccgtctcttccaccggcgccggcaccagagccccgactgctgtgagagtgaaccttctgggggctctggctgctgccasagctctgggggctgctgctgacctgggctacagaagagctcttgggactgaatggccaagaacctgctacggcctgatggatactctttccacttcctctcattccattcattggttggcagagaccacaaagactcatggggctttcctggaagaacttcgtgcttgatgtaacaccccaattgcaagtcttcttttcctcctttacctcatgttataataaagctctgatctctgactcaaaaaaaaaaaaaaaaaaaaag

SEQ ID NO: 2575 - DNA, 871 bp, Homo sapiens
  SITE (555): n equals a,t,g, or c
  SITE (585): n equals a,t,g, or c
  SITE (744): n equals a,t,g, or c
  SITE (837): n equals a,t,g, or c
  SITE (843): n equals a,t,g, or c
  SITE (847): n equals a,t,g, or c
gaaatacatacctttatatgcatatactatatacatacatatatgcatatacatttagaaataaaaacaccactattctacaaggggagttttattttcaccatttcatagatgcggaaccaatgctccctgatttccaataacttgatctttggatcgtagggtatgaccagcatgttactcctggtccgctggatcccaaagctcttgctccttttattatcctgcatggcccctggatactggggcagaagccttctcttcctgatcttaaaggctggtctgtagaacctgatcatctttcttctaggtaaggagcatcctggagccaaacttcagatacccctggagcattcccttcaccctcaaacctgagctcctcgccccactccagagtgagggtttggccatcacctatggcctgctggaggagtgtggccttaggacggagctggataaccccaggtcaacctgggatgtagaagcaaagatgcccctgtctgccctctatgggactctctcgktgctgcagcarctggctgaggctaagccctncctgatgggcagcagtccagagatgctggncctcgsccagctatgctgtgagtgtccytatgggtgcaagaratagggctgkgcctctctgcgtttccaggtggagtagagacagtaatgggtagagactttaggaaatgttttggggtggtggaatactctatatattgacaagagtttatatattgncaagagtttatatatttgtcaaaactcctcaaatagtatgttaaagacgtaagcgtttcactatgtataaattttacttcaaaataataaaancaaatnctgnctctaaaaaaaaaaaaaaaagggc

SEQ ID NO: 2576 - DNA, 843 bp, Homo sapiens
ccacgcgtccggctggatcgaatggtttttataattttctattttaccacagtttctctctgcatttttcctctttgaccactaaccatgtgaaattctcatattgacctttataatgatcatgaactcttagtatcattgggaaggccacatttgccacttatgattgtaaaccttatcctccatttttcctgttattgttggtgcaaaaagcacctattataccaggactttaaaaatcagtctgataagtctttgataagtctaataataataactgataagtccattgaatttgcttctgattactttttctttagtagctaaacatgtatgtactcctatgattacaatgaacactcctctccatttaaattaattatttacattgatgaaatagcaaaatgttaatgactaaatactgtcttggttttttcgttccaggtcagtcaatattaacttcttataattttcttttttttctttatgtgtgtgtgtgtgtgtatttttttttttttaatttcaatggcttttggggtacaaatggcttttggtcatatagatgaattctacagtagtgaagtctgagattttactgcaccggtcacctgagtagtgtacattgtacccaatatgtggttttttataccttgcccccctcttaccctccccactttgagtctctagtgtccattatgtcactctgtatacctttttgtacccataagttagctctcacttataagtgagaacacacagtatttggttttccattcctgagttgcttcacttagaataatatcctccagctccatccaaaattgctgcaaaaaaaaaaaaaaa

SEQ ID NO: 2577 - DNA, 2973 bp, Homo sapiens
gggaaacaggaagaagtatggtgggggctggggtagactcccctggagccaagcctatccagctaacaagagctccctggggctggtcacagctggctcatgatgctgaacttgaaagtttttttgtttttgtttttgttttgtggctcctccaagatataggtacatgaagtttaggttaaaggggtgggattctttatttttatttttgtattgtatgtgtcaagaattactctgttgttcaccttttgctttttgcactgtttgttctcttatctgtattttgagcttagtgctaggactgaraggctgcaccatagggaatgtatgggagatggtgaggggtgccagtgaggggtgcgtggaggagaggcctgggctcctctactggatctacactctgtcccaggtttttagatcccactgagcccagctgactgaaaacaaggacagtcagggtgaaacttcttttgccagaagtgtggcctgagttgaatttctgggaggatgacgcagatgtctgctgcagagctgggctgagagttctgcagtctagctctgacttaggtcaggggcctgttggtctctcattggacgtttttgggtctcactcatgcttactgaaacattgtgccaagaaactctgtgggatttgtgtcccttaaaccagactcacttttctgaaaaatctccattgttgaggagaggctgctcaatcgacaccccgagttctcatgactgggaagatagttttcttcaggtgtcaatggcgttagactcccaggaagactagccctgcccacaggcmacctgttggtttgagagcgtgttcgtgttctcttgccctccctgcctaagagctactgggatcacgttagcgggcatttaggctttgatgagagggcacagtttgagttaggtttacctccccctttctgtgcctgggaactgtttggtccagctttagaactgtggttttgacttccttatctcttgggagaagcttctgttttaaggaatttctcttccttcttctcctgcctctagcctctcctggaaaggcctggatatggtttctaaaatctcagctgagaacttcagaaaacagcagcagtattttccttttcctagtgctaaaatccctttccctagaaattggctcaccttgggaaacccagggaaagaatcagcaggttctctgccctccctaggggttggggaaggacccaccccggtcagcacagtgccttttcctctcctgctctgagccagggtggggcattccctctagattcaggtttgggcaggggtcctatagtccctgccatggggctgcttccctgtcccttccctcccctttgctggcctactctggcataattcaagtgtcttcttgccttggggatccttagtggcatcaaatggcaacatggaatattgtcctccatgcccctccagaaggacctaggagagtaggtgagctttccaaagtgagagacgaatctttctttctttttttttttaaagggcaggatgggtatgctttgggctttctccttctgtggccccggaggaaggagagactgaggcaaggcaaagtgatagtacactgaagcagaaccggaaacacccaggaactgttcagaaatctcagaagaaatctgcttctcttcgatggaaagatataattaacgatcaaagagctctaagaaaattgcaaagaagccttaatgttcaagctttagaaagatcagagcaatttttctctttcagtccaaactaagactctctgtatttaaatctctctggggcaagagggctagatttcctcattttgttatgagactagattggtaccagtagatcagctgcctagcgagggcaggtttcttctttgcatctgtgtggcttgcttccagtctggcctgtcctttccagctgccttttgtctagcctgctatggggggccagattatcttgataagagcaggtgatttggggactagctgggttggcaggaaaagagcaggatggatctcttgggacaggttcccccaggagtataaacacaaggagccaggattgtgctggcagccaaggaaacagtagtgcctgtttgagttggcagagagggccttggcacctcttgcatccaggcagtcttgtgagatgggggcacatagcactggggaaagcagaactccattctcacctctattttgagcttcagtgctttatttcagtatgaggaaaaacaacaacaaactgaagtgcgctttccgtcctttcaaaggacaactgtcgggaagggagagccgagttgcgaggtaggaggggagcactggcagggagagacattcttgactcctctcttccctggtgtgttgtgatccagggaatgaaaagaaatttgaccctggattggttctctccttggacttaaggaatcttaccttttccttccacaaagttctcccaggcaaggaccagctgcccattctgagcccagggcagcctcttcaaccattattggtctaacctggcttgtcaggaaaccaagcccacccttccacattgggcctggctgctctattctgtaccaagtactggagaaaaagcatcaagttcttagcccttgtagcttctaccctagtttcccatcctctctctgtggaggccaaaccaactctttgccagcagccacaacatgcattgacagcggcacagtgagatataactgatgggctttgaacctggttggccggggaagctgtaggggtggatagagctggctttccttctgggctgtctccatctgaccctaccccttccatgtcccaccccactcccaccaaaaagtacaaaatcaggatgtttttcactgtccattgctttgtgttttaataaacaatttgcagtgacaaaaaaaaaaaaaaaaaaaaaaaaaaaaaaaaaaaaaaaaaaaaaaaaaaa

SEQ ID NO: 2578 - DNA, 536 bp, Homo sapiens
gatttgaagagggcttgccttccaacctataggcactatatatgcttttggaaaaagtaattaggttaagatgcagttgttttgttttgctttgtttttcccttagctgggttggggtttctagcagcaatgatgtacaggtggatcttttttcacattaacactaccagctgctccatggctatagtgcttaggaatatctcagaatttcaacagatctatcagctgcaatatctaggagtcttgccaacacagagacacattcacatgctgaaaagagcatgagttgaaggcacagctggggacttttgatgcaggtccagaactggatggttgtgaagccattagagatatttaaattgtccagaatttcaggctctgctttaaaaactaggctacaaaccctcattcagaaagaggtcagtaatatgcctgtgagttagaaagatactggaaacatttcaatgccaaaagtaacatttttttccagaatgctatgactaaattttttaaaaaaaaaaaaaaagggcggccgc

SEQ ID NO: 2579 - DNA, 1898 bp, Homo sapiens
  SITE (265): n equals a,t,g, or c
  SITE (1854): n equals a,t,g, or c
  SITE (1859): n equals a,t,g, or c
  SITE (1888): n equals a,t,g, or c
  SITE (1897): n equals a,t,g, or c
gggtggagagagttcggcgctcagagaggtaccagaccatgaagctcttcacccagatcttcggggtcggtgtgaagactgctgaccggtggtaccgggaaggactgcgaaccttagatgacctccgagagcagccccagaaactaacccaacagcagaaagcggggctccagcaccaccaggacctgagcaccccagtcctgcggtccgatgtagatgccctgcagcaggtggtggaggaagctgtggggcaggccctgctggngccaccgtcacgctgaccggcggcttccgcagggcctcatcctgtaccaccagcaccagcacagctrctgtragtcccctacccgcctggcccaacaragccacatggacgcttttragagaagtttctgcattttccgcctaccacaacctccaggggctgctgtggggggatccacgaggccctgcccatcctggaagccgtgagagtggacttggtagttgcacccgtcagccagttccctttcgccctgctcggttggactggctccaagcttttccagcgggagctgcgccgcttcagccggaaggagaagggcctgtggctgaacagccatgggctgtttgacccggagcagggaagcagcagtggcaagactcctaggtcacggaagtcctgcttctgttgcagaagacatttttccamgmggcttcagaggaagacatcttcagacacctgggccttgagtaccttcctccagagcagagaaacgcctgagcctgcctgtktcccccacttccactcaggaaattgggctgcccccaacctggccactgaatgtctccaggcagatatgctgccccctgacccccaccttcacccctccccgccaaggcctggctcttccggaggtcaattgtgcctgcaggatcagttgagcccctgctggtgtgctgcagggtgtgatgaggtgggagccctcagtgccagcctcatcactgtgtgaccctgggtctgctcttagcctccccatggctcacgttcctgccctggatgggatgtgagtggggcccacatcgtggagctgtggtggggcctgcagtcatgaatggcaagtggtccctgatgtgcagtgtctcattagttgcactgcagttaactgtggctcctgcagggcaccctgcccagaatgcccagaagagaaccatgcatacctgcactgcatttgagagccatgagctggaggctgtggttcgtgccagcaaggagcctactgtctggtgtgctgtaggcatctggagagggagagggcctgggtaggagctgggaggaagataattttcaactatggggcttcagtactgcagcgccccgagccaggctctgtgcttctgcctttaaggcctgttctcagcacaatgtctcaaaaataggtcatatcctgccactcccgtcgcagagccctttaatggttccaaaccctaagtccacacatagcccctggctctggcatctctccagccccactggccccgagctgcttgactcaccggcttcctatttgatgcacccaggcccccttgtggccaactccctccccttctcactgaggcagaagcactgaggtgggctggacatgggtgccctccacgtccctcatatccccaggcacactctggcctcaggttttgccctggccatgtcatctacctggagtgggccctccccttcttcaggccttgaatcaaaagccactttgttaggcgaggatttcccagaccactcatcacattaaaaaatattttgaaaacatgcagtaaaaaaaaaaaaaaaaaaaaagggcggccgctttaaaaggatccttcganggggncccaagcttacgccgggcattgccaacgncataacttnt

SEQ ID NO: 2580 - DNA, 1701 bp, Homo sapiens
gggcagacggaagccgaacgagttcctcggcggctgcaggatgggggactccaaagtgaaagtggcggtgcggatacgacccatgaaccggcgagagactgacttgcataccaaatgtgtggtggatgtggatgcaaacaaggttattcttaatcctgtaaatacgaatctttccaaaggagatgcccggggccagccgaagtgtttgcttatgatcattgtttctggtctatggatgaatctgtcaaagaaaagtatgcaggtcaagatattgttttcaagtgccttggagagaatatcctgcagaatgcttttratggctacaatgcatgtatctttgcctatggacagactggctctggaaaatcttataccatgatgggcacagctgaccaacctggattaatcccaagactttgcagtggactctttgaacgaactcagaaagagggaaatgaagaacagagttttaaagtagaagtgtcctacatggaaatttataatgaaaaagttcgagaccttcttgatcccaaaggaagccgtcagacgttgaaagtcagagagcatagtgtgttgggaccttatgtcgacggactttctaaactggctgtcacaagctacaaggatattgagtcgttgatgtctgagggtaacaaatctcgcacagttgctgcaaccaacatgaacgaggagagtagccgatcccatgcagttttcaaaatcaccctcacacatactctctacgatgtgaagtctgggacatctggagagaaagtgggcaaastcagcctggtggatttagmtggcagygaacgagcaacgaagacaggcgctgcaggggacaggctgaaggaagggagcaacattaacaagtccctcacaaccctcggtctggttatctcagctcttgcagatcagagtgctggcaaaagcargaataaatttgttccatatcgtgactcagttctcacttggctgctcaaagacagcctcgggggtaacagcaagmccgccatggtggctactgtgagtcctgcagctgataactatgatgaaaccctctcaactctgcggtatgcagatcgagccaagcacattgtaaaccacgctgtggtgaatgaggaccctaatgcccgaattatccgggatctccgggaagaagttgagaaactccgggagcagctgaccaaagcagaggcaatgaaatctccagagctaaaggaccggctggaagaatctgagaagctaatccaggaaatgactgtgacctgggaggagaaattaaggaaaacggaggagattgcacaggaacgacagaaacagcttgagagtcttggaatatctcttcagtcttcgggaatcaaagttggggatgataaatgcttccttgtgaatctgaatgctgacccagctctgaatgagcttctggtgtactatttaaaggaacatacattgatagggtcagcaaattcccaagatatccaactgtgcggcatgggaattcttcctgaacactgtattatagacatcacgtcagaaggccaggttatgctgactcctcagaagaacaccagaacatttgtaaatgggtcatctgtctccagtccaatacagctacaccatggggacaggatattatggggaaacaatcatttcttcagactcaatttgcctaaaaaaaaaaaaaaaaagggcggccgc

SEQ ID NO: 2581 - DNA, 787 bp, Homo sapiens
  SITE (7): n equals a,t,g, or c
  SITE (11): n equals a,t,g, or c
  SITE (16): n equals a,t,g, or c
aacactntcanacggnaacgcttcactatagggtttcgctggwacgcctgcaggtaccggtccggaattcccgggtcgacccacgcgtccggaagaatcagggcagaaaagtgcttttatcatggctccggggaccttagcttcagttggtgttgtgagaattcctcacacaaggacattctccttgcttcagcatcaggatggaagtgtttctcatctggactttttcaaagactcagctggaggaatcagaattcataatttcctggcagctcatgattctgctacactacaccatgccatctcttgtgtgaaaggacagatttgatggaggactatgtcatccctcatgcgtttcttattgtctacatttattctaatgggaagaagtgagcaaaaacaccacaataatttgggtagtttttagaaaaccttgttagtaaattagaatagtgccactttggcattatgagaaagaagcatggatacataactagggttttgtgtatgactacaacgaaatgcagaatggtgtctccaaaaggtttccagttgctgccacaagaactgcttggtattgcctacatgtgttgtcctatttttgctttgcccttctgcagttacttgctgtgggaccttggagaaattaacttagcctctctgtacttcagttttttgtatttgtaaaaatatatttgtaataatctcatagttaaaaaaaaaaaaaaagggcggccgctctagaggatccaagcttacgtacgcgtgcatgcgacatcatagctcg

SEQ ID NO: 2582 - DNA, 1030 bp, Homo sapiens
aagctggtacgcctgcaggtaccggtccggaattcccgggtcgacccacgcgtccgctcgggagccgcaacctagaagccagaattgtgtatcagattcaactaggagaaaatcccacctccaggctccattaatccttccaatggagtggaagtttctctcacagagaaactagtaaggggatccaatgggaaaagaacgttcacacggactagaagacgaaaccaatggaatggaaaattgtcctcgcgttggtagaagcagccaatgagatgaaaagagcccgcctccaaagtggctgcagaggcaatggggtgaatcgtgctcagaggcgcgctccaatggggtagcagggctcgcccggccgccactaccccgcttccccgcgcccggagtccccacccacggccggccgcggagccgagtgctgacccgggtccgaggagctgcaggtgtgactgatgggaatgaagtggccaaggcccagcaggcaactcctgggggagcagccccaaccatcttctcccggatcctggacaagagcctcccagctgacattctctatgaggaccagcagtgtcttgtgttccgtgatgtggcccctcaggctcctgtgcacttcctggtcattcctaagaagcccattcctcggattagccaggctgaagaagaagaccagcagcttctaggacacctactccttgtggccaagcagacagcaaaggctgagggcctgggagatggataccgacttgtgatcaacgatgggaagctgggtgcacaatctgtgtatcatctgcacattcatgtacttgggggccggcagctccagtggcctccaggttgaacctgccaactgattaaaggacaccagactctggatgcttggatggaaagggaaaaatggaccctgtgatgctaataaaactgttctcccttaaaaaaaaaaaaaaaaaaaaaaaaaaaaaaaaaaaaaaaaaaaaaaaaaaaaaaaaaagggcggccgctctagaggatccaagcttacgta

SEQ ID NO: 2583 - DNA, 2770 bp, Homo sapiens
  SITE (1570): n equals a,t,g, or c
gcagcaatgagccaggcatcgggccgctgatgagggatataaagaacaagatttgccaggactgtgacttagtggccctcctggaagatgacagtggcatggagcttctagtgaacaataaaatcattagtttggaccttcctgtggctgaagtttacaagaaagtctggtgtaccacgaatgagggagagcccatgaggattgtttatcgtatgcgggggctgctgggcgatgccacagaggagttcattgagtccctggactctactacagatgaagaagaagatgaagaagaagtgtataaaatggctggtgtgatggcccagtgtgggggcctggaatgcatgcttaacagactcgcagggatcagagatttcaagcagggacgccaccttctaacagtgctactgaaattgttcagttactgcgtgaaggtgaaagtcaaccggcagcaactggtcaaactggaaatgaacaccttgaacgtcatgctggggaccctaaacctggcccttgtagctgaacaagaaagcaaggacagtgggggtgcagctgtggctgagcaggtgcttagcatcatggagatcattctagatgagtccaatgctgagcccctgagtgaggacaagggcaacctcctcctgacaggtgacaaggatcaactggtgatgctcttggaccagatcaacagcacctttgttcgctccaaccccagtgtgctccagggcctgcttcgcatcatcccgtacctttcctttggagaggtggagaaaatgcagatcttggtggagcgattcaaaccatactgcaactttgataaatatgatgaagatcacagtggtgatgataaagtcttcctggactgcttctgtaaaatagctgctggcatcaagaacaacagcaatgggcaccagctgaaggatctgattctccagaaggggatcacccagaatgcacttgactacatgaaaaagcacatccctagcgccaagaatttggatgccgacatctggaaaaagtttttgtctcgcccagccttgccatttatcctaaggctgcttcggggcctggccatccagcaccctggcacccaggttctgattggaactgattccatcccgaacctgcataagctggagcaggtgtccagtgatgagggcattgggaccttggcagagaacctgctggaagccctgcgggaacaccctgacgtaaacaagaagattgacgcagcccgcaggagacccgggcagagaagaarcgcatggccatggcaatgaggcagaaggccctgggcaccctgggcatgacgacaaatgaaaagggccaggtcgtgaccaagacagcactcctgaagcagatggaagagctgatcgaggagcctggcctcacgtgctgcatctgcagggagggatacaagttccagcccacaaaggtcctgggcatttataccttcacgaagcgggtagccttggaggagttggagaataagccccggaaacagcagggctacagcaccgtgtcccacttcaacattgtgcactacgactgccatctggctgccgtcagnttggctcgaggccgggaagagtgggagagtgccgccctgcagaatgccaacaccaagtgcaacgggctccttccggtctggggacctcatgtccctgaatcagcttttgccacttgcttggcaagacacaacacttacctccaggaatgtacaggccagcgggagcccacgtatcagctcaacatccacgacatcaaactgctcttcctgcgcttcgccatggagcagtcgttcagcgcagacactggcgggggcggccgggagagcaacatccacctgatcccgtacatcattcacactgtgctttacgtcctgaacacaacccgagcaacttcccgagaagagaagaacctccaaggctttctggaacagcccaaggagaagtgggtggagagtgcctttgaagtggacgggccctactatttcacagtcttggcccttcacatcctgccccctgagcagtggagagccacacgtgtggaaatcttgcggaggctgttggtgacctcgcaggctcgggcagtggctccaggtggagccaccaggctgacagataaggcagtgaaggactattccgcttaccgttcttcccttctcttttgggccctcgtcgatctcatttacaacatgtttaagaaggtgcctaccagtaacacagagggaggctggtcctgctctctcgctgagtacatccgccacaacgacatgcccatctacgaagctgccgacaaagccctgaaaaccttccaggaggagttcatgccagtggagaccttctcagagttcctcgatgtggccggtcttttatcagaaatcaccgatccagagagcttcctgaaggacctgttgaactcagtcccctgaccaccacacagcagctgcggcggcgaagacgaagctggcttgccttccaccctctgttctccctccttgtgcattaagttccctccgcgggatgctgcattgttaccccgccctcccctctctcatttttcttggtgtggcttggggtttttaggcttcctgttttatctcgtgtgtgtggtgcaccagctatgaggttgtctgtaacccaagccatcaaagggcctgtacatacctaggagccatgagttgtcccggccagcttcatacttgagtgtgcacatcttgagaaataaacaagtgacttaacacacattgaaaaaaaaaaaaaaaaaa

SEQ ID NO: 2584 - DNA, 598 bp, Homo sapiens
  SITE (597): n equals a,t,g, or c
aatttcgaataatccggggaaaccccaagagccttactggtcttctgtaacttccaagactgaccagctttttatgtatcagtgtttgataaacacagtccttaactgaaggtaaaccaaagcatcacgttgacattagaccaaatacttttgattcccaactactcgtttgtyctttttctccttttgtgctttcccatagtgagaatttttataaagacttcttgcttctytcaccatccatccttctcttttctgcctcttacatgtgaatgttgagcccacaatcaacagtggttttattttttcctctactcaaagttaaaactgaccaaagttactggctttttactttgctagaacaacaaactatcttatgtttacatactggtttacaatgttatttatgtgcaaattgtcaaaatgtaaattaaatataaatgttcatgctttaccaaaaaaaaaaaaaaaaaamtcgagggggggcccggtacccaattcgccctatagtgagtcgtattacaattcactggccgtcgttttacaacgtcgtgactggggaaaccctggcgttacccaacttaatcgccttgcagna

SEQ ID NO: 2585 - DNA, 2306 bp, Homo sapiens
  SITE (10): n equals a,t,g, or c
  SITE (19): n equals a,t,g, or c
  SITE (39): n equals a,t,g, or c
  SITE (75): n equals a,t,g, or c
  SITE (875): n equals a,t,g, or c
ccccggagcngaggactgnacccagccaagcgtgcccangcgacacgtcccgtccaacggcccctgtatgatgantgacccctgcttgctgctgaactgaggaccgcaggccgccaccgctcggggcctctggagacttccccctggagcccgccaggccgacactgctgcactcactctgcaagggatcaggaccagcaacctttatattctagattctargacattgtacagagaaatycagaagtgtaaaaatattgcacattgacaaataccaagaatttttgcgtatgtttatattgtattgttctaaataatgggtagcctgtgaaataagawcktgccrcccatgtaataatagtagtaatactakagttaaaatggctgtaagaatagttttataaaagtgaatacacagatctattgtatttgaaacataactttgacaattattagtgtgaccaaagtattaggcggttttcatacattttycaccttgtacaaaattatgaattcatttttcctccaggccgacaaggagttgtagaatgaaaatgccctctaagtgttattttggttgttctaacttacaaaagtgattttgaataagaaatatttggtgttctttttataaccagtttttgattggtaattgttttctgtattgtttaaaacggatcaaaaatgtaagtctattggtagagattaagtatttattgctacatcatagttgataaattgatgttatcgtaaagccatatgttctgttcaagtcttgtttgcttgaaatgattattcctacaagtgaaacactagactatttggagtgtatatggcttgtgttttgggatttttttttttttttttkggctttngttttkgtttgtttttttgtttcatttggtagttcatctgccttttaacccattcaccaaaatttaccttgttaacaagcatcaccaatgaacatttcagagcaatctgcatatttaacagacctaaaataaatcctattaggcaagtcagttgaaaatgctcgtgctgctaatggaattagagtgcgttcattttacaggctagtattttaaaartagaaatcaaaatctggcacygaagcatgctaattgtttactgtaccttgtgaggttttcactcataaatttaaaccagtgtatttttttagaactggtttgtgtatatatatagtgattatggatactaattcaatgtaatttataattttctatgtcaatacaaaaatacatcacagccttctcaaacagctcaagcaatatattgtatattgccatatcgtctggtgaaagggttaaattacttcacctcttgcacttttagatgcaaatcagtttttcatttctgtaatagaaaattattcacgtatttttacatcatttgtttttcctgaccagtatttaaaaccaaaaggatattctgaaaaatggccaacaatttttttagaagtagcatcccaagcagcgtgcctaaacattacattgcatatggaaataaaagaatcaaacgtctaatgccttattatttctgatttcctttttcattttaagtggtgtggagattccagcactcccaggacagtggagtcagcagtaagccctgggacaggtggcaagggtgggtcccttgacctttgcacgcctyctcaggaaccccctttcccgggtgagcccctctctgaagagactgtccttgggcctcctctggaagcagcacccccagaggacagggctcctcctgcttgcctcagggctgcctgacttgaatggcgttggacctcggggattactggtagataatatgctctggtctcgcctggtggtgagttttgccagccatggccagggtttggctccactggtggcacacgtggcctccgtggtatggacctggtggcttctccatcccactgtggcctctgtggtatggacctggtggcttctccatcctacccaaggtaacagtgtcttgcttcatcccactgactgctgggagagagcctctgggacttttctttggggcatcattttgttttgtctttcgtagcagggaaaggatatgacaatggggaggacagttcttttggaggttggaggggccaagccaaggacaggagcaagtgtgccctcattttgtttctacttttaatttctgtgtgttggccatactgaattatgagactaacagatgtctacaatacaatacctgtattcaaaataacaaaaataaagcctgattctttgtttctagaaaaaaaaaaraaaaaactcgag

SEQ ID NO: 2586 - DNA, 91 bp, Homo sapiens
aatttatatttttaagagcttatgaatcaagattcggatattttcagatttatgttttctcatgatgtccatgtaatcaggtagataaacc

SEQ ID NO: 2587 - DNA, 699 bp, Homo sapiens
ggcacgaggaaaaacccaaactgagactcttaagttttgtttagcaatgtgtttctggtatgaaacaaactactgtgtcactgtccaggtaggaaacaattctttcaactgggttttcagcataaatgggaactgatgtagaaggcaggatttagcccttctaggcaaaagaaaagctcagttgggtttcacgagtgttcctgtgcttatattcagtctgtgcctacatgttctcatgcatgtctaacctgatttacctcttacctgtaacctaccttatcatgtggcttttaattggcagtcactcgccatttctaagcagatatagtactacctttcagaactcacattggcaagtgtaaaaagatgacttaaggtgaagtgaggacaaaatcacattctgcatactaaccttttttttctccctttaaggtgctaaacttgcacctcatgtccactcagtaacaagtattgggacgtagagcacagcctcactcagctctgaaaggtaatacagcctgtgaggaagtgagccagcagtggcctttgcaattgtggatcttaagctctgctctcagcagatttcaggtgtaaccatttgttaactgtactgaaggtgtgtcctcaagaagaaagtgttcaaattaaaaaagctgctgccaagtaaaaaaaaaaaaaaaaaaaaaaaaaaaaaaaaaa

SEQ ID NO: 2588 - DNA, 338 bp, Homo sapiens
  SITE (5): n equals a,t,g, or c
ggcanaggtccatctgaatgggtgtttagtagggtatgacttgtgagtccacaaggccagcagtatatatgctgaatggactgcttagcagtaacacactggaaaaatccaaaaagaatggatttcaagttggcaaaaaatgcattagaagtcagcagtgtgatgtggtcaggagaacaaccagagtgactgtgggatgaggtcttggatagactttgtttctatatacagttcagccctctgtatcccatggtttctgcatccatggattcaaccaaccaaggctcgaaaatattaaaaaggaaaaaaatccaaccataaaaaaaaaaaaaaaaaaa

SEQ ID NO: 2589 - DNA, 2789 bp, Homo sapiens
  SITE (754): n equals a,t,g, or c
gtgaaggagcctcttctgccagatagctgtgaaacaggcactggtcttgccaggattgaggccacccaggctcctggagcaccccaaaagaattgcaaggcagtcccaagttttgactccctccatccagtgacaaatcccattacatcctctaggaaactggaagaaatggattccaaagagcagttctcttcctttagttgtgaagatcagaaggaagtccgtgctatgtcacaggacagtaattcaaatgctgctccaggaaagagcccaggagatcttactacctcgagaacacctcgtttctcatctccaaatgtgatctcctttggtccagagcagacaggtcgggccctgggtgatcaragcaatgttacaggccaagggaagaagctttttggctctgggaatgtggctgcaacccttcagcgccccaggcctgcggacccgatgcctcttcctgctgagatccctccagtttttcccagtgggaagttgggaccaagcacaaactccatgtctggtggggtacagactccaagggaagactgggctccaaagccacatgcctttgttggcagcgtcaagaatgagaagacttttgtggggggtcctcttaaggcaaatgccgagaacaggaaagctactgggcatagtcccctggaactggtgggtcacttggaagggatgccctttgtcatggacttgcccttctggaaattaccccgagagccagggaaggggctcagtgagnctctggagccttcttctctcccctcccaactcagcatcaagcaggcattttatgggaagctttctaaactccaactgagttccaccagctttaattattcctctagctctcccacctttcccaaaggccttgctggaagtgtggtgcagctgagccacaaagcaaactttggtgcgagccacagtgcatcactttccttgcaaatgttcactgacagcagcacggtggaaagcatctcgctccagtgtgcgtgcagcctgaaagccatgatcatgtgccaaggctgcggtgcgttctgtcacgatgactgtattggaccctcaaagctctgtgtattgtgccttgtggtgagataataaattatggccatgggaaacattgtatatttagtgtgtgtattttgataatgattgatcttaaatctgtatacagaatatcattgatataatactctttaggcaggagcactcttgccttcccccaaaatttacactgctaaagccctctgtcacttggcgacccttctggtcttgctggaggggtttcctgggtataacccattgggctgcccaaggccagccagcctgagctctcctgcaagacagagcctgatgtggcacggagtggggttgcggggggtggggggactgcctgactcccagagggacttgaaactgaagcaagaaggttgcattctccaccaagggagttaacctacctgaactaagtagaaatgccagtcttccactaccccctccctgccatcttttcttctgctactttggggagttgatggccaggaaagaagccagcacagggttaaagtaactcctggcattgcccaccagggggctggtgcacctgctgacctcagggtcacagttgagtcatttgccagttgacggagcaagtttgaccttggttctgttgctgaagcaaatttggaacttttctgtctcagtgtgatccactaacccacaggatcatttggaaccttgaatagctctgcttggacaatggggttggggaatagggttgtctttcctatgaaaatgccatctgtagaccttgtgagtcagccgtccagatgtttgcaggtgaattcctctgcttgacatcctccctgtcactttggaccctatgggagtgggcatctccacgcacctgtgtatgtgaaagtcattttacatttcaaagcagtgtgtgtttcttatttttatatttttaactctttattcttggatgtataaagtgaactttttggcttctgtaagtatgctctatgcacctctaatgttttatcatgtatttatatgttgtacacagtactggctgattctgtaaatggatgtattgtacagagaacatgaacgtctcttcctaattttacatcttcagcatcattgcattaaagtggtgtaatctccttctctacatctgttgtcagagccactgagtgctgtgctgctcgacgtgagggtgaaatgattgacttgtgacctgccaggttgcccgatgccctgttgggtcaccggctggacctgctgcagcctgcagagccacagtcagcctgcccacatgccaccgagcaaacgcatcttgcttttcacatctctcctcctacagccttaatggctgcttgctgccatatgtgacaaatcaccaccaccagtgttaagtgcttctggattcatgggtgagttccctgggcagcccccaggaaggccttccagatctggctccagggtcaccacctgtcacagcaatacctgggaccatgctctcctgggactgtgaggctccttttgacgtacttttgacatcaggcaggtttgggaagaaacaaagccatgcctgctcctgcctctctcccaacatgtttccagcaagtagatgcccctgtgtgtgttttcccttgccttgtttcctgccttatatcttgtatttcgacttattacagagttgagggttcttgcttaatttagatcaagtataaaatttgtatgacttcaaaaaaaaaaaaaaaaaactcgag

SEQ ID NO: 2590 - DNA, 1145 bp, Homo sapiens
  SITE (1109): n equals a,t,g, or c
  SITE (1127): n equals a,t,g, or c
  SITE (1131): n equals a,t,g, or c
ctgcaggaattcggcacgagattctactcagtgctctgggctatctccttctcggagcagccaccaatgtgtttctgtttgtcctggctagagtcccggcaggtatttttaaacacactctctccatctcaagggctctactttctgatgtggttccagagaaggaacggccgcttgtaatcggacacttcaacacagcctccggtgtgggcttcatcttgggccccgtggtcggtggctatctcactgaattagaggatgggttttatctcacagccttcatctgctttttggtcttcattctcaatgctggtctcgtttggttctttccatggagggaagcaaaaccgggcagtacagagaagggcctgccattgcgaaagacccatgtgctgttgggaaggagccatgacacagtgcaggaggcagccaccagccgcagagccagggccagcaagaagactgcccagccctgggtcgaagtagtgttggccttgcggaacatgaagaacctgctgttttccgaaatgtgggacatatttctggtgcgcttgctgatggccatggcagtcatgctgtactacagtaactttgtcctggccctggaggagcgctttggggtgcggcccaaggtgacaggctacctcatcagttacagcagcatgctgggggccgtggccggccttgccctggggccaatcctacggctgtacaagcacaactcgcaggcactgctgctgcattccagcatactcacctgcacactgctgctgctctactccttggcccccaccatgggtgcagttgtcctctcctccactctcctgtccttctccactgccattggcaggacgtgcatcacggacctycagctgactgtgggcgggcccargccagcggcacccttattgcgtggggcartctgtgactgcagtgggccgatatcgccctctctctygggggttgccargaggcagccttgggcccccagctggcctggtagctatgcatttataatgtctctaaacaagcgacactctagtggtgatgggaatagtaaattaaaaagkgagtagatggatttggacaacaaaaaaaaaaaaaaaatnggggccgacatgcttagnggtnatatgcggttaagg

SEQ ID NO: 2591 - DNA, 592 bp, Homo sapiens
cccacgcgtccgcccacgcgtccgggaaaataaaaccaaggcccctttgtcagcatacagcttcagtagataccccaaattcttgaaatctgtatagcagactgctggttttttctccttgtcagagcccagcccactgacactttacagttgacagcccagcccagatatgggccgctgtggcttctatcgaatcatgcttgggattgccacagttttcttctttggattggggcttgaggtggttgggaagaatgcatgccaaccagccctgcatctgggacttggagcctgtcagctccctgctctttgataatggaatagtctgtggacttcttcccatttgtgagagaaaactcccccttagaactcaactggtagagcttctcatagcttacagttccaagcaatagcttggttgtaggtccaggcaggactctgacatggccctctggaatagcattgatgtgttgggttcttcgctaagatgatttccagtctgtgttccagggagattcaggaaagctgaagttcattcttagaacctaggtctgtgtttgttgttttgttttgtttaaaaaaaaaaaaaaaa

SEQ ID NO: 2592 - DNA, 2230 bp, Homo sapiens
ccacgcgtccgctttatatggctgtggggaagagtagccaggaattaatgtatataagcacttaaaagaatgcctgacatacagaaaatactcaatacatgttaactgtaattaatttgaagtggcttcttaaatcaatatttattgtgcatcattttcatcttttaaagataattgctttaatacttgagtatctaattttttttaaacttaagatttttagttagttactgtgttttagactggcaactgtttcagtactttccaaaactgctatctctactgaggtattgtcctgtctcccagtgaaatgtaggctgttcccgttggatggattgacatgggagatttgaaactagttctcctgatttctgagcttatcattgagttcccatgaccaggtgttggtagtgtccacaacagagcaggaagagaaatagtacagaatttcagtggcaagttcttaagccttaacctgtactttaagtccagtccctaaactttcatattccttagtagagaacagatgttcccctttttttcccccacattttccttttttggcttgggggaatagattttttaaaaatctgaatttatattccaaaaaggcatgtgcaagttaattttcctaagtcaatgaagccggtttttaatcttactttgtaagatgcatacctgcagtgagagaagtaggtagggctttagtaatttgtgtcagggaccatgtcctattaaatcctgtgaaaatatgcacatgtagtacacaaagaaaaatttaagggaagaagagttttttccaagttattttataaagtattctttataaaagtatatttcttgtaataatcccccatctgtccttctagcccacctttactttctcacacttatgctctcataacaattaaaatataatcaaagttacttgggtaacttaaaaaattttcattataggaaggaaatgtgttttgaaaatcagaaatttttcaaattttaataaattttagtgttttttatgcaagctgtgagttgaagatgaggggctgggatataaagctaaatcgggtacttatctttattacttatgacctactagggtgtccagagtatgcagagaacatatgggaatttggaagctgggaatggagactggaaaagtgctggattttgaatagtgccaggaaataaaggaagacttagcaagggatcatttttcaatgccagtgacatgctgtgtaatagtctaccatgggaaatttgaatgcttatacgattggtcagtatactaatattgtcttgtaatttgaacactaactcttaatattaacaaattttttttctcaacagccatcgtaggaacttttaaaataggttttgcatttcccctgaaaatggtgagttaggtcatattaggaaaaataaattctagaataaatacaattttgattaaaccggttttctctataaaaacccaagacgctgtatctatctttaatgttatctattgttaaaatttcatttccctcaacagcatgcatttccatgtttattagaccaaacaacttcttgttttacttcttacctttgtttttccttgttgttgttatttaattagaaaagaaatgctgtttgggccttttcatatgcctcaaaaatgtttggttacacagaggagtgagttagatttataggactcacacccaatttgatctcctcaagtgcatttctaaccatgttttcatccacttttccttgttttaggtttctcatagaaacagcttttcattgagctaaatgtatttcctctcttactcgttcttggaaatctaggactatgtatgtgaaacttcttattcttgtacacaataactcttaagtatttgaaaatgactgttctacttcagtcttcttttttgccaaactgagggaaaaaattcttttttttttttttaaaccgcatgcatgtgacatggtttacagacctttccccatctatatcgctctactcatgcacctaattggaagcgccaccctagcaatatcaaccattaaccttccctctacacttatcatcttcacaattctaattctactgactatcctagaaatcgctgtcgccttaatccaagcctacgttttcacacttctagtaagcctctacctgcacgacaacacataaaaaaaaaaaaaaaaaaaaaaaaaaaaaaaaaaaaaaaaaaaaaaaaaa

SEQ ID NO: 2593 - DNA, 1223 bp, Homo sapiens
  SITE (13): n equals a,t,g, or c
  SITE (28): n equals a,t,g, or c
  SITE (38): n equals a,t,g, or c
  SITE (116): n equals a,t,g, or c
ccgattccaaccntccgggacttctaanctaagccccncgggacggaataccaatttccccccaggaaccaagctatgcccactaaggctttgcaaaaaacctattttaggtgccncctatagaaggtacgcctgcaggtacccggtccggaattcccggggtcgacccacggcgtccgattaattttagcatccctctggggatcttgcctgcaatgattaatactgtggtattctcatgactgatattgtctttctgtcatgccttctattttttggtgggaattcttctacatggaaggctgtttcttcttctccatttatattggtatggatacgtgaatatttagtttattctgtaggtcataatacgacagtattgtgatatattttggtgctcaaattgttccgggtttggcccataggaggtctttcgggcaggttcctgcacccttttgacatgccccgttcttttttgagcactttcttattttttggcactgtaagaggctttacactgtcatcttggacttccctgcctcagtcttggaattaactcattctccatggaggctyggttcgttttattatagaatcatatttagaactaagatctaggtgctagttgcgctcattactgctggagtgtcattgcttctagaacttctcaacagagtttagaaatatgtgtattatacaaacccatgcacatacacctatctccatttattcctgtatctctgtgtatattataattttagtatatttatatttctttctggacacattccattatttgttcatatatttataacatatcagtatctattataaattatatatatgtacactttaatgtgtgtttgtacctaattccaatccaacacaacaactgggttttttcaaacttgkttctttgkttttttctttttgtggagagcagggtctggctatgttgcccagctcagtctcaaagtcctgggctcaagcgattctcccgcctcggcttccctaagtgttgggattacagacttgagccactgsatctagccacaactgagttcattattctgagctttctttgggatgktatttaactctcagttcttcttctataagatggaaataatamcaactaaaggctaggatttggggaaggtatggtaaattgkaaaaatggtagcttgtttaaaaaaaaaaaaaaaaaaaaaaagggcggccgc

SEQ ID NO: 2594 - DNA, 1168 bp, Homo sapiens
aattcggcacgagcacagatagaaggagtggtggtatttttaaagtgaactgttgcgatgatatctgcttagctttctcatgctaatctctttctgtggtccatcttttgaaggcctcccttccctgctgggcttccttgcaacacacctaggaattgaaatgtgctcccttttctgtctctctgctgtgctatgtcatcgtcatctccactagttcttggtgcctggcaagaggtggcagccataggatgttttctaaatgaaggagcaaatcaatgaagacgtgccgaggtgcctacatctccacctctggtccgtctcattgcaggctgtaatcgggaggtgaaggagattgaatggaaggcatctaccagcatcagtttggttctgacttgggtttctgccctgttcatggcacagagtccccaccccaaactctagttttagtagatggctatcaattctcttgtgcctaaattcctgccttgtcaaccctagtgcgctgttagccccccaagagaggagcccagcaggttcttgacagcagaatttgtcttgcctgtattttgtccactttatgcatctttgagtccagacctgtcatgagctgtactctttaatctcagacaccttggccatttttcagagtgactaaatagtgcctgctgccaggtccctgttttcaagctccatggcccatcaggaaagaccatgatccctctctgacctcccttgtgatagctgtatgcaatatttctagctgctgcttgtcactgtttggtcaggatgttccctccacttaaccattgctgcccctgaattctttcctaacacttaccccaattcatgggccacctcagggaacatagctagttcaacttcctggcacctgttaaaaagtttcttgagatggagtcttgctgtgttgcccaggctgatctcaaaatcctgggctcaaaggatcctcctgtcccagcctccagaatagctgggattacaggcgcatgccaccgtgcctggcttgcaggcacctttaaccatgcaagcccacagctatcattcttcaatctggtcaagtcattagatacaacaaatgtaatcaaacaaaacacatggaggagaaaataaaataacttactggtataaagaaaaaaaaaaaaaaaaaaaa

SEQ ID NO: 2595 - DNA, 1193 bp, Homo sapiens
ggcacgagggaagaaggtgctcaccctgctgggcctctcgagcctggtgggtgtgacatgggggttggccatcttcaccccgttgggcctctccaccgtctacatctttgcacttttcaactccttgcaaggtgtcttcatctgctgctggttcaccatcctttacctcccaagtcagagcaccacagtctcctcttctactgcaagattggaccaggcccactccgcatctcaagaataggaaggcacggccctgcaatatggactcagctctggctctctgtgtgaccttgggcagctccgtgcctctctctgtactccctcagtttccttctctgtacaatgtggctggggagggagaggatgggaccaggttggaccacgtggcatcagaggtcccatccagatccaactataggtccaagagtccacgtaagcaggttagcaaggctctaaagttcctatagtcctgagaccccctgccagcaaagagtgacagtcacctccatgccctgccctcattgcaaagccctcactcaccttctggtctcagcaagggaggagagtctgttgctggcatagccctggaaggagcccccagcctctcccctcctcctccttgtcactggcctcccacaactccccttctggctgcctgtaaccttgaggggcattcaggaggccagcgttccctcaggcattgggggtttgttttggggggtgggagttgatcttcccacccagtctgcccctggtctctgcccatccaatcagagcccaccctcctggaagagacccccgtgttcagagtgctggcagccctgcacgtgtccagggacactgcatttcaaagaaccactgagtgggtgagctaccttgggcaaaccccccactcctgactctgactgccacgtgggtggcccgacctctgacctgctgtcatcgtagaggtagaaagcaaacaatctggggctcagcacacctgggggtgctcccactcattcagtgtgtggggcccctgagcagaggctgggcattgccactaggacctgagctcctagagaacaaggacctgggtggcctcgcttactgttccagcccaggccaagcacagggtctggctcgtggcaaaccttgaataaatatttgttggctgaaaaaaaaaaaaaaaaaaaaaaaaaaaaaaaaaaaaa

SEQ ID NO: 2596 - DNA, 584 bp, Homo sapiens
ggcacgaggctccttgaggtcgctgtaggcttggtcgcctgaggctggggcagaccttcagggtcagcgaacagcaagatgcaaaggcaccacagacagctcagccatcccactgatggtgggagagacctgcttgctttttcatttgggagttacctgctccctggcctggaggagaagggagaaaacagaaaaaggagtaattcctaacatttgcatagcacaatctcatacaagggatttaatttccttagcaatcctatgttagtaactgtgaagcctcttaaaaaatgaggctctgggaagtcagatgtctggatgaagtttcacagcaaaggcacagtgtagttggactcgggcccatgcccactgcccaagcccctgtacattcctctaggctattgcatggaaggcacaggctcactggcatcggttccaaccagacagactcactcaggcagttccccaatatagggaaggctcgctggcacagaactattggttttgtttttagcagaatttacctgccttttgaatctttgcttaagggcacatttaaaattaagaaaaaaaaaaaaaaaaaa

SEQ ID NO: 2597 - DNA, 896 bp, Homo sapiens
  SITE (885): n equals a,t,g, or c
  SITE (886): n equals a,t,g, or c
gaattcggcacgagcattcatcatctcgtagacagcagactctctaagaggaaaggttgtattgcaatacagtaatggggtctttaggcctggktgcaaaggtagaagaagatgatggtgatagtgatggtggtgatggtggtagtgatgatggtgatggtggtggtgatgatggctgtagtgctatatttctgtgctccttccggacccagccattgaaaactctctctccctaaactccctaacatccaatcttccctcaccaatcctggtcctaaaacccctgcttctaatgccttgtaagtgcttggtttctcttggcactggagcaagggagagctgggccctgtctaggggtgtgagatggggacagagcatgggcagggacaaagatggcctctcactgctggtcatagagttgaagtccccctggcaggaggccaggaagggagtggaaggggattctgcaggctccaggacctcctgctttcaaacaggcaggaccacaggtgtgagaggatggggagggagggggaaggggccttgccattgttgcctccctgcctgaaggtcccagggcaagcctcaaacgctggtccttcccagctctgcagctcaacaggtaatctgagacacacctgctaagcccctcgttattgacctcgtgttttgtagggtcacttgactccaacagccatacggttggtaattctaagcctctgagcccctggrcctggcaggatccctcatttttccctttccttcctgctttctaggcccccaccacccacccctktcccccctcccctcaagacacacaccactcagctccacacaacctgctgataaatagcaaaaaagaaaaaaaaaaaaaaaaaaactcgnnggggggtctc

SEQ ID NO: 2598 - DNA, 2178 bp, Homo sapiens
agactgtagtctcttgggaccttggtcacttctggcctgccctgcaccgaccagtaactgtgcctgatgactggaggtatggggaattcaccggactttattgttctttgtaggaatcaaagatcaactcccactgaggacaaatggacctgtaattccgggtgtgacgagagaacgtgatttaccttcctgaattaaaaaacaggtcattaagcttgggccctgactcttctttgtgagaaggtacagagatggaaaccttacaatccgagactaaaacgagggtccttccctcatggctgacagcccaggtggctacaaagaatgtggcaccaatgaaggcccccaagaggatgagaatggcagcagtgccagtggcagcagcaaggtgcgacagctctggtcagaagactcctgcgaatctgactccctgcgacaaggactgtgtactgcatgaatgaggctgagatagttgatgttgctctgggaatcctgattgagagccgcaaacaggaaaaggcctgcgagcagccggccctggcgggggctgataacccagagcactcccctccctgctccgtgtcgcctcacacaagttctgggagcagcagtgaggaagaggacagtgggaaacaggcactggctccaggcctcagccttcccagaggccgggcacgcgcagctctgcctgtagcaggagccctgaggaggaggaggaagaggatgtgctgaaatacgtccgggagatctttttcagctagggcataaactgtgcactgaactgtctgccgagagcagctggaggacagctgagcttccactggtgctgctgggccgcccgcctgtgggaatggggctctctgtgctcctacctttgtgccttcttgggcctggcagattcacctcaggccagaagcccctggacactccgggccttggggctgccgttctgagtgtgcggaaggcaggactcaaaatgagatcccatttgactccctctgtatgtactgtgccctctcctggctcttgaggctctggagtcccaattgtctgtgttagtcagtgaccaggttccagggaaaatgatgtcatgtggtggtccaacttactggaaccaaagagacagtactttgcaaagaaaaggatcactgccaggtgcactggaattgctacagtttagtccgcatgatctctcctgaaggaggaagcctgtttcaaaaatagtttccatcatgagtctatcaatgagctcccacctctccagccagcctagaaagcaaacgagctgcccacagttctctgccctgtctgggaggttgaggccacagtgtatagactggtaagccagacaggcctcctcccgcaagctgctaccttgctttcacctgtaccttggtccccgggcagctagctataaagcaagagggacaggagcccagaagagacactgaggacaagagatcacaccagagtacatgtctctgcctctgttttcagtgtggctttggacaggaatatatgaataaatcactgccatacaggttttccaatacacaagtgctagaaaatacacacaattccccaatgcgtaagttgtgctaatgtctttccaagttctgggttgggaagtggagggtggcagcgtttgtttgtgcgcaaccgtccagtcctgttcacagcgaggatttggagtcctccagggtctcatcatgggagtgatttgtcagcggacgcctctgccctgtctggcttcaggtccagggaagctttgaagcagtcaaagccttgtctttgtaccccatgtgtcctgtctttgttgagtcactcagagatcactcctggacctctggggttggagttccagtgatggcttatggcggcccactcactatggtgggctgagtggaagctccttaaccatgtccccagagacactgaggtgctcgctcttttaatgtcctcgtttgttgccgtaagttctttgctaggtttcattttggcatttggcaaatcagcctggaagtctggccccatgacagcaatcactccctccccaccctcctgaagctagaggaagatttgctcagatccattaataaagcaggaattggtgttgacaatgagctgcatggtttagggagtctttgggagccttggaagtcctgaaggacagacaat

SEQ ID NO: 2599 - DNA, 2469 bp, Homo sapiens
  SITE (779): n equals a,t,g, or c
  SITE (788): n equals a,t,g, or c
  SITE (789): n equals a,t,g, or c
  SITE (792): n equals a,t,g, or c
  SITE (1020): n equals a,t,g, or c
  SITE (1022): n equals a,t,g, or c
  SITE (1027): n equals a,t,g, or c
ggcacgagcaggaccggcagccggcaagatgcgaccgccctgcccagcatgtcctcaactttctgggcgttcatgatcctggccagcctgctcatcgcctactgcagtcagctggccgccggcacctgtgagattgtgaccttggaccgggacagcagccagcctcggaggacgatcgcccggcagaccgcccgctgtgcgtgtagaaaggggcagatcgccggcaccacgagagcccggcccgcctgtgtggacgcaagaatcatcaagaccaagcagtggtgtgacatgcttccgtgtctggagggggaaggctgcgacttgttaatcaaccggtcaggctggacgtgcacgcagcccggcgggaggataaagaccaccacggtctcctgacaaacacagcccctgaggggccccgggagtggccttggctccctggatagcccacgtctcagccacagttctccactcgcctcggacttcacccgttctctgccgcccgcccactccgtttccctgtggtccgtgaaggacggcctcaggccttggcatcctgagcttcggtctgtccagccgacccgaggaggcggactcagacacataggcggggggcggcacctggcatcagcaatacgcagtctgtgggagcccggccgcgcccagcccccgccgaccgtggcgttggccctgctgtcctcagaggaggaggaggaggaggcagctccggcagccacagaaggctgcagcccagcccgcctgagacacgacgcctgccccangggactgtnntgnacagaagcggcctcctcccgtgccccagactgtccgaattgcttttattttcttatactttcagtatactccatagaccaaagagcaaaatctatctgaacctgggacgcatcctcactgtcagggtccctggggtcgcttgtgcgggcgggaaggcaatggtggcagaaacatgctggtggccccggcggagcggaaaaggcggccgtggtggaagcctccaccccntnatcancccgcacaccctctgaaggacgggcttcggctgcccggaagccgtggcacacctgcgggaggcagcgacggtccccacgcagaccccgggaacgcatgccgctttattcctctgtacttagatcaacttgaccgtactaaaatccctttctgttttaaccagttaaacatgcctcttctacagctccatttttgatagttggataatccagtatctgccaagagcatgttgggtctcccgtgactgctgcctcatcgataccccatttagctccagaaagcaaagaaaactcgagtaacacttgtttgaaagagatcattaaatgtattttgcaaagcctaaagtatatatttaacagtttttatatgttgtatatttgtagaaaatcctatttaacaattaacgtggcagtcccggccgtcctgagagtcgggccgagccccgtgtgtttctgaagactctgggggtgggacacggcggggaggtggtgccccgcggaccccggggtgccaggcacggaaggcgggactctgggagaagcgtgcggaggaccgtggcgtcggcgttccggatgtgtcggtcgtgcccggggaggccgggttcccctcgctgcgggccaggcttggctcctgattccctctctggtccctgtattggtcaacacttgagcgtacaatatcttgaacatgcttcttccaatgggttttgtttcccatttcctgcccctttcgccactcacggaccttgaggccagttgacggcccttctccccacgcctgtgtccccgcgttctgagaagtcctctgtcttcgtgtcactaggtccagaaagtcgcgccgggcagaggcgcaggcggggccggcagggccgaggaataagcgacaattctggtttttctcccctggccgtcgttcgccagcctccttcattttcctgagttcccgctgaagtatatactacctatgagtccaattaacatgagtattatgctagttctatcatactaaaaaaaacgtaaaaaaataactatatagaagctgttccagcaaccatagactgaagatacgaaagaaaatccatttatttaagacctgttccggtatccatgaggacataatttacctttcagtcaccacaaatttataggcatttgtatcctggactaaaaggagggggctgaggttgggtttgtcatcacagagggggtgggcctggaaagggtccttcccaagctgccccgggctccggcggcccgggccggcagcttctgccagccagcgttcctcacggcctccccctcgcctgtttcttttgaaagcaagtgtagacaccttcgagggcagagatcgggagatttaagatgttacagcatatttttttttcttgttttacagtattcaattttgtgttgattcagctaaattatgaaaaataaagaaaaa

SEQ ID NO: 2600 - DNA, 1464 bp, Homo sapiens
cattttgggaatctcccatgtcaacatcaagctgcgtgcccacgggcaggtagagcgccatcttaatgaggggctccaggtcagggaggcgtggcacagctggtgatcaaaggcgcccgggactcagagcgggagcccagcagggcctgagcagagcctccgctgaactgtggaccccagactccgagcccaccccaaggccgctggcactggtgttcaaaccctcaccacttggagccctggagctgctgtccccccaacccttggttccatatgccgcagacccatagccgcctgcaaggcagagaggacacaggagagccacccctgagtgccgaccttgggtggcggggcctgggtctctcgtcccacccggagggcacagacaccggcttgcttggcaggctgggcctctgtgtcacccactcctgggtgcgtgcagacccttcccctccaccccccaggtcttccaagctctgcttcctcagtttccaaaatggaaccacctcacctccgcagcacccgacttaccaggacgcatgcccctccctctgccctcatcaaacccacagacccggactccctttctgccaccccaggctggtccggccccaggtgtgggtccgctctctccactcccagggctccgcgcccaagtgagggggcccctgccggagcctcagacacactccagttcagggctgtggggggccttggccacatacctgtcccttggctatgagcaggctttgggggcccttccgcggcagccccgggggccgaggtagggtcgggggcttagaggctgggatggctcctggccccaccgccagggggcagcgcaggccgggctgggaggcggcggcggcggctcgggctggggggtcaggtggacgctgccctccggggctggtcgcgcatccctcagtccctcggccacccgggggtcgctccctcgtgcccaccgcacctgccgagcctctttggacccagatctgttcatgcttttgtcttcgtcactgcggcggggccctttgatgtcttcatctgtatgggggtggaaaaatcaccgggaatcccccttcagttctttgaaaaagttccatgactcgaatatctgaaatgaagaaaacaaaccgactcacaaaaaaaaaaaaaaaaaaaaaaaaaaaaaaaaaaaaaaaaaaaaaaaaaaaagggcggccgttagaggatccaagcttacgtacgcgtgcatgcgacgtcatagctcttctatagggtcacctaaattcaattcactggccgtcgttttacaacgtcgtgactgggaaaaccctggcgttacccaacttaatcgccttgcagcacatccccctttcgccagctggcgtaatagccaaaaaggcccgaccgaatcggcccttccaaacagttgcccaaccctgaatgggccaaaatggggaacgccgcccttgtaacggg

SEQ ID NO: 2601 - DNA, 1122 bp, Homo sapiens
ggcacgagtccaggccggagccaggggccccactgttgggatgctggctgcagtggggcgccccaagcccaggtcccctctgtcttctctttcgactttgcagctgtacttgttttgctcctctacccgcaggagctgacatggacccaaatcctcgggccgccctggagcgccagcagctccgccttcgggagcggcaaaaattcttcgaggacattttacagccagagacagagtttgtctttcctctgtcccatctgcatctcgagtcgcagagaccccccataggtagtatctcatccatggaagtgaatgtggacacactggagcaagtagaacttattgaccttggggacccggatgcagcagatgtgttcttgccttgcgaagatcctccaccaaccccccagtcgtctggggtggacaaccatttggaggagctgagcctgccggtgcctacatcagacaggaccacatctaggacctcctcctcctcctcctccgactcctccaccaacctgcatagcccaaatccaagtgatgatggagcagatacgcccttggcacagtcggatgaagaggaggaaaggggtgatggaggggcagagcctggagcctgcagctagcagtgggcccctgcctacagactgaccacgctggctattctccacatgagaccacaggcccagccagagcctgtcgggagaagaccagactctttacttgcagtaggcaccagaggtgggaaggatggtgggattgtgtacctttctaagaattaaccctctcctgctttactgctaattttttcctgctgcaaccctcccaccagtttttggcttactcctgagatatgatttgcaaatgaggagagagaagatgaggttggacaagatgccactgcttttcttagcactcttccctcccctaaaccatcccgtagtcttctaatacagtctctcagacaagtgtctctagatggatgtgaactccttaactcatcaagtaaggtggtactcaagccatgctgcctccttacatcctttttggaacagagcacggtataaataataaactaataataatatgccaaaaaaaaaaaaaaaaaaaaaaaaaaaaaaa

SEQ ID NO: 2602 - DNA, 3357 bp, Homo sapiens
caccagcagtagtagcagaagcgaagagcgcaaacgcaaccgctctccccgcgcgttggccgattcattaatgcagctggcacgacaggtttcccgactggaaagcgggcagtgagcgcaacgcaattaatgtgagttagctcactcattaggcaccccaggctttacactttatgcttccggctcgtatgttgtgtggaattgtgagcggataacaatttcacacaggaaacagctatgaccatgattacgccaagctcgaaattaaccctcactaaagggaacaaaagctggagctccaccgcggtggcggccgctctagaactagtggatcccccgggctgcaggaattcggcacgagaggcagcggcagctccactcagccagtacccagatacgctgggaaccttccccagccatggcttccctggggcagatcctcttctggagcataattagcatcatcattattctggctggagcaattgcactcatcattggctttggtatttcagggagacactccatcacagtcactactgtcgcctcagctgggaacattggggaggatggaatcctgagctgcacttttgaacctgacatcaaactttctgatatcgtgatacaatggctgaaggaaggtgttttaggcttggtccatgagttcaaagaaggcaaagatgagctgtcggagcaggatgaaatgttcagaggccggacagcagtgtttgctgatcaagtgatagttggcaatgcctctttgcggctgaaaaacgtgcaactcacagatgctggcacctacaaatgttatatcatcacttctaaaggcaaggggaatgctaaccttgagtataaaactggagccttcagcatgccggaagtgaatgtggactataatgccagctcagagaccttgcggtgtgaggctccccgatggttcccccagcccacagtggtctgggcatcccaagttgaccagggagccaacttctcggaagtctccaataccagctttgagctgaactctgagaatgtgaccatgaaggttgtgtctgtgctctacaatgttacgatcaacaacacatactcctgtatgattgaaaatgacattgccaaagcaacaggggatatcaaagtgacagaatcggagatcaaaaggcggagtcacctacagctgctaaactcaaaggcttctctgtgtgtctcttctttctttgccatcagctgggcacttctgcctctcagcccttacctgatgctaaaataatgtgccttggccacaaaaaagcatgcaaagtcattgttacaacagggatctacagaactatttcaccaccagatatgacctagttttatatttctgggaggaaatgaattcatatctagaagtctggagtgagcaaacaagagcaagaaacaaaaagaagccaaaagcagaaggctccaatatgaacaagataaatctatcttcaaagacatattagaagttgggaaaataattcatgtgaactagacaagtgtgttaagagtgataagtaaaatgcacgtggagacaagtgcatccccagatctcagggacctccccctgcctgtcacctggggagtgagaggacaggatagtgcatgttctttgtctctgaatttttagttatatgtgctgtaatgttgctctgaggaagcccctggaaagtctatcccaacatatccacatcttatattccacaaattaagctgtagtatgtaccctaagacgctgctaatcgactgccacttcgcaactcaggggcggctgcattttagtaatgggtcaaatgattcactttttatgatgcttccaaaggtgccttggcttctcttcccaactgacaaatgccaaagttgagaaaaatgatcataattttagcataaacagagcagtcggcgacaccgattttataaataaactgagcaccttctttttaaacaaacaaatgcgggtttatttctcagatgatgttcatccgtgaatggtccagggaaggacctttcaccttgactatatggcattatgtcatcacaagctctgaggcttctcctttccatcctgcgtggacagctaagacctcagttttcaatagcatctagagcagtgggactcagctggggtgatttcgccccccatctccgggggaatgtctgaagacaattttggttacctcaatgagggagtggaggaggatacagtgctactaccaactagtggataaaggccagggatgctgctcaacctcctaccatgtacaggacgtctccccattacaactacccaatccgaagtgtcaactgtgtcaggactaagaaaccctggttttgagtagaaaagggcctggaaagaggggagccaacaaatctgtctgcttcctcacattagtcattggcaaataagcattctgtctctttggctgctgcctcagcacagagagccagaactctatcgggcaccaggataacatctctcagtgaacagagttgacaaggcctatgggaaatgcctgatgggattatcttcagcttgttgagcttctaagtttctttcccttcattctaccctgcaagccaagttctgtaagagaaatgcctgagttctagctcaggttttcttactctgaatttagatctccagacccttcctggccacaattcaaattaaggcaacaaacatataccttccatgaagcacacacagacttttgaaagcaaggacaatgactgcttgaattgaggccttgaggaatgaagctttgaaggaaaagaatactttgtttccagcccccttcccacactcttcatgtgttaaccactgccttcctggaccttggagccacggtgactgtattacatgttgttatagaaaactgattttagagttctgatcgttcaagagaatgattaaatatacatttcctaaaaaaaaaaaaaaaaaactcgagggggggcccggtacccaattcgccctatagtgagtcgtattacaattcactggccgtcgttttacaacgtcgtgactgggaaaaccctggcgttacccaacttaatcgccttgcagcacatccccctttcgccagctggcgtaatagcgaagaggcccgcaccgatcgcccttcccaacakttgcgcagcctgaatggcgaatggcaaattgtaagcgttaatattttgttaaaattcgcgttaaatttttgttaaatcagctcattttttaaccaataggccgaaatcggcaaaatcccttataaatcaaaagaatagaccgagatagggttgagtgttgttccagtttggaacaagagtccactattaaagtgttcaccgcggtga

SEQ ID NO: 2603 - DNA, 2443 bp, Homo sapiens
  SITE (41): n equals a,t,g, or c
  SITE (77): n equals a,t,g, or c
  SITE (2326): n equals a,t,g, or c
  SITE (2348): n equals a,t,g, or c
  SITE (2375): n equals a,t,g, or c
  SITE (2434): n equals a,t,g, or c
ttatagtcctgtcgggtttcgccacctctgacttgagcgtngatttttgtgatgctcgtcaggggggcggagcctanggaaaaacgccagcaacgcggyctttttacggttcctggccttttgctggccttttgctcacatgttctttcctgcgttatcccctgattctgtggataaccgtattaccgcctttgagtgagctgataccgctcgccgcagccgaacgaccgagcgcagcgagtcagtgagcgaggaagcggaagagcgcccaatacgcaaaccgcctctccccgcgcgttggccgattcattaatgcagctggcacgacaggtttcccgactggaaagcgggcagtgagcgcaacgcaattaatgtgagttagctcactcattaggcaccccaggctttacactttatgcttccggctcgtatgttgtgtggaattgtgagcggataacaatttcacacaggaaacagctatgaccatgattacgccaagctcgaaattaaccctcactaaagggaacaaaagctggagctccaccgcggtggcggccgctctagaactagtggatcccccgggctgcaggaattcggcacgagtttgtatttatattgaatgcatcccttccttaccatatgttagcaacctgtgcagaagccctacccagacctaactgggaactggctctgtatatcatcatctcaggaataatgagtgcactgtttcttttggtcattggaacagcctatttggaagctcaaggaatatgggagccatttcgaaggcggctatcctttgaggcctcgaacccgcccttcgatgtgggaaggccatttgatctcaggagaatcgttggtatttcatctgaaggaaacttgaacacactcagctgtgaccccggtcacagtagggggttctgtggagcaggcggttcatcatcccgacccagtgccgggagtcataagcagtgtggcccatcggtccacccacacagcagtcacagcaatagaaactcagctgacgtggaaaacgtcagagccaaaaacagttcaagtacctctagtaggacttctgctcaagcagcttcttcacagtctgctaacaaaacaagcccccttgtcttagattcgaacacagtgactcaaggtcatacagcgggcagaaagtccaaaggggcaaagcagagccagcacggcagccagcaccatgcccacagcccgctggagcagcaccctcagcctcctctgccaccgccagtgcctcagccccaggagcygcagcctgaaaggctgtctcccgcccccctcgcacacccttcccacccagaacgtgccagcagcgcgaggcacagttccgaggactcggacatcaccagtctcatagaagccatggacaaagacttcgaccaccatgactccccagccctagaagtgtttacagagcagcctccatcgccattgccaaaaagcaaagggaaaggaaaacctcttcagcgcaaggtgaaaccacctaagaagcaagaggaaaaggagaagaagggaaagggaaagccacaggaagatgagctgaaggactctttggctgatgatgatagctcctccaccaccacagagacctccaaccctgacacagaaccgctcctcaaggaggatacagaaaagcaaaagggaaaacaagccatgcctgaaaaacatgaaagtgaaatgtctcaagtgaagcaaaaaagcaaaaaactcttaaatattaagaaagaaatcccaacagatgtgaaacccagttcattagaactaccatatactccccctttggaaagtaagcaacgtagaaatctcccaagcaagattcctcttccaactgcaatgacaagtggatccaaatcacgaaatgcccagaaaacaaaaggtacaagtaagttagtggataacagaccacctgccctagcaaaattcctcccgaatagtcaagaattaggcaacaccagtagctcagagggtgaaaaagactctcctccaccggagtgggattccgttccagttcacaaacctggcagctctactgatagtctttataaactttctctgcaaaccctcaacgcagacattttcttaaaacaacgccagacctcaccgacacctgcttccccgtctcccccagctgccccctgcccctttgtggcccggggcagctacagcagcatcgtcaacagcagctccagcagtgaccctaaaataaaacagccaaatggaagcaaacacaagttgacaaaggcagcctcgctyccgggcaagaacggcaaccccayttttgctgcartcacggctnggctacgacaagagcccaggtngggaatggctttgcttaaagtttcttncaaacaaaacaggtttyttcmagcagccttkgggwwtttmacagsttctgkttgacagnggtgggttt

SEQ ID NO: 2604 - DNA, 1599 bp, Homo sapiens
tcccgggtcgacccacgcgtccggcgaggctgggttacgtgaggaagctgggggtttcgcgggcagctttagagccccagtcagggaaaccgaggccgggcttcctggctgcctcgcgagcctcttcatggctctcgccgccgccctgaggtgcctagaatgggttccggcctccggggaggttcccagtaaccgcaggagccaccattgatttggcgtctgctgggtgcaaagcccagcgcgctaaccctttactcgcgacctttcgcttcaccttcacagcagccctgcgaggagagttgtggactggggcaacctttgccagtgatgagaagtgatgctcgtggcagtgctgaatctctctgaatatgattcgaattgcagccttaaatgccagctccaccattgaggatgatcatgaaggaagctttaaaagtcacaaaacccagacaaaggaggctcaggaagcagaggcttttgcattgtaccacaaggcccttgatctgcagaaacatgaccggtttgaggagtctgccaaagcctaccatgagctcttggaggcgagcctgctgcgggaggcagtttcatccggtgatgagaaagaggggttgaaacaccctgggctgatactgaaatattccacttataagaacttggcccagctggcagcccagcgggaggatctggagacagccatggagttctacttagaggcagtgatgctggactccacagatgtcaacctctggtataagattggacatgtggccctgaggctcatccggatccccctggctcgccatgcttttgaggaagggctgcggtgcaatcctgaccactggccctgtttggataacctaatcactgtcctgtacaccctcagtgattacacaacatgtctgtacttcatctgcaaagctttggagaaggattgccggtacagcaaagggctggtcctcaaggagaagatttttgaggagcagccttgtctccggaaggactctctcagaatgttcctcaaatgtgacatgtcgattcacgatgtttcggtgagtgcagctgagacacaggcgattgtagatgaggccttggggctgcgaaaaaagaggcaagcgctgattgtgcgggagaaggagccggacctgaaacttgtgcagccccattccttcctttcttcacctggaagtgcctcggagagagcttgctggccatgtacaatcatctcaccacctgtgagcccccacgtcccagccttggcaaaaggattgatttgtcggactaccaggaccccagccagcctcttgagtcctccatggtggtgacgccagttaacgtgatccagccaagcactgtcagcaccaacccagctgtggctgtcgccgagcctgtggtctcctacacctctgtggctacaaccagcttcccactgcacagtcctggtctgttggagacaggcgctcctgtgggtgatatttctgggggagataaatccaagaaaggggtaaaacggaagaagatttcagaagagagtggagaaacagcaaagcggcggtctgcccgtgtccgaaacaccaagtgcaaaaaaaaaaaaaaagggcg

SEQ ID NO: 2605 - DNA, 2175 bp, Homo sapiens
acgcgtccgcctactgataacttggtacccactattttggataaagctcataaatataacctaaaggttacttttcacatagaaccatatagcaatcgagatgatcaaaacatgtacaaaaatgtcaagtatattatagacaaatatggaaatcatccggccttttacaggtacaagacgaagactggcaatgctcttcctatgttttatgtctatgattcctatattaccaagcctgaaaaatgggccaatctgttaaccacctcagggtctcggagtattcgcaattctccttatgatggactgtttattgcccttctggtagaagaaaaacataagtatgatattcttcaaagtggttttgatggaatttacacataattttgccacaaatggctttacttatggctcatcacatcagaattgggctagcctaaaattattttgtgataaatacaacttaatatttatcccaagtgtgggcccaggatacatagataccagcatccgtccatggaacacgcaaaacactcggaaccgaatcaatgggaagtattatgaaattggtctgagtgccgcacttcagacacgccccagcttaatttctatcacctcttttaatgagtggcatgaaggaactcagattgaaaaagctgttcccaaaagaaccagtaatacagtgtacctagattaccgtcctcataaaccaggtctttacctagaactgactcgcaagtggtctgaaaaatacagtaaggaaagagcaacttatgcattagatcgccagctgcctgtttcttaatgcattgattaaagtttaatagttatcaaaatcacctaatttttaaaaatagctttcgttttgagttctggaaagaaaactgtcaaaatcagtatatactattagttatatttaaaaatatttttttaaattctttacagataatattatacttgttacccttcacaataccacatgagaaaatatctgagacaaaatgtatacaaatatattccttatggcataatttattgcatttctgactgaaatcaaaattctgatttgatggcaattgaattttcattttacaatagataaatgcttgtgctacctaaagcacttagcacacagttaaattatatttacatcctagacccaaataaataggattgtgtgtatatttgggatatctattgaagaaaaaaagaaaaccccttaaagataatgtacatgcttcatgtcatgtctttaaaataatttaatcaactttattgtcttagtatttagactctggataactctacaataatgaggaaattcttaagaataacaaaatcactgtaccttcctctcaattttgctgtgaacctgaaatggctttaaattaatactcttattttttatttaatttaattacataaattaaaccttaccatgaccaaattgtgttaggacggcctgctatctacagcacagtgtgtcatttgcagatttgtggttacctataccacgctaggtgttttgacatgttttagtgttttctgctttacagtgctgaaattccatatttttagaaagctatgaaagtccttttatgaaaaagttactgattgcttctcagttattaggaaaacagttgtttccccattattatgtagatatgatgccccaatatcatttttagtatatcttgtcgatctttaagttgttactattgtgttattcatgtctttaaatcagataccaaatattttttaggaaagaaaaatgttattactgtcattaggttgtcttttaatactttaagttattttgacgaaaagtaatagagaaaatttacttagcattttagattctagagacatggaaatgaaaattattttatgtctagagtaggtcctgaagtttggctttacattaagtttagcactgtatcagaatgaagaaactaatattttacataaaaactaatactttcaattttttatatagtaatatccccattttgtaaatgttagacttttatcatacctgtaagttaaaatacttgttatcaataacttgtcatgttgtgacaaattgatcacttgtgtacgaaaaataaatctccttaaaaactaaataaaatgcactgtattcttaaaaaaaaaaaaaaaaaaaaaaaaaaaaaaaaa

SEQ ID NO: 2606 - DNA, 1603 bp, Homo sapiens
ggcacgagcggcacgagcagccttcctcccccagcctgagtgactactctattccttggtccctgctattgtcggggacgattgcatgggctacgccaggaaagtaggctgggtgaccgcaggcctggtgattggggctggcgcctgctattgcatttatagactgactaggggaagaaaacagaacaaggaaaaaatggctgagggtggatctggggatgtggatgatgctggggactgttctggggccaggtataatgactggtctgatgatgatgatgacagcaatgagagcaagagtatagtatggtacccaccttgggctcggattgggactgaagctggaaccagagctagggccagggcaagggccagggctacccgggcacgtcgggctgtccagaaacgggcttcccccaattcagatgataccgttttgtcccctcaagagctacaaaaggttctttgcttggttgagatgtctgaaaagccttatattcttgaagcagctttaattgctctgggtaacaatgctgcttatgcatttaacagagatattattcgtgatctgggtggtctcccaattgtcgcaaagattctcaatactcgggatcccatagttaaggaaaaggctttaattgtcctgaataacttgagtgtgaatgctgaaaatcagcgcaggcttaaagtatacatgaatcaagtgtgtgatgacacaatcacttctcgcttgaactcatctgtgcagcttgctggactgagattgcttacaaatatgactgttactaatgagtatcagcacatgcttgctaattccatttctgacttttttcgtttattttcagcgggaaatgaagaaaccaaacttcaggttctgaaactccttttgaatttggctgaaaatccagccatgactagggaactgctcagggcccaagtaccatcttcactgggctccctctttaataagaaggagaacaaagaagttattcttaaacttctggtcatatttgagaacataaatgataatttcaaatgggaagaaaatgaacctactcagaatcaattcggtgaaggttcactttttttctttttaaaagaatttcaagtgtgtgctgataaggttctgggaatagaaagtcaccatgattttttggtgaaagtaaaagttggaaaattcatggccaaacttgctgaacatatgttcccaaagagccaggaataacaccttgattttgtaatttagaagcaacacacattgtaaactattcattttctccaccttgtttatatggtaaaggaatcctttcagctgccagttttgaataatgaatatcatattgtatcatcaatgctgatatttaactgagttggtctttaggtttaagatggataaatgaatatcactacttgttctgaaaacatgtttgttgctttttatctcgctgcctagattgaaatattttgctatttcttctgcataagtgacagtgaaccaattcatcatgagtaagctcccttctgtcattttcattgatttaatttgtgtgtcatcaataaaattgtatgttaatgctggaaagaaaaaaaaaaaaaaaaaaaa

SEQ ID NO: 2607 - DNA, 1177 bp, Homo sapiens
  SITE (1071): n equals a,t,g, or c
  SITE (1164): n equals a,t,g, or c
gaattcggcacgaggttcggcgaagatagggaataaggaagcacaggagtaggggagaaggaagcacaggagtaggggagatatacagcggtcaggataagggggaaagggcggtggttgcgcaagaggtgaaacaagatgtgagagacaaggggtagggaagaaatggggcagcggttaggttcagaagcgcatagaccgtggcggacgggcaatgcgaggggcacagaaaggaactgaggggtgggctatttaaggagatggtcctcagccctctcttttctgcgtaggtctcctcctccaggccgcgcgcggatatgtcgtccggaaaccagcccagtctaggctggatgatgacccacctccttctacgctgctcaaagactaccagaatgtccctggaattgagaaggttgatgatgtcgtgaaaagactcttgtctttggaaatggccaacaagaaggagatgctaaaaatcaagcaagaacagtttatgaagaagattgttgcaaacccagaggacaccagatccctggaggctcgaattattgccttgtctgtcaagatccgcagttatgaagaacacttggagaaacatcgaaaggacaaagcccacaaacgctatctgctaatgagcattgaccagaggaaaaagatgctcaaaaacctccgtaacaccaactatgatgtctttgagaagatatgctgggggctgggaattgagtacaccttcccccctctgtattaccgaagagcccaccgccgattcgtgaccaagaaggctctgtgcattcgggttttccaggagactcaaaagctgaagaagcgaagaagagccttaaaggctgcagcagcagcccaaaaacaagcaaagcggaggaacccagacagccctgccaaagccataccaaagacactcaaagacagccaataaattctgttcaatcatttctttctgtcttgaagaatgataggagagatgatggggctctttttggcctgaagaggagaaggaatttattctttcattcagctytgagatcccagagktttctgaggcaragtccctgnctyacccaccagaggatacacacttatgacatgcctcccacacattcatacaaacaagtacctgttcatccaggtggtgtgtgttcagtgggnggcaagacagagc

SEQ ID NO: 2608 - protein, 17 aa, Homo sapiens
QTHYYDLPKDSLQVVNH

SEQ ID NO: 2609 - protein, 40 aa, Homo sapiens
MRMKTRTKTLRKAQMLFRLLTLRMDLLVLLLPRLDCPQTR

SEQ ID NO: 2610 - protein, 5 aa, Homo sapiens
MKAHH

SEQ ID NO: 2611 - protein, 36 aa, Homo sapiens
MMFSLLLTTCLSRKACGVRMMWPISMWKQRKETDIA

SEQ ID NO: 2612 - protein, 36 aa, Homo sapiens; identical to SEQ ID NO: 2611

SEQ ID NO: 2613 - protein, 32 aa, Homo sapiens
MPAWKCPCIRGLLHSLLLREASASAQGVCAAL

SEQ ID NO: 2614 - protein, 112 aa, Homo sapiens
  SITE (27): Xaa equals any of the naturally occurring L-amino acids
MPLFLSIPSLFLTLSGLGLAVQSPAGXCWGLSLCRHCVFLRGCPQNTPPAPWGSSGSHFSWSLRSQKQLLQEAKKRLGWLLVLMMAFILLGHFGYIHGHCFHLSFLPVPPLP

SEQ ID NO: 2615 - protein, 40 aa, Homo sapiens
MQKFIQAMLRKLLLMQMMCDWQSSAALISLLPLLPQEIFY

SEQ ID NO: 2616 - protein, 40 aa, Homo sapiens
MCFNFKYFFLCGKCHVTIALPSVWTVLVLVLSVYQKSGCL

SEQ ID NO: 2617 - protein, 246 aa, Homo sapiens
MQPSWLTRCPTWPWPMGAAWPRRARSWWIRTSTASSPSPSSSITLLWTPCMWAESWACCSSPTYTRTGKCSTNRTPRWPPALTSMPRTSTFQQWAFITYVLVAGLALGTQDRFSPDLLGLQASSALAWLTLEVLAILLSLYLVTVNTDLTTIDLVAFLGYKYVGMIGGVLMGLLFGKIGYYLVLGWCCVAIFVFMIRTLRLKILADAAAEGVPVRGARNQLRMYLTMAVAAAQPMLMYWLTFHLVR

SEQ ID NO: 2618 - protein, 27 aa, Homo sapiens
  SITE (8): Xaa equals any of the naturally occurring L-amino acids
VFWPTSEXLLNCMVWGREGNLKSRPNK

SEQ ID NO: 2619 - protein, 111 aa, Homo sapiens
MTESFYPLNQRKQNENPSAVLMHLFLFSVTMQQVARTVAKVELSDHVCDVVFALFDCDGNGELSNKEFVSIMKQRLMRGLEKPKDMGFTRLMQAMWKCAQETAWDFALPKQ

SEQ ID NO: 2620 - protein, 47 aa, Homo sapiens
MTPPHVLLKGVLVVSRVCVSLLCCPPGCSVCCPLPPGGSPCFSPIYS

SEQ ID NO: 2621 - protein, 48 aa, Homo sapiens [sequence omitted]

SEQ ID NO: 2622 - protein, 25 aa, Homo sapiens
MVCIFKTEDVLPFLLLFFLFSFFFF

SEQ ID NO: 2623 - protein, 104 aa, Homo sapiens
MVAGTPCFLPLLSACVTHINGNNFFQLLAEVGEAGSLHREGLSSLLLPASFCFGCREWFIHTLIPSPPLVDGGLAFSIPVFWCLPLSATLNHLSWSCCVMGTCL

SEQ ID NO: 2624 - protein, 19 aa, Homo sapiens
VCLLCIPGAQNRAWHIVGA

SEQ ID NO: 2625 - protein, 83 aa, Homo sapiens [sequence omitted]

SEQ ID NO: 2626 - protein, 104 aa, Homo sapiens [sequence omitted]

SEQ ID NO: 2627 - protein, 59 aa, Homo sapiens
LLGTWLCPQLPPGLGAHHAPSSFSSYLCPVSPSIRLSDGTLWERLWPWSGGREQGGRHK

SEQ ID NO: 2628 - protein, 36 aa, Homo sapiens
  SITE (9): Xaa equals any of the naturally occurring L-amino acids
MGVFFILRXLTSQCFLSWFLGFVSAESFEQWSISGS

SEQ ID NO: 2629 - protein, 29 aa, Homo sapiens
  SITE (6): Xaa equals any of the naturally occurring L-amino acids
MCCHIXQIATVLLLSLCWLCATLMVPRNR

SEQ ID NO: 2630 - protein, 51 aa, Homo sapiens
MPWFVPLVSWEELAPAQLSCHWPFRVGLGPECLLVASHGGLMAQPSPKRAQ

SEQ ID NO: 2631 - protein, 27 aa, Homo sapiens
MALAGFFLPWTHCCRLSLKFLCGVTRS

SEQ ID NO: 2632 - protein, 15 aa, Homo sapiens
MLIVLLINLSSEPSC

SEQ ID NO: 2633 - protein, 3 aa, Homo sapiens
MST

SEQ ID NO: 2634 - protein, 32 aa, Homo sapiens [sequence omitted]

SEQ ID NO: 2635 - protein, 39 aa, Homo sapiens
MFQLCLEIFQFFVSVFISFLESLAEFQETVAHLLVMKCF

SEQ ID NO: 2636 - protein, 126 aa, Homo sapiens
MERLGVLWTLLVSRWFICLFVDILPVETVLRIWDCLFNEGSKIIFRVALTLIKQHQELILEATSVPDICDKFKQITKGSFVMECHTFMQVCGAARGSVPSQGAPPHLQPGGCSDHPEGAQDGHQWA

SEQ ID NO: 2637 - protein, 35 aa, Homo sapiens
MKLSCCFFGALEWTFLAAVTLGPLPSRVLLCHRGC

SEQ ID NO: 2638 - protein, 31 aa, Homo sapiens
MLLCVLIVHCFLFLNSLALYGCPTVVYPLAS

SEQ ID NO: 2639 - protein, 15 aa, Homo sapiens
MNSGGSGWCGPSSSS

SEQ ID NO: 2640 - protein, 32 aa, Homo sapiens
MLSLALLWPIFILFTVQCHLFGNTQHQRVLPN

SEQ ID NO: 2641 - protein, 32 aa, Homo sapiens; identical to SEQ ID NO: 2640

SEQ ID NO: 2642 - protein, 46 aa, Homo sapiens
MNFFLGLWLLYILYILRILYTILIYCNTAVFDNLDSIWYMNFCIHY

SEQ ID NO: 2643 - protein, 66 aa, Homo sapiens
  SITE (61): Xaa equals any of the naturally occurring L-amino acids
MKRTLLSSVICLSASPAQGQAPWQCPAVTGDSAEVTYPEKPLHGLSRREKTALPGPWFGLXRGKGP

SEQ ID NO: 2644 - protein, 38 aa, Homo sapiens
MILSVLRNTGLCTSLFMGLWILFILRPVYNCFLPKGIV

SEQ ID NO: 2645 - protein, 57 aa, Homo sapiens [sequence omitted]

SEQ ID NO: 2646 - protein, 55 aa, Homo sapiens
MESLGPDIWLISGIASSPSFLHVLVVVVVGECGWGMSWLMPAKISSHPPCLSSLF

SEQ ID NO: 2647 - protein, 27 aa, Homo sapiens
MGALVELLYIFPFLLPSFLSEKLLEKK

SEQ ID NO: 2648 - protein, 36 aa, Homo sapiens
MPAGVGWWVCLHVRVCLGSFKGERGTHHHAGSALKR

SEQ ID NO: 2649 - protein, 34 aa, Homo sapiens
MLCLIAILLYVLVQYLVNPGVLRTDPRYEAAPGP

SEQ ID NO: 2650 - protein, 45 aa, Homo sapiens
MCILCYTQGPKFLQLFIHAIVLLFAEMEIIYTELQIPEMFHLYLI

SEQ ID NO: 2651 - protein, 23 aa, Homo sapiens
CLQWFVPLVPQQIPELILMTIWK

SEQ ID NO: 2652 - protein, 123 aa, Homo sapiens
MVWQPFFYLFNQEDAGELCCLSCWLVAALCPGVCMWVYLELLSLPSHCKLHPDETAVVLGLFHLSLPVPASSWLSCAWDMGLPICVFSKSGADQEHTKVWSCIITNIHSSGTFLRYIYKSFQQ

SEQ ID NO: 2653 - protein, 123 aa, Homo sapiens; identical to SEQ ID NO: 2652

SEQ ID NO: 2654 - protein, 87 aa, Homo sapiens [sequence omitted]

SEQ ID NO: 2655 - protein, 31 aa, Homo sapiens
MLVFVLLWISHLFSGRSEHCSLVQSSYFPSS

SEQ ID NO: 2656 - protein, 41 aa, Homo sapiens [sequence omitted]

SEQ ID NO: 2657 - protein, 35 aa, Homo sapiens
MTIICLLFLTLLLLLFKGIVQSSILYLWQQVKVSR

SEQ ID NO: 2658 - protein, 17 aa, Homo sapiens
LLCVLAGLTLLHHCQLA

SEQ ID NO: 2659 - protein, 58 aa, Homo sapiens
MQQKEPWAWSMQNWFLLQLLLLVGSGRKHIEFMIMVNLWRERGDQDEGASRRSCSSVH

SEQ ID NO: 2660 - protein, 19 aa, Homo sapiens
KFWFAFELFLFMWLLIISS

SEQ ID NO: 2661 - protein, 32 aa, Homo sapiens
MVLHFLDTILIFLIPPPTFQIASLMPQRLLCP

SEQ ID NO: 2662 - protein, 65 aa, Homo sapiens
  SITE (28): Xaa equals any of the naturally occurring L-amino acids
  SITE (42): Xaa equals any of the naturally occurring L-amino acids
MVPLLFLPLDSWLWREKKYHLLDADSEXIYSPLENSALPASXCHLAGAITESSKGHPIILLGQLL

SEQ ID NO: 2663 - protein, 18 aa, Homo sapiens
MEVFLYLGVVGFWHIGIS

SEQ ID NO: 2664 - protein, 30 aa, Homo sapiens
MNFQVWGTGQCTFLSLFILLFLKICNTYQR

SEQ ID NO: 2665 - protein, 32 aa, Homo sapiens
MISRGITIYLTVLLTYTVVLFYLFKSGFSAFH

SEQ ID NO: 2666 - protein, 32 aa, Homo sapiens
MALQAFSSLLLHILSTSTHYPVPKPLPHFQAL

SEQ ID NO: 2667 - protein, 37 aa, Homo sapiens
MVSVSRQTLVTFSLVYVPFLLLHIFGSKSYWLNQQGL

SEQ ID NO: 2668 - protein, 36 aa, Homo sapiens
MPGKLNPCLLWLLILMLFKKCKKASLVSKRSWIYIA

SEQ ID NO: 2669 - protein, 25 aa, Homo sapiens
MKKRLSPLSWARCCLCFWLQVGTTN

SEQ ID NO: 2670 - protein, 17 aa, Homo sapiens
MLSPGRCFAIWSLFLCS

SEQ ID NO: 2671 - protein, 65 aa, Homo sapiens
MPFWILPHVDCLCVCMFGVRMCETLLWFWESELYRTVYKMSLPHHPYSALLTLFFPPSSHSHSSF

SEQ ID NO: 2672 - protein, 9 aa, Homo sapiens
MFMMSVYIL

SEQ ID NO: 2673 - protein, 41 aa, Homo sapiens
MSMCKVRRGSLNYLLLFWLTSPIFKTLSNSQNLLMRHVVLN

SEQ ID NO: 2674 - protein, 66 aa, Homo sapiens
WLRFWCVFSSCSQLGLGLPKRWISVSTKIQQIITVSPFNPFRDKVRIIYNGTLALQGLFTWYLSYY

SEQ ID NO: 2675 - protein, 39 aa, Homo sapiens
MGASQCPFAAALRPLHFLLWVAALLGLQQPLQRLQLRNA

SEQ ID NO: 2676 - protein, 35 aa, Homo sapiens
MSIQIICCLWFFLYLITCQKPSLPLDFFILPSSEV

SEQ ID NO: 2677 - protein, 30 aa, Homo sapiens
MWQIAMITLWSLLVSGNHQLELRMLDTVPR

SEQ ID NO: 2678 - protein, 39 aa, Homo sapiens
MFQDILALCLWLLPGVWHHSVVTYNHCLGTHRVNCLSDK

SEQ ID NO: 2679 - protein, 33 aa, Homo sapiens [sequence omitted]

SEQ ID NO: 2680 - protein, 3 aa, Homo sapiens
MCA

SEQ ID NO: 2681 - protein, 33 aa, Homo sapiens
MIWSIVTCWICVCTGVFMQGRLNSQVRGESEPH

SEQ ID NO: 2682 - protein, 34 aa, Homo sapiens
MTVSFVMRFLALISNSFFLPLSLGATPDPCQVFL

SEQ ID NO: 2683 - protein, 33 aa, Homo sapiens
MSASILCSFVHSVFFISGCFSVVFRKMIITLFM

SEQ ID NO: 2684 - protein, 180 aa, Homo sapiens
MHQCEIWRELFSPLHALNFGIGGDGTQHVLWRLENGELEHIRPKIVVVWVGTNNHGHTAEQVTGGIKAIVQLVNERQPQARVVVLGLLPRGQHPNPLREKNRQVNELVRAALAGHPRAHFLDADPGFVHSDGTISHHDMYDYLHLSRLGYTPVCRALHSLLLRLLAQDQGQGAPLLEPAP

SEQ ID NO: 2685 - protein, 35 aa, Homo sapiens
MKMNKLFWIRILKLLLQALSQCKLLIKGKLQCPRI

SEQ ID NO: 2686 - protein, 39 aa, Homo sapiens
MAMGHLVFISGIIQLVKGMYLSAWYPLQKSWNLTWHNKP

SEQ ID NO: 2687 - protein, 5 aa, Homo sapiens
MWTCK

SEQ ID NO: 2688 - protein, 39 aa, Homo sapiens
MFRRGFGSFCFCFLKHVFHSHLGILEAGQLAGFLGCRET

SEQ ID NO: 2689 - protein, 31 aa, Homo sapiens
MPCPFAHLVLLVVTSLVTGKVSKDIGVEHPG

SEQ ID NO: 2690 - protein, 35 aa, Homo sapiens
MVKLLVKLTFIISPLIKSSDSGITSLSCSYQRAIF

SEQ ID NO: 2691 - protein, 17 aa, Homo sapiens
MQKLKGGISVFLAFLLM

SEQ ID NO: 2692 - protein, 37 aa, Homo sapiens
MILKQGLICTWQVLLLASALEMLVFICAMECLTQFQV

SEQ ID NO: 2693 - protein, 53 aa, Homo sapiens [sequence omitted]

SEQ ID NO: 2694 - protein, 31 aa, Homo sapiens
MTESLLYLQLILLWGISEIPSSNTEMYRKCP

SEQ ID NO: 2695 - protein, 16 aa, Homo sapiens
MQKGRAVCLSPDLAHG

SEQ ID NO: 2696 - protein, 16 aa, Homo sapiens
MQKGRAVCLSPDLAHG

SEQ ID NO: 2697 - protein, 61 aa, Homo sapiens
MRVLILNVSMFLRSLAYILWCSHWKWKNGIIYIIYINIYYTYSPYFISVTIPIEFDKNCYD

SEQ ID NO: 2698 - protein, 5 aa, Homo sapiens
MHIIQ

SEQ ID NO: 2699 - protein, 92 aa, Homo sapiens
  SITE (32): Xaa equals any of the naturally occurring L-amino acids
MHFLFGYYVFSLTSASPALWAAASTCSSDLDXPCWVLVHLLIWCFVCHQYLHCSWWDVSHHLLYLLPTRKIKRSYFFPLRSNFSLDSWYPQF

SEQ ID NO: 2700 - protein, 11 aa, Homo sapiens
MFVCLFLINNI

SEQ ID NO: 2701 - protein, 120 aa, Homo sapiens
VVFGASLFLLLSLTVFSIVSVTAYIALALLSVTISFRIYKGVIQAIQKSDEGHPFRAYLESEVAISEELVQKYSNSALGHVNCTIKELRRLFLVDDLVDSLKLSFHSSVFLLFMNGIRHR

SEQ ID NO: 2702 - protein, 44 aa, Homo sapiens
MDTWIFLLVTKIFKLFVYTHTHTHTHTHVSVPRNVYRGGQFSED

SEQ ID NO: 2703 - protein, 34 aa, Homo sapiens
  SITE (28): Xaa equals any of the naturally occurring L-amino acids
MIIWFLPFTLLVWFITFIDLFMLNHPCXPGINLT

SEQ ID NO: 2704 - protein, 5 aa, Homo sapiens
HACFL

SEQ ID NO: 2705 - protein, 32 aa, Homo sapiens
MFCGACQIGWNLWGLLWEMPREHRFRRWEQLV

SEQ ID NO: 2706 - protein, 23 aa, Homo sapiens
MSVQRWALKLTLILLVEKSLKAI

SEQ ID NO: 2707 - protein, 39 aa, Homo sapiens
  SITE (19): Xaa equals any of the naturally occurring L-amino acids
MLNNFLGINLQAWTSRLSXQFLLTFATYCYANFQKNCTQ

SEQ ID NO: 2708 - protein, 1 aa, Homo sapiens
M

SEQ ID NO: 2709 - protein, 49 aa, Homo sapiens
MAPKFFVSTGISPMAPIATAKPTAPPVLPASLPDRRCLQSHTQSSGHLP

SEQ ID NO: 2710 - protein, 72 aa, Homo sapiens
MWMSLVLHHSLPLGVTVALHCACFVAKNSGIPSGERSCFQGNRQAGSEVQEKATEAWKGSSCICASCARRTL

SEQ ID NO: 2711 - protein, 35 aa, Homo sapiens
MKTQNHCIFCIVILFSTSVPPLIWSWQCVSVHSLF

SEQ ID NO: 2712 - protein, 34 aa, Homo sapiens
MLKVCVCVCVCVCVCVSYPLKKGLYNKSASHWLL

SEQ ID NO: 2713 - protein, 5 aa, Homo sapiens
MNGLL

SEQ ID NO: 2714 - protein, 39 aa, Homo sapiens
MRSSGAWQAMVGVWILFLSAVESQGRVLAEQRCNLAWAL

SEQ ID NO: 2715 - protein, 26 aa, Homo sapiens
MYCISWEVYFMSFLAFFFPTATANEG

SEQ ID NO: 2716 - protein, 25 aa, Homo sapiens
MSLFFIWQLTKLLKAQPNCTFARTF

SEQ ID NO: 2717 - protein, 92 aa, Homo sapiens
  SITE (77): Xaa equals any of the naturally occurring L-amino acids
MAVLAGSLLGPTSRSAALLGGRWLQPRAWLGFPDAWGLPTPQQARGKARGNEYQPSNIKRKNKHGWVRRLSTPAGVXVILRRMLKGRKSLSH

SEQ ID NO: 2718 - protein, 35 aa, Homo sapiens
MIKLVHQIVILCVMRIVAGVILKCWYLDRTASPGF

SEQ ID NO: 2719 - protein, 72 aa, Homo sapiens
MLDVFLKSCFVSFLSLIVKLLNINRFAQPQRMRVDNTEEVMQKQKITLLIIDSITNKCLFLSLPPFLPLPSS

SEQ ID NO: 2720 - protein, 37 aa, Homo sapiens
MLLCTHTSLLLYFSFWMGLAKTGSGQRPPKLYVLPVS

SEQ ID NO: 2721 - protein, 17 aa, Homo sapiens
MPLGLPLSASGFSVGDL

SEQ ID NO: 2722 - protein, 66 aa, Homo sapiens [sequence omitted]

SEQ ID NO: 2723 - protein, 39 aa, Homo sapiens
MRFCCLILQILTRLVLTKYGRSGIRWKKEGSSCCCSYSC

SEQ ID NO: 2724 - protein, 34 aa, Homo sapiens
MWRWKAVTLMILTLSRSRLMCAFVSWFLTKKFKR

SEQ ID NO: 2725 - protein, 52 aa, Homo sapiens
MTASPDYLVVLFGITAGATGAKLGSDEKELILLFWKVVDLANKKVGQLHESS

SEQ ID NO: 2726 - protein, 45 aa, Homo sapiens
MRAAVQTCLPSQALASLTWQRLCPGLSPPRAMSLMAVLTERSQIV

SEQ ID NO: 2727 - protein, 35 aa, Homo sapiens
MLFMAHLLLRTHPLSLWVTSRQAKDWCFSFHPLEG

SEQ ID NO: 2728 - protein, 35 aa, Homo sapiens; identical to SEQ ID NO: 2727

SEQ ID NO: 2729 - protein, 70 aa, Homo sapiens
MSPSQSGVGISGLGLFLSKTPLFSLILKVIFLRTELLPKERDGFPRRHSWPSVDLSVHLLALLADSSGWA

SEQ ID NO: 2730 - protein, 102 aa, Homo sapiens
  SITE (72): Xaa equals any of the naturally occurring L-amino acids
MTGVQVQWTVIFLAPVIAVILCAMQTMLRSLWLMDLTLTVSQVVEERKQMKGKKKHGIQQKKTLELIVNMMXVARVGEKCSTCISKLNLMLQMKVLGKDING

SEQ ID NO: 2731 - protein, 36 aa, Homo sapiens
  SITE (16): Xaa equals any of the naturally occurring L-amino acids
MSHCWTLLALSLWGLXVSQGRETWWRWPHGLGPPCS

SEQ ID NO: 2732 - protein, 44 aa, Homo sapiens
LIGVFPPHLLSSLKCVPDAFICCFTSMFCFSSSLCSLPVYPLSL

SEQ ID NO: 2733 - protein, 10 aa, Homo sapiens
MIVTKMYFHV

SEQ ID NO: 2734 - protein, 16 aa, Homo sapiens
EKIDQQFTFAVCLVFV

SEQ ID NO: 2735 - protein, 12 aa, Homo sapiens
NWLDLFVLGFSS

SEQ ID NO: 2736 - protein, 53 aa, Homo sapiens
MGQRGVFLLILDAFSVPSTASCLITPLPPPHPQPSQFFLASALQPYLGKEEWV

SEQ ID NO: 2737 - protein, 53 aa, Homo sapiens; identical to SEQ ID NO: 2736

SEQ ID NO: 2738 - protein, 37 aa, Homo sapiens
MLQMCIYAQWYAYLCVTVSVASWLDPTISSEIMHPKG

SEQ ID NO: 2739 - protein, 17 aa, Homo sapiens
MLFFCQALFVLAVYYIF

SEQ ID NO: 2740 - protein, 38 aa, Homo sapiens
MRTALFPTECCLPMCVVLAVFYLPIVFSRIIESADSFD

SEQ ID NO: 2741 - protein, 56 aa, Homo sapiens
MFLASFSSPGFQLSFSSSSNMASAHKSLLCQDLMVLHLPEPSSASVPRPQLVRLTH

SEQ ID NO: 2742 - protein, 56 aa, Homo sapiens
GWFHLFWQEWEQEPGQNKLLEALVLGTAAGRVGTRQNCLQDESQERTLSPVSGVWL

SEQ ID NO: 2743 - protein, 33 aa, Homo sapiens
MVPRSVAFVKTLALLELGFALAVMQGCAEPISM

SEQ ID NO: 2744 - protein, 51 aa, Homo sapiens
AVVPTWCSTVLLTFVPTARLVAGLEDVQVYDGEDAVFSLDLSTIIQGTWFP

SEQ ID NO: 2745 - protein, 10 aa, Homo sapiens
MHLITVLLNV

SEQ ID NO: 2746 - protein, 25 aa, Homo sapiens
MFCLSFPISGAYLLIPAYFLEVVGK

SEQ ID NO: 2747 - protein, 97 aa, Homo sapiens
MEVVVTVTPKTCPLSSLLLFLLYFLVIGSVIHLTAGFRILVLGLVFLFFPYPPYPNCHQVLLHALMISHLSYPSSFQIGPSDFNLGHSHYLLYYGKI

SEQ ID NO: 2748 - protein, 334 aa, Homo sapiens
  SITE (290): Xaa equals any of the naturally occurring L-amino acids
  SITE (316): Xaa equals any of the naturally occurring L-amino acids
  SITE (321): Xaa equals any of the naturally occurring L-amino acids
MLFGSIFRCLDPALTIAASLAFKSPFVSPWDKKEEANQKKLEFAFANSDYLALLQAYKGWQLSTKEGVRASYNYCRQNFLSGRVLQEMASLKRQFTELLSDIGFAREGLRAREIEKRAQGGDGVLDATGEEANSNAENPKLISAMLCAALYPNVVQVKSPEGKFQKTSTGAVRMQPKSAELKFVTKNDGYVHIHPSSVNYQVRHFDSPYLLYHEKIKTSRVFIRDCSMVSVYPLVLFGGGQVNVQLQRGEFVVSLDDGWIRFVAASHQVAELVKELRCELDQLLQDKIKXPSIDLCTCPRGSRIISTIVKLVTTQXKAVLXSACYSPASSSPGK

SEQ ID NO: 2749 - protein, 33 aa, Homo sapiens
MGLLWNLIATYFCFPLDAASTHVDYEVLTHPRS

SEQ ID NO: 2750 - protein, 50 aa, Homo sapiens [sequence omitted]

SEQ ID NO: 2751 - protein, 38 aa, Homo sapiens
MYLKYCYVILGYLFIFEIFVYIAFLNLANNMCKGINQK

SEQ ID NO: 2752 - protein, 5 aa, Homo sapiens
IVGFN

SEQ ID NO: 2753 - protein, 30 aa, Homo sapiens
MLQFSCLSISHVLILLITFFACVVLAPFQK

SEQ ID NO: 2754 - protein, 29 aa, Homo sapiens
MFFSCLFLFGLYSGCLFLFVKRKQCTEKQ

SEQ ID NO: 2755 - protein, 45 aa, Homo sapiens
MELNIAWMTEKLWKEMEDFLNFSLVLFVMKLKLPAPEKVFQYLLC

SEQ ID NO: 2756 - protein, 38 aa, Homo sapiens
  SITE (25): Xaa equals any of the naturally occurring L-amino acids
MQTCLLWNLKTLLVVRLLPGIPGLXGFYFDSKQKQMLC

SEQ ID NO: 2757 - protein, 38 aa, Homo sapiens
MVCSILSFSILPFWEDFGISFLFFLFFLREWQIVFSQV

SEQ ID NO: 2758 - protein, 52 aa, Homo sapiens
MCVVNILWFSAFTSMRVASDPARLTGLPKPSLASSTYISLCCSTSKQTKIGV

SEQ ID NO: 2759 - protein, 31 aa, Homo sapiens
MFMLAILLTFFHPFLVYRECRTWKESPSAIA

SEQ ID NO: 2760 - protein, 15 aa, Homo sapiens
YIFVWISSVYVQYFV

SEQ ID NO: 2761 - protein, 40 aa, Homo sapiens [sequence omitted]

SEQ ID NO: 2762 - protein, 45 aa, Homo sapiens
GMAVLVEKSVVLVIWLGPVAQAGSNWFAVSSLQEYLKQGDSSSLL

SEQ ID NO: 2763 - protein, 46 aa, Homo sapiens [sequence omitted]

SEQ ID NO: 2764 - protein, 31 aa, Homo sapiens
MTFVIYYTHWFLLIIVLSDFLFSTMVPLAEK

SEQ ID NO: 2765 - protein, 2 aa, Homo sapiens
KW

SEQ ID NO: 2766 - protein, 33 aa, Homo sapiens
MEKLDWAYSQHSVICKCISLLCRVFLLGVNFDS

SEQ ID NO: 2767 - protein, 32 aa, Homo sapiens
MLTGTLFPGFHVRLWALSPAQAQECLVGGEWS

SEQ ID NO: 2768 - protein, 20 aa, Homo sapiens
MCGCTTFFCDYMGSFERIYL

SEQ ID NO: 2769 - protein, 46 aa, Homo sapiens
MIFLGLHTFALFSEPCPLNVTLLPFSTVCVPTVQGLPGTAHRLMAC

SEQ ID NO: 2770 - protein, 37 aa, Homo sapiens
MYCKQSCVLILFSLFECIIILIIPKTLTTQGTAVQYY

SEQ ID NO: 2771 - protein, 28 aa, Homo sapiens
MHLPQLPLQSHHYCRLALRVSFQVFWHV

SEQ ID NO: 2772 - protein, 32 aa, Homo sapiens
KMNLFVLVGAISFIFRTTECAFINRMKAHAED

SEQ ID NO: 2773 - protein, 41 aa, Homo sapiens
MGHLKSCMNHNLLWYLCTCLILYSLFQCGICAPLYLLRSAE

SEQ ID NO: 2774 - protein, 82 aa, Homo sapiens
LPVEEPNPAKRLLFLLLTIVFCQILMAEEGVPAPLPPEDAPNAASLAPTPVSPVLEPFNLTSEPSDYALDLSTFLQQHPAAF

SEQ ID NO: 2775 - protein, 39 aa, Homo sapiens
MALLLHLTGLKCWGHLWLLCITVHTQVEPVCSFPFDMFF

SEQ ID NO: 2776 - protein, 45 aa, Homo sapiens
MMLLLLWPGLQWKCTGTPNVVNALSSICSGILRVGLWFHALAVCK

SEQ ID NO: 2777 - protein, 1 aa, Homo sapiens
S

SEQ ID NO: 2778 - protein, 30 aa, Homo sapiens
MRKYLMGTVYTFLVLVAGKAWTSPLRNISV

SEQ ID NO: 2779 - protein, 47 aa, Homo sapiens
MHETCFYFAALVLLVLLRKEKEGREFMVRRFLVRRFIVRRSRLGHKK

SEQ ID NO: 2780 - protein, 10 aa, Homo sapiens
HAGRYCVIRA

SEQ ID NO: 2781 - protein, 41 aa, Homo sapiens
LCTLSTILCLFSICLFLPISLPLRKKIGVTFVKVILIVNHL

SEQ ID NO: 2782 - protein, 11 aa, Homo sapiens
LLFASFLCKIL

SEQ ID NO: 2783 - protein, 63 aa, Homo sapiens
MFISWFILFRLYPLSSPFFSQNVLKQISDILSPYYFIQKYFSIPERYSSSKKKTTIPLSHLKS

SEQ ID NO: 2784 - protein, 59 aa, Homo sapiens
MHRWKAFFPGPYPSLHNTPVTPHHGLLSDPHGIPVALCSHTAFLICPPCLSLTHILFQG

SEQ ID NO: 2785 - protein, 10 aa, Homo sapiens
MGCWLLPCFL

SEQ ID NO: 2786 - protein, 39 aa, Homo sapiens
MPAHLCLLPLLLCPSYSQNLYLLSNLHFVLVPLPFPIKE

SEQ ID NO: 2787 - protein, 34 aa, Homo sapiens [sequence omitted]

SEQ ID NO: 2788 - protein, 31 aa, Homo sapiens
MTPGSRVMGTCWGFCFFFFTGWLDPQWQKDP

SEQ ID NO: 2789 - protein, 46 aa, Homo sapiens
MKLLRSAAKLMVLISTQTSYAFGEQCTHLTLFLINSNSGKIPLTYF

SEQ ID NO: 2790 - protein, 36 aa, Homo sapiens
MTGTPAWAHLLLLLLLGSAPQTRLWPPSQCPVTSPE

SEQ ID NO: 2791 - protein, 55 aa, Homo sapiens
MGGILLALIEGVGILLTRYTAQQFRNAPPFLEDPSQLPPKDGTPAPGYPSYQQYH

SEQ ID NO: 2792 - protein, 7 aa, Homo sapiens
MPIWAFV

SEQ ID NO: 2793 - protein, 37 aa, Homo sapiens [sequence omitted]

SEQ ID NO: 2794 - protein, 113 aa, Homo sapiens
SACDTGLAVLLTVFCACVLPPFPPAAAETRPSFHTQISCPVLTPPCHHQPCLEPPALWQQNQTFLWAFKMVLCPPVRSCVLSPKGHAKDWLWEALITNPSTSSLPQAGSNKCI

SEQ ID NO: 2795 - protein, 38 aa, Homo sapiens
MQLRGLSLNPRLLLTLGSLCLGSSAPGFGRQQFPKNKM

SEQ ID NO: 2796 - protein, 162 aa, Homo sapiens
MLVMKWEESIIWHHLVLCANSGLSILLILPCKVNNYYPHFAVEKTEYSDTTLTFLGSKKLSVSLGFELQVNLILKHVLLSIRTVVLLTGHGAHACNSSTLGSQGWQITWTQEFETSPGSMAKPHLNRKYLKVRQVWWHAPVVPATREAEVKGLLEPARWRLH

SEQ ID NO: 2797 - protein, 18 aa, Homo sapiens
MTCLLSGCLFCSREGSAV

SEQ ID NO: 2798 - protein, 30 aa, Homo sapiens
MIFLLIVNYLSFIDYGRDLQNGIHVQWCGE

SEQ ID NO: 2799 - protein, 71 aa, Homo sapiens
ESAPPWLPICPTRSLGLLVQLLALAGSCSAGPRALGQASGVVRTTKPLLSPSTPLDLGPPEPPAGWAYTSS

SEQ ID NO: 2800 - protein, 183 aa, Homo sapiens
MTKSSAVLFILIFSLIFKLEELRAALVLVVLLIAGGLFMFTYKSTQFNVEGFAWCWGPRSSVAFAGPSPRCSCRRLNSASRIPSTPCSTCSHSCSWGSSLSLLYLKVSICPHLRKSSVSRTQGCSCGYLGASSLAGFSPLVWASLSSSWSPEPPASLSPLPAFLRKSALCCWQLICWAIRSAS

SEQ ID NO: 2801 - protein, 24 aa, Homo sapiens
CIECIVLAQFSGSRKKIQARTAGL

SEQ ID NO: 2802 - protein, 38 aa, Homo sapiens
MSFPYWLFYLLLFSLPIRDILGGDGKGWAKEQTLGLGP

SEQ ID NO: 2803 - protein, 35 aa, Homo sapiens
SIYLFLLRAQRLFPNILCLLLFPDLLTGFFLPMNF

SEQ ID NO: 2804 - protein, 15 aa, Homo sapiens
FLFINVQLPLCLASR

SEQ ID NO: 2805 - protein, 2 aa, Homo sapiens
KL

SEQ ID NO: 2806 - protein, 23 aa, Homo sapiens
MFSHNGKGKAALWGLFLLVHESH

SEQ ID NO: 2807 - protein, 33 aa, Homo sapiens
MGPSFFFLFSVAFSIFRVHLALPPNLIKNVSDL

SEQ ID NO: 2808 - protein, 18 aa, Homo sapiens
EKVTRFHNAFLFPNHWYS

SEQ ID NO: 2809 - protein, 20 aa, Homo sapiens
MWWPSWMTSSTGPAGVLCGP

SEQ ID NO: 2810 - protein, 13 aa, Homo sapiens
EFRAGFLLLLHGM

SEQ ID NO: 2811 - protein, 4 aa, Homo sapiens
MNSP

SEQ ID NO: 2812 - protein, 39 aa, Homo sapiens
MLSFRIISSFYIILVFCSYVLRAHTLLGSVSPREKWYEK

SEQ ID NO: 2813 - protein, 8 aa, Homo sapiens
MLFFKLAI

SEQ ID NO: 2814 - protein, 40 aa, Homo sapiens
MLIKKLWFLQDFVFRDSGKEHINQKEELTSILLVLKITDY

SEQ ID NO: 2815 - protein, 62 aa, Homo sapiens
MAMYCGLHGLTVLTKMLPGCMSAWKKLSRNTWVKKISTPRSASIFMSVRWSARVARSVTCTP

SEQ ID NO: 2816 - protein, 36 aa, Homo sapiens
MFNSLLAFFLILWGCITSLKDIVIISYKVKIKKDCV

SEQ ID NO: 2817 - protein, 33 aa, Homo sapiens
  SITE (8): Xaa equals any of the naturally occurring L-amino acids
MALILLLXVLMEVTLEGKKKMDGVHMEEMVQKT

SEQ ID NO: 2818 - protein, 26 aa, Homo sapiens
MLVLTFVSVYHLNVFMYLMVFCGCFS

SEQ ID NO: 2819 - protein, 9 aa, Homo sapiens
MVSSPQGLC

SEQ ID NO: 2820 - protein, 17 aa, Homo sapiens
YCIFTFLSTADVTIYGQ

SEQ ID NO: 2821 - protein, 25 aa, Homo sapiens
KLIWQVLLVFLIIIILNPKYSNFLN

SEQ ID NO: 2822 - protein, 18 aa, Homo sapiens
MTGLHMTLLISFIYVSTF

SEQ ID NO: 2823 - protein, 45 aa, Homo sapiens [sequence omitted]

SEQ ID NO: 2824 - protein, 7 aa, Homo sapiens
MTTLQGG

SEQ ID NO: 2825 - protein, 14 aa, Homo sapiens
KPLFLHLPLLTLQA

SEQ ID NO: 2826 - protein, 59 aa, Homo sapiens
MGLSVLLPLCLLGPGRFTSGQKPLDTPGLGAAVLSVRKAGLKMRSHLTPSVCTVPSPGS

SEQ ID NO: 2827 - protein, 34 aa, Homo sapiens
  SITE (24): Xaa equals any of the naturally occurring L-amino acids
MLTSLICYAIPCKFLNFAVPWFCXITPGSVTMAT

SEQ ID NO: 2828 - protein, 34 aa, Homo sapiens; identical to SEQ ID NO: 2827
  SITE (24): Xaa equals any of the naturally occurring L-amino acids

SEQ ID NO: 2829 - protein, 38 aa, Homo sapiens
MRMIIISYIKICGRFTVMITLLVPTLSLNLHDPVASKN

SEQ ID NO: 2830 - protein, 31 aa, Homo sapiens
MGNLYPKLGLKIIFIFVFQQTWVLCPAMDQK

SEQ ID NO: 2831 - protein, 77 aa, Homo sapiens
VTQSKWLIFYIVVYFVLPSSLRNKARIFSLFDIYSETKGLLDLMIFLQLSEGAFSTIQVILIHTKVENHCTRSLCVF

SEQ ID NO: 2832 - protein, 13 aa, Homo sapiens
MLSVATNRIYNSN

SEQ ID NO: 2833 - protein, 67 aa, Homo sapiens [sequence omitted]

SEQ ID NO: 2834 - protein, 18 aa, Homo sapiens
MCESFPEGFCPCFHMSHN

SEQ ID NO: 2835 - protein, 21 aa, Homo sapiens
MFKVRGFLSICLVFCWQVTCR

SEQ ID NO: 2836 - protein, 47 aa, Homo sapiens
  SITE (17): Xaa equals any of the naturally occurring L-amino acids
MFKVRGFLSICLVFCWXGHMQVIGYGKGKMPRLLLGWSPSPKFKPPE

SEQ ID NO: 2837 - protein, 35 aa, Homo sapiens
MSLPLYVSLSDMFYAKLSDFKFKISEIKCPSLHIV

SEQ ID NO: 2838 - protein, 19 aa, Homo sapiens
MLVLVVFCWAVLVYFHPSL

SEQ ID NO: 2839 - protein, 29 aa, Homo sapiens
MMCFLFLNEICLASCMENEFCWSIVETET

SEQ ID NO: 2840 - protein, 36 aa, Homo sapiens
MKMLICSLTLLVCLSPRVGRRSRYYHSKGTESVSTL

SEQ ID NO: 2841 - protein, 18 aa, Homo sapiens
MNMICLSYRLALTCFFFQ

SEQ ID NO: 2842 - protein, 348 aa, Homo sapiens
GTLLGKALAAVSLSLALASVTIRSSRCRGIQAFRNSFSSSWFHLNTNVMSGSNGSKENSHNKARTSPYPGSKVERSQVPNEKVGWLVEWQDYKPVEYTAVSVLAGPRWADPQISESNFSPKFNEKDGHVERKSKNGLYEIENGRPRNPAGRTGLVGRGLLGRWGPNHAADPIITRWKRDSSGNKIMHPVSGKHILQFVAIKRKDCGEWAIPGGMVDPGEKISATLKREFGEEALNSLQKTSAEKREIEEKLHKLFSQDHLVIYKGYVDDPRNTDNAWMETEAVNYHDETGEIMDNLMLEAGDDAGKVKWVDINDKLKLYASHSQFIKLVAEKRDAHWSEDSEADCHAL

SEQ ID NO: 2843 - protein, 34 aa, Homo sapiens
MTITLVAFHLILPSFIIWFTWICHPINSEVYQQN

SEQ ID NO: 2844 - protein, 29 aa, Homo sapiens
FFFFGFFVFFKHQSALSECRVLIGGMMMV

SEQ ID NO: 2845 - protein, 58 aa, Homo sapiens
MQGPGLSAAGGCLWAWLSLGTPFLSVATLAVSGAALDNFGHRNSGGGFWSSEVATQQV

SEQ ID NO: 2846 - protein, 82 aa, Homo sapiens
  SITE (3): Xaa equals any of the naturally occurring L-amino acids
  SITE (23): Xaa equals any of the naturally occurring L-amino acids
  SITE (72): Xaa equals any of the naturally occurring L-amino acids
CSXSYLWQVDYIGPLHYGRDRIXSYWNILTQDMDLPFLHAILLPRVPSMDLQNCLVDCHGITHSIAFDQGTXSTDRNAAMHS

SEQ ID NO: 2847 - protein, 123 aa, Homo sapiens
VARLHRLLHTFLLTFCCLLMAEEAAVFAKYLAHGLPAGAPLRLVFLLNVLLLGLWNFCCSVPSSISTSTLTRWWAPQWAPLPGTSPMAAGIISPGLQGAQAMGSSPVPTPAASITERNKNHRA

SEQ ID NO: 2848 - protein, 72 aa, Homo sapiens
  SITE (38): Xaa equals any of the naturally occurring L-amino acids
MSPWDLPRRGLLLLVLPFLLSPRPLVYLLLPALPQLQXLQAHQQTVLSSPLKLQTKPTLQAKLHLGLEMVIS

SEQ ID NO: 2849 - protein, 13 aa, Homo sapiens
YTHTYAHMLWVLP

SEQ ID NO: 2850 - protein, 37 aa, Homo sapiens
MLIRVIIFKSFSQSCISILALSKLVELFSVLLDILHS

SEQ ID NO: 2851 - protein, 37 aa, Homo sapiens
MDIKILPMCFVFYCCSICYCTCDGTCAYIALKQISRS

SEQ ID NO: 2852 - protein, 31 aa, Homo sapiens
MYLFILLYLCFYFSSSENGFLVSEVYLYLKF

SEQ ID NO: 2853 - protein, 20 aa, Homo sapiens
MWPLLFAICVSVAYGLSCIR

SEQ ID NO: 2854 - protein, 20 aa, Homo sapiens
GKCLINLVIGWVKYMGEFYM

SEQ ID NO: 2855 - protein, 20 aa, Homo sapiens
GKCLINLVIGWVKYMGEFYM

SEQ ID NO: 2856 - protein, 82 aa, Homo sapiens
MSCSHTCLYLKPSVCPVVWGEVMDSARWTCCGWMFPACAGPEWTGATSQHVRENHCHTIPMDFVLFLKKKKFFSVNMNFFSM

SEQ ID NO: 2857 - protein, 156 aa, Homo sapiens
MLTDMMKGNVTNVLPMILIGGWINMTFSGFVTTKVPFPLTLRFKPMLQQGIELLTLDASWVSSASWYFLNVFGLRSIYSLILGQDNAADQSRMMQEQMTGAAMAMPADTNKAFKTEWEALELTDHQWALDDVEEELMAKDLHFEGMFKKELQTSIF

SEQ ID NO: 2858 - protein, 31 aa, Homo sapiens [sequence omitted]

SEQ ID NO: 2859 - protein, 17 aa, Homo sapiens
MILVGLWLIQWLLLKYK

SEQ ID NO: 2860 - protein, 4 aa, Homo sapiens
MRSE

SEQ ID NO: 2861 - protein, 126 aa, Homo sapiens [sequence omitted]

SEQ ID NO: 2862 - protein, 39 aa, Homo sapiens
MFSFYSHNPLKPCLVLLLFASAVQDVAPFLLFEHGLVTR

SEQ ID NO: 2863 - protein, 24 aa, Homo sapiens
MCNLYLILYFVIHTNMSRHCDICL

SEQ ID NO: 2864 - protein, 23 aa, Homo sapiens
MPSLHTFFLLLPFVFMPVAFTLH

SEQ ID NO: 2865 - protein, 38 aa, Homo sapiens
  SITE (14): Xaa equals any of the naturally occurring L-amino acids
  SITE (21): Xaa equals any of the naturally occurring L-amino acids
MAKCITITLFTVIXFAENISXSWNCEIKLKILLVKMTN

SEQ ID NO: 2866 - protein, 38 aa, Homo sapiens
MAKCITITLFTVICFAENISSSWNCEIKLKILLVKMTN

SEQ ID NO: 2867 - protein, 18 aa, Homo sapiens
CLLLSKLLHLQPLAVADS

SEQ ID NO: 2868 - protein, 40 aa, Homo sapiens
MFCTLWIGILVRKSIASRKRLMSQLAGETVPSFWVAVLVK

SEQ ID NO: 2869 - protein, 35 aa, Homo sapiens
MVILLAHPCIHQPGISLNLFASEFLLTFQYIGIID

SEQ ID NO: 2870 - protein, 11 aa, Homo sapiens
MYFSIEGGVFQ

SEQ ID NO: 2871 - protein, 24 aa, Homo sapiens
VCVTVSNPISCLSVAPSHLLDQAA

SEQ ID NO: 2872 - protein, 26 aa, Homo sapiens
MSTIMFSLWTICVGLPPARSLLYPHQ

SEQ ID NO: 2873 - protein, 37 aa, Homo sapiens
MQILHWQWLLCVKYFPFGLIFIHIVSLNKGETTYRRN

SEQ ID NO: 2874 - protein, 39 aa, Homo sapiens
  SITE (16): Xaa equals any of the naturally occurring L-amino acids
MTLAFVVLALWPNGRXHVLVHMCWLLFLKSWQCQHMGGI

SEQ ID NO: 2875 - protein, 1 aa, Homo sapiens
L

SEQ ID NO: 2876 - protein, 148 aa, Homo sapiens
MSPRWALVTLLGFSHRKQRCLPLPLLHILPLPSRAGFWVHLSTGRCSQGVGAGGGVCGQVLGGTRKSRGVAHADQAHVAHGAELPRTAHDSATFSPFQPRRDVTLELLWHFCQASPAPIALRSLLFVRDLQRLTFLLFSHHSIVILRN

SEQ ID NO: 2877 - protein, 7 aa, Homo sapiens
MHLVTVC

SEQ ID NO: 2878 - protein, 10 aa, Homo sapiens
MSLCGSRDLC

SEQ ID NO: 2879 - protein, 8 aa, Homo sapiens
MWILLYLI

SEQ ID NO: 2880 - protein, 15 aa, Homo sapiens
MMFLLIFVWYLQPYP

SEQ ID NO: 2881 - protein, 18 aa, Homo sapiens
MQLWLKSGLLLSFILILP

SEQ ID NO: 2882 - protein, 7 aa, Homo sapiens
LGFLLLT

SEQ ID NO: 2883 - protein, 77 aa, Homo sapiens
MIRMLVLSLLLTFYLLSIWSIAFFLACQAARIFRDHLVQSLIRCLHPHTYVPSKGSAFDIVFILHLFSLSRDSERAE

SEQ ID NO: 2884 - protein, 37 aa, Homo sapiens
MSLSLIYFSVSFTTFGVKSSHDLYIPRLLLLKILYIL

SEQ ID NO: 2885 - protein, 62 aa, Homo sapiens
RGRGRLLGLSSFLCIILGLAWTAPASESCGPHPLAAEPSTVILGAIFPCRTGSLSPAPTFGL

SEQ ID NO: 2886 - protein, 62 aa, Homo sapiens; identical to SEQ ID NO: 2885

SEQ ID NO: 2887 - protein, 42 aa, Homo sapiens
MAAPSFLTSFLLPSSLPQVLSRETPFPAISSGRLGRCWADTS

SEQ ID NO: 2888 - protein, 48 aa, Homo sapiens
  SITE (46): Xaa equals any of the naturally occurring L-amino acids
MVAVWWFSLVMLFESFLLCVSALPVSFIFSYIFMMVDIVLLLPNVXLP

SEQ ID NO: 2889 - protein, 11 aa, Homo sapiens
MLLGISAVGLF

SEQ ID NO: 2890 - protein, 40 aa, Homo sapiens
GILLVQTYLGCCWGRHLGFSVSCIHRGRPFQIQEHWIRES

SEQ ID NO: 2891 - protein, 36 aa, Homo sapiens
MPSPLLSSVNTNTFPTPLCSRRPVAGRFSVPVVWIL

SEQ ID NO: 2892 - protein, 28 aa, Homo sapiens
MNDPPTAPHGLFLFLWLFSLRSGGFTRI

SEQ ID NO: 2893 - protein, 46 aa, Homo sapiens
VYVHTLCFVCVWFGAACVCVCVCVCDICYACVCQCVLGVPAPLSWR

SEQ ID NO: 2894 - protein, 119 aa, Homo sapiens
  SITE (51): Xaa equals any of the naturally occurring L-amino acids
  SITE (59): Xaa equals any of the naturally occurring L-amino acids
  SITE (68): Xaa equals any of the naturally occurring L-amino acids
MGSALGLAGISGSLGSGARLRWARSRTQGAGLWGVLAAGAVSGESQSCRAXKEREGAVXAMPPVGQQXNRQALPAHPPTHLGVHPPHWAWPRQVSLPGPGPAQPASLFLLPPHSPGTGL

SEQ ID NO: 2895 - protein, 65 aa, Homo sapiens
MWGRRQCALWMVFTSTAHTTLGSRPSTKQESARTARPWSSKRLRWPGLLSTLARRTRTSSSPMTT

SEQ ID NO: 2896 - protein, 4 aa, Homo sapiens
MFLI

SEQ ID NO: 2897 - protein, 17 aa, Homo sapiens
MFLFCIFSSPSPLTQRI

SEQ ID NO: 2898 - protein, 37 aa, Homo sapiens
MLIGLLSLAPDSACSWLPVLTDHICHCHRISSASASA

SEQ ID NO: 2899 - protein, 55 aa, Homo sapiens
MAGTRPTGKRCWSIWVTLLITRCPFDLAGPASLLMRSLCWPPCSTRSLPSVPAVS

SEQ ID NO: 2900 - protein, 33 aa, Homo sapiens
MARGGTWWSLLSFWTWGCQTRAHPHTRPGPLRP

SEQ ID NO: 2901 - protein, 8 aa, Homo sapiens
MHYLQTGG

SEQ ID NO: 2902 - protein, 8 aa, Homo sapiens
MHYLQTGG

SEQ ID NO: 2903 - protein, 24 aa, Homo sapiens
MVSHGCHVPLFALFMVLPSSQGLP

SEQ ID NO: 2904 - protein, 36 aa, Homo sapiens
MPLFGGNLGYAWAWFTPITWVAVLAHLIVSSIHPGK

SEQ ID NO: 2905 - protein, 41 aa, Homo sapiens
MARVSARWRSLLAWWVSSCPISLEGRAGSHEHGEYPWMLHS

SEQ ID NO: 2906 - protein, 33 aa, Homo sapiens
  SITE (25): Xaa equals any of the naturally occurring L-amino acids
FLFWGVMKILGCAPIFSFLRLSLIXDRHLGVVF

SEQ ID NO: 2907 - protein, 123 aa, Homo sapiens
MAFLSFCCCAFALYYWSSAFSLSIVFFFLYRIYTPKFFHLASSHNLTSPSGSCPVFLLLFILSLKGRVYSHYLHFSTCHLAFHPLQPEFDPQNSTETTLSKATNYCLIVKVNGLFFIFIIYGI

SEQ ID NO: 2908 - protein, 37 aa, Homo sapiens
MNIVWFVMSHMCFKMALCLGLPYVNGSCVCLLFKPWE

SEQ ID NO: 2909 - protein, 16 aa, Homo sapiens
MFLDFLFCPVGLFVSL

SEQ ID NO: 2910 - protein, 182 aa, Homo sapiens
MTLAAYKEKMKELPLVSLFCSCFLADPLNKSSYKYEADTVDLNWCVISDMEVIELNKCTSGQSFEVILKPPSFDGVPEFNASLPRRRDPSLEEIQKKLEAAEERRKYQEAELLKHLAEKREHEREVIQKAIEETTTSSRWLRKNWPRRWNPTRRTGRPTSPPCWNGCKRRTSTPRRCGKTRS

SEQ ID NO: 2911 - protein, 120 aa, Homo sapiens
ATALPSMSSTFWAFMILASLLIAYCSQLAAGTCEIVTLDRDSSQPRRTIARQTARCACRKGQIAGTTRARPACVDARIIKTKQWCDMLPCLEGEGCDLLINRSGWTCTQPGGRIKTTTVS

SEQ ID NO: 2912 - protein, 36 aa, Homo sapiens
MRNALHSMNINFHLPFFLVFILLFILLLIHDSYTYL

SEQ ID NO: 2913 - protein, 15 aa, Homo sapiens
MISDTEPFFLWLLAA

SEQ ID NO: 2914 - protein, 48 aa, Homo sapiens
GTPSLLPYSCSRFSGLNQVNRGPEPPLCLLEIPKTEMCSRSRSKTLSL

SEQ ID NO: 2915 - protein, 37 aa, Homo sapiens
MRSLGSTLVSDTWDRGAFATLVVVTPPHLPASFTDSK

SEQ ID NO: 2916 - protein, 40 aa, Homo sapiens
MCKMFNLPFLLLVSVALWCKQLKTLNVYTIRPRRQMKYFF

SEQ ID NO: 2917 - protein, 36 aa, Homo sapiens
MTNLVISFTLRFSSFPVLPFCLLLCNIAFGLNNTFS

SEQ ID NO: 2918 - protein, 39 aa, Homo sapiens
MTRPTIVSSCLWAVRQLVGTRSNPRFFLQYSGYNLSWLL

SEQ ID NO: 2919 - protein, 182 aa, Homo sapiens
MAALAHEAVGTRDLLAAGCCCLARWGSMEELGLPPRPAPAARMLGSHGGTRPGAPASPSGWCGQLFPASQCPGGSCLADSAWSPAGFRKTQLHVWDSSPALGCGVSVHLRAGGPTHRLPLQVHPRAWARWAPGTWPADAATSDQCCVEEPRAAPGKPGFNSTRKRNLLCFVRACSFSSFLSL

SEQ ID NO: 2920 - protein, 142 aa, Homo sapiens
  SITE (2): Xaa equals any of the naturally occurring L-amino acids
MXALAHEAVGTRDLLAAGCCCLARWGSMEELGLPPRPAPAARMLGSHGGTRPGAPASPSGWCGQLFPASQCPGGSCLADSAWSPAGFRKTQLHVWDSSPALGCGVSVHLRAGGPTHRLPLQVHPRAWGPLGTWHLACRCCYE

SEQ ID NO: 2921 - protein, 35 aa, Homo sapiens
MLRVFFFSLVVGTSTARTISYSSLHPWHMHENIST

SEQ ID NO: 2922 - protein, 57 aa, Homo sapiens
MYWCTYCMEAWLSSQQLVLHRNMRPCIFQMFSLSRLFTMESTTSCTHSCCSSAMASP

SEQ ID NO: 2923 - protein, 27 aa, Homo sapiens
MPASLRNPTVLHMLSNTIFSYPLSLPC

SEQ ID NO: 2924 - protein, 40 aa, Homo sapiens
GCHHLFLYIFCNILKLLPSLIIISVCVCKDNQAFKFIKHV

SEQ ID NO: 2925 - protein, 244 aa, Homo sapiens
  SITE (78): Xaa equals any of the naturally occurring L-amino acids
  SITE (222): Xaa equals any of the naturally occurring L-amino acids
MHLALYCFASSQLSTALSLLYRARYLMLLVFGEDHPEMALLDNNIGLVLHGVMEYDLSLRFLENALAVSTKYHGPKAXKVALSHHLVARVYESKAEFRSALQHEKEGYTIYKTQLGEDHEKTKESSEYLKCLTQQAVALQRTMNEIYRNGSSANIPPLKFTAPSMASVLEQLNVINGILFIPLSQKDLENLKAEVARRHQLQEASRNRDRAEEPMATEPAPXGAPGDLGSQPPAAKDPSPSVQG

SEQ ID NO: 2926 - protein, 48 aa, Homo sapiens
HLQHCVSCGCAVTGIKSSAFNAKGSEIFLKLISCPMQVFSTTCITSTL

SEQ ID NO: 2927 - protein, 71 aa, Homo sapiens [sequence omitted]

SEQ ID NO: 2928 - protein, 44 aa, Homo sapiens
DLQIQWPILLSLSCEGVFQVLKQSKNHLGPSLRKHFSGQVGFRL

SEQ ID NO: 2929 - protein, 14 aa, Homo sapiens
GFYTFLPSLPGALY

SEQ ID NO: 2930 - protein, 139 aa, Homo sapiens
MKKIVDQNTKLAPETKAVIHWIMDIPFVLSANLHGGDLVANYPYDETRSGSAHEYSSSPDDAIFQSLARAYSSFNPAMSDPNRPPCRKNDDDSSFVDGTTNGVLGTAYLEGCKTSITLAATVLRSPWSLAVRSSHLKRL

SEQ ID NO: 2931 - protein, 2 aa, Homo sapiens
MY

SEQ ID NO: 2932 - protein, 9 aa, Homo sapiens
MRFLFIFCF

SEQ ID NO: 2933 - protein, 12 aa, Homo sapiens
MERVRTSMECFC

SEQ ID NO: 2934 - protein, 48 aa, Homo sapiens
MLVILLDMFFVVVVTWNFCILNKFGDQIQKKKKKKKKKKKKKKKKKKK

SEQ ID NO: 2935 - protein, 31 aa, Homo sapiens
MVIWSTYDTLAVLIFGVLALVLSHLHVWVFL

SEQ ID NO: 2936 - protein, 48 aa, Homo sapiens
ELSCWQDLLELARQLWLWLLLRSWVVRSPSAQWWGVKFTQLRSRRQRC

SEQ ID NO: 2937 - protein, 59 aa, Homo sapiens [sequence omitted]

SEQ ID NO: 2938 - protein, 1 aa, Homo sapiens
F

SEQ ID NO: 2939 - protein, 44 aa, Homo sapiens
MSGLSGAPWGTWALPLAHLSLLSRTCLSSSPLGFRLFSRHLRHL

SEQ ID NO: 2940 - protein, 38 aa, Homo sapiens
MLSLPAPLRVNRGLWQLCTGAGLWLLQGALPVTRSWAV

SEQ ID NO: 2941 - protein, 40 aa, Homo sapiens
MAGVSTSPGPFLRYLPACLPELTCRPRKMLTEVLLEVAPA

SEQ ID NO: 2942 - protein, 133 aa, Homo sapiens
MFTDLSSSWCMTMTPVGSMTSSASSPALSRRCRKGRQTLGRRCSGTVSTQVSGQEEELQELRDGSAGPVHGGEGAHLPGLHHGWLPDQLHGGHRLHRLQWGPEEQPVPALPQSPTAQPLPAGPACSGRHLPGL

SEQ ID NO: 2943 - protein, 8 aa, Homo sapiens
WAFSAWLL

SEQ ID NO: 2944 - protein, 9 aa, Homo sapiens
IFLILLICV

SEQ ID NO: 2945 - protein, 29 aa, Homo sapiens
RVFLNHELYHVTFLLVKLSVALHCQQSPA

SEQ ID NO: 2946 - protein, 90 aa, Homo sapiens
MADRAPRQPTSLGSSPQRCGSPPSAPPPPPDRGERIEDCLAPLCPPVVGGRGGCALSRFLPVDLSLLRSSRTAAVELVAGGVCRSPSQEN

SEQ ID NO: 2947 - protein, 42 aa, Homo sapiens
IIVRVGFALSCSVSCPFFALLSCDAFHHIMTQQEGPHKVPAP

SEQ ID NO: 2948 - protein, 42 aa, Homo sapiens
MKIFMYVPIILFRSQCLCLSLTEIIELLSSSKLNKTLELKAS

SEQ ID NO: 2949 - protein, 6 aa, Homo sapiens
GVSLHQ

SEQ ID NO: 2950 - protein, 66 aa, Homo sapiens
MGSRLAPLLSACLFVSVILGRMVILKNPGVLGQRQAGPSPGAPGLPSPSVRAPLGHKCSERSPSAT

SEQ ID NO: 2951 - protein, 87 aa, Homo sapiens [sequence omitted]

SEQ ID NO: 2952 - protein, 22 aa, Homo sapiens
MLMPPPPPARLFFLYFVLFLLG

SEQ ID NO: 2953 - protein, 46 aa, Homo sapiens
MRLGISELSFLLGALGYLSLPRVGPLEPFLPWVGAVSGCWEGLCWP

SEQ ID NO: 2954 - protein, 51 aa, Homo sapiens
MTTSQAISCLAHWACAWETACCWMARRRAHCGSVGPRSLPAAVGGRGAGRT

SEQ ID NO: 2955 - protein, 66 aa, Homo sapiens [sequence omitted]

SEQ ID NO: 2956 - protein, 66 aa, Homo sapiens [sequence omitted]

SEQ ID NO: 2957 - protein, 66 aa, Homo sapiens [sequence omitted]

SEQ ID NO: 2958 - protein, 22 aa, Homo sapiens
MVCCWRGCCWSWSIVLLWLGTV

SEQ ID NO: 2959 - protein, 60 aa, Homo sapiens
MKNSLAAQQSFSACSQIGEVSTCYSLCRRPSFLLCFPSLVFPPAGSWAGVPGCLPESRLH

SEQ ID NO: 2960 - protein, 60 aa, Homo sapiens; identical to SEQ ID NO: 2959

SEQ ID NO: 2961 - protein, 76 aa, Homo sapiens
VGHHSRPWTSPNLGTALFPNVSILLTGASSAQPWEPIQGLVRTGLPGVGVWGVPSGVIDSPTAPALTGPQVAAMVN

SEQ ID NO: 2962 - protein, 32 aa, Homo sapiens
WALALATHFLQNLGFGKNMASRQSKLSRQWGW

SEQ ID NO: 2963 - protein, 29 aa, Homo sapiens
MELLFFLLLPYFLLFICLISCISQIYIYL

SEQ ID NO: 2964 - protein, 64 aa, Homo sapiens
MPSFIIHSNPIWLGALLWVSHCPSSILGSLRPRGGKIQLRVGGSEPRRIMKATCFGNDLPLPVV

SEQ ID NO: 2965 - protein, 39 aa, Homo sapiens
MAGKASLTSSASVIAWPSLLCLLLLWMPVIGFCAYHTPM

SEQ ID NO: 2966 - protein, 129 aa, Homo sapiens [sequence omitted]

SEQ ID NO: 2967 - protein, 66 aa, Homo sapiens
MCCPSLLKFYFRFSIGYLFCFLYFFSLSLPPSRPPRPIPFLPLDFHPLGCLAHLYAPALGTGPNTW

SEQ ID NO: 2968 - protein, 55 aa, Homo sapiens
MSVGLSSSFLILFMPCQVYCLYPLVNFFISVIIRLKKKKKKKKESSLLGNAWTLC

SEQ ID NO: 2969 - protein, 46 aa, Homo sapiens
  SITE (13): Xaa equals any of the naturally occurring L-amino acids
MHLIIFFLSLLCXFLKLPPKYLSTPLNVWSQDKFLILALQFKMYKK

SEQ ID NO: 2970 - protein, 1 aa, Homo sapiens
L

SEQ ID NO: 2971 - protein, 40 aa, Homo sapiens [sequence omitted]

SEQ ID NO: 2972 - protein, 34 aa, Homo sapiens
LELTVLSSLRTFEYTLPISLPYFLFAAFALELCF

SEQ ID NO: 2973 - protein, 21 aa, Homo sapiens
DCPARAAPQPADLTAAPASVA

SEQ ID NO: 2974 - protein, 35 aa, Homo sapiens
MTMKLSVFLSVQNLGLLSVVLKRALALSTPSLEIC

SEQ ID NO: 2975 - protein, 1 aa, Homo sapiens
M

SEQ ID NO: 2976 - protein, 28 aa, Homo sapiens
MVLFNAHGCFLICGLLVSRAMHNVSEGS

SEQ ID NO: 2977 - protein, 4 aa, Homo sapiens
FGFV

SEQ ID NO: 2978 - protein, 1 aa, Homo sapiens
M

SEQ ID NO: 2979 - protein, 17 aa, Homo sapiens
MVGLWFVFSLYSLVTFL

SEQ ID NO: 2980 - protein, 38 aa, Homo sapiens
MLGCLLVVFLCCLILGKLLCKAKNPVNTILSFTGRHYW

SEQ ID NO: 2981 - protein, 13 aa, Homo sapiens
GNSLTLAILLLSF

SEQ ID NO: 2982 - protein, 59 aa, Homo sapiens
MWRLAPRRLRQVHAKPAWLSSGFLLTRWMPVPRPPDRALQHWRGLWWGPRCRTGTASAH

SEQ ID NO: 2983 - protein, 670 aa, Homo sapiens
DCVLVLLLMPRLICKAELIRKQAQEKFELSENCSERPGLRGAAGEQLSFAAGLVYSLSLLQATLHRYEHALSQCSVDVYKKVGSLYPEMSAHERSLDFLIELLHKDQLDETVNVEPLTKAIKYYQHLYSIHLAEQPEDCTMQLADHIKFTQSALDCMSVEVRRLRAFLQGGQEATDIALLLRDLETSCSDIRQFCKKIRRRMPGTDAPGIPAALAFGPQVSDTLLDCRKHLTWVVAVLQEVAAAAAQLIAPLAENEGLLVAALEELAFKASEQIYGTPSSSPYECLRQSCNILISTMNKLATAMQEGEYDAERPPSKPPPVELRAAALRAEITDAEGLGLKLEDRETVIKELKKSLKIKGEELSEANVRLSLLEKKLDSAAKDADERIEKVQTRLEETQALLRKKEKEFEETMDALQADIDQLEAEKAELKQRLNSQSKRTIEGLRGPPPSGIATLVSGIAGGAIPGQAPGSVPGPGLVKDSPLLLQQISAMRLHISQLQHENSILKGAQMKASLASLPPLHVAKLSHEGPGSELPAGALYRKTSQLLETLNQLSTHTHVVDITRTSPAAKSPSAQLMEQVAQLKSLSDTVEKLKDEVLKETVSQRPGATVPTDFATFPSSAFLRAKEEQQDDTVYMGKVTFSCAAGFGQRHRLVLTQEQLHQLHSRLIS

SEQ ID NO: 2984 - protein, 45 aa, Homo sapiens
MFFSQLNCCISQTLGSMKAGRGNLNINYEHKFEGKKTKNHYLIKL

SEQ ID NO: 2985 - protein, 27 aa, Homo sapiens
MVVHILWSWCCRGLAGTAALPRVLFYF

SEQ ID NO: 2986 - protein, 56 aa, Homo sapiens
MGPHWGREASCFLWFPAGQSCPPFPVLPTLGNREGRRGEEREDPGGLGRSSLKRLL

SEQ ID NO: 2987 - protein, 60 aa, Homo sapiens
MMSFVWSRVPYCILLWCFLHLCQPVTVSWSLSFMTLTLWKSPGQLFYRIFPSFSLFNVFT

SEQ ID NO: 2988 - protein, 61 aa, Homo sapiens
MLVVSKASHFTLFLNCLFLKICLKKILRWQHIQVATEGGVTSDKLTSMSLANLDFWSQAPD

SEQ ID NO: 2989 - protein, 31 aa, Homo sapiens
MPCRMDRMTDRDEAETSTDPSHQVEPFFFLF

SEQ ID NO: 2990 - protein, 15 aa, Homo sapiens
MTRAILCLLLCCPGH

SEQ ID NO: 2991 - protein, 6 aa, Homo sapiens
MKILVL

SEQ ID NO: 2992 - protein, 149 aa, Homo sapiens
MAYTLLGLLWLHRGGAVGLGPRYLKDVFAAMALLYGPVQWLRLWTQWRRAAVLDQWLTLPIFAWPVAWCLYLNRGWRPWLFLSLECVSLASYGLSLCIPRGFEVALGAHMWPLWGRRCAPNRHYGNTTSATYSPLGVPLLPGLCGPQAV

SEQ ID NO: 2993 - protein, 23 aa, Homo sapiens
MKLNNKQCHLYMGTMPSSSCCVF

SEQ ID NO: 2994 - protein, 58 aa, Homo sapiens
LQLGLCCLPVLFVALGMASDPIFTLAPPLHCHYGAFPPNASGWEQPPNASGVTSPALP

SEQ ID NO: 2995 - protein, 60 aa, Homo sapiens
MAVTALAARTWLGVWGVRTMQARGFGSDQSENVDRGAGSIREAGGAFGKREQAEEERYFR

SEQ ID NO: 2996 - protein, 53 aa, Homo sapiens
VLSCILALLVKHSKASTHPPFSPLGKAVDCNIHTAPWAMVKSLAEGLGEALCV

SEQ ID NO: 2997 - protein, 35 aa, Homo sapiens
MCPLTTASEALSAIKMQILGLILLLLNPGISGGNS

SEQ ID NO: 2998 - protein, 38 aa, Homo sapiens
MRSEGGRLIKTTKNIIVVTLLFFFFCGGGDSTIIKIQT

SEQ ID NO: 2999 - protein, 38 aa, Homo sapiens; identical to SEQ ID NO: 2998

SEQ ID NO: 3000 - protein, 27 aa, Homo sapiens
MYLDQSSLVFLTLAMSHCHLMGPIWVL

SEQ ID NO: 3001 - protein, 32 aa, Homo sapiens
MTGRQSLRPGCALLLLPSVFSQLLSLGAPGSE

SEQ ID NO: 3002 - protein, 59 aa, Homo sapiens [sequence omitted]

SEQ ID NO: 3003 - protein, 40 aa, Homo sapiens
MVLLRVLASHLHHFYFSFTICIFQSAYILTLLLVVLMTSD

SEQ ID NO: 3004 - protein, 2 aa, Homo sapiens
WN

SEQ ID NO: 3005 - protein, 28 aa, Homo sapiens
MTLAFVTLVRVISTIIGGMADQGEVKSQ

SEQ ID NO: 3006 - protein, 8 aa, Homo sapiens
MCRWFVSE

SEQ ID NO: 3007 - protein, 20 aa, Homo sapiens
MFSQLLLYCVYLYCCRGGCF

SEQ ID NO: 3008 - protein, 40 aa, Homo sapiens
MELKKNVFSVSSLCTPSHYSSHTLHFFFFFKAALIGCYIL

SEQ ID NO: 3009 - protein, 4 aa, Homo sapiens
  SITE (2): Xaa equals any of the naturally occurring L-amino acids
MXSY

SEQ ID NO: 3010 - protein, 38 aa, Homo sapiens
MVARCFLTFLRVNSLSQGTVEMGVWSGFPPQSLLITAQ

SEQ ID NO: 3011 - protein, 1 aa, Homo sapiens
I

SEQ ID NO: 3012 - protein, 65 aa, Homo sapiens
MRFFLFPYYCFILSCHSKLTFFGMFFLYLCPFRSALDSLGGLLQWVCLNIVIPHVADWETLLFNW

SEQ ID NO: 3013 - protein, 40 aa, Homo sapiens
MLSLSSLSRCKLYVYWLCSLILFHGKYKQFSAYKYWKKLS

SEQ ID NO: 3014 - protein, 15 aa, Homo sapiens
MFVDVSWFLVFTLLP

SEQ ID NO: 3015 - protein, 39 aa, Homo sapiens
MSHFSCVILILTGIRWHGLVFSQFQNIFLHCFNVKKMKI

SEQ ID NO: 3016 - protein, 3 aa, Homo sapiens
LLG

SEQ ID NO: 3017 - protein, 36 aa, Homo sapiens
MKLFLPRPLSAARVRGLLFCIFIALRHLVLCDYHTY

SEQ ID NO: 3018 - protein, 295 aa, Homo sapiens
MASIAKQTSSLVPPYLGMILTALLQGLAGRTWAGKEELLKAIACVVTACSAELEKSVPNQPSTNEILQAVLKECSKENVKYKIVAISCAADILKATKEDRFQEFSNIVIPLIKKNSLESSGVRTTKNEEENEKEKELQLEYLLGAFESLGKAWPRNAETQRCYRQELCKLMCERLKLSTWKVQLGVLQSMNAFFQGLMLLEEEHADPEALAEILLETCKSITYSLENKTYSSVRTEALSVIELLLKKLEESKQWECLTSECRVLLIESLATMEPDSRPELQEKAALLKKTLENLE

SEQ ID NO: 3019 - protein, 36 aa, Homo sapiens
MQPPISSYSFLVFWLTVQPCGFCAASSARKIKPSFS

SEQ ID NO: 3020 - protein, 37 aa, Homo sapiens
MLLLSTLYLPSALSRKTFVLLKTKDVFILDPEERSLL

SEQ ID NO: 3021 - protein, 34 aa, Homo sapiens
MGQGSHLMLVFLILYYIVLFMIQLILTKFVAVEP

SEQ ID NO: 3022 - protein, 34 aa, Homo sapiens
MVFTCPHQKPALSRLLRLLLLNRSAICIPGAPQG

SEQ ID NO: 3023 - protein, 6 aa, Homo sapiens
SWLPPI

SEQ ID NO: 3024 - protein, 16 aa, Homo sapiens
VIISSVFSFVLLSCIH

SEQ ID NO: 3025 - protein, 319 aa, Homo sapiens
MQTCPLAFPGHVSQALGTLLFLAASLSAQNEGWDSPICTEGVVSVSWGENTVMSCNISNAFSHVNIKLRAHGQESAIFNEVAPGSGRRGTAGDQRRPGLRAGAQQGLSRASAELWTPDSEPTPRPLALVFKPSPLGALELLSPQPLFHMPQTHSRLQGREDTGEPALSADLGWRGLGLSSHPEGTDTGLLGRLGLCVTHSWVRADPSPPPPRSSKLCFLSFQNGTTSPPQHPTYQDACPSLCPHQTHRPGLPFCHPRLVRPQVWGPLSPLPGLRAQVRGPLPEPQTHSSSGLWGALATYLSLGYEQALGALPRQPRGPR

SEQ ID NO: 3026 - protein, 30 aa, Homo sapiens
MSISVFSLLLSFLIDGSFSLLPRGCQNFAS

SEQ ID NO: 3027 - protein, 60 aa, Homo sapiens
FYSFFLPHKGLVLFNYTGASSSFLFPSSELPAEILPQLIDKKILIPRSEFRNILINESSC

SEQ ID NO: 3028 - protein, 49 aa, Homo sapiens
MSLTQEPRGRQRRTKVINLHLFLFLFFFFFSSVVTSFPLSFFILPGPLP

SEQ ID NO: 3029 - protein, 8 aa, Homo sapiens
MTTWPTCS

SEQ ID NO: 3030 - protein, 158 aa, Homo sapiens
MGSQALPPGPMQTLIFFDMEATGLPFSQPKVTELCLLAVHRCALESPPTSQGPPPTVPPPPRVVDKLSLCVAPGKACSPAASEITGLSTAVLAAHGRQCFDDNLANLLLAFLRRQHSPGAWWHTMVTATTSPCSKQSWLCWASPVLWMVPSVWIASLR

SEQ ID NO: 3031 - protein, 42 aa, Homo sapiens
MAVAAWVMSVSLHLGFPWALSRQRHPQSHHHCESFGSFSIWA

SEQ ID NO: 3032 - protein, 22 aa, Homo sapiens
LAVLLPQRVLLSVFLCLLPLQR

SEQ ID NO: 3033 - protein, 94 aa, Homo sapiens [sequence omitted]

SEQ ID NO: 3034 - protein, 32 aa, Homo sapiens
MPIKIYFLLVISTLFLILTFITGNVPVHVGSR

SEQ ID NO: 3035 - protein, 28 aa, Homo sapiens
MDFLLFLSGSSSFLSLFLFIYLFIYFAV

SEQ ID NO: 3036 - protein, 49 aa, Homo sapiens
MGALCVHCCILAFCTYGSGISLFPYLLICLRGRNIHYAMTIPVLVNVPV

SEQ ID NO: 3037 - protein, 31 aa, Homo sapiens
MYKEIPVKLFCLMFYWTKVVVCMECSSSVYR

SEQ ID NO: 3038 - protein, 25 aa, Homo sapiens
RKWWPQDIHLTVAVATLWSSSGHQW

SEQ ID NO: 3039 - protein, 46 aa, Homo sapiens
  SITE (36): Xaa equals any of the naturally occurring L-amino acids
MNVTVTLPKYHLALIWLLFHFGWALLSVCSKTVLMXLSNVHNAVIG

SEQ ID NO: 3040 - protein, 49 aa, Homo sapiens
MVLVTWPLFTAPFASTSCCAGLEVATMACFKEGNSGTVAPSGVEDSELP

SEQ ID NO: 3041 - protein, 34 aa, Homo sapiens
MCVTFLSACCIYAFYLLLFSLFIQVTKRMLEQAW

SEQ ID NO: 3042 - protein, 31 aa, Homo sapiens
MKPHLHLPLLFLPTLSNITFTLNFSVYRKEN

SEQ ID NO: 3043 - protein, 32 aa, Homo sapiens
MIQHVVFCVWLLSFSIFKLHLSSSLCRYCIAG

SEQ ID NO: 3044 - protein, 216 aa, Homo sapiens
  SITE (101): Xaa equals any of the naturally occurring L-amino acids
MEMRSVLRKAGSPRKARRARLNPLVLLLDAALTGELEVVQQAVKEMNDPSQPNEEGITALHNAICGANYSIVDFLITAGANVNSPDSHGWTPLHCAASCNXTVICMALVQHGAAIFATTLSDGATAFEKCDPYREGYADCATYLADVEQSMGLMNSGAVYALWDYSAEFGDELSFREGESVTVLRRDGPERPTGGGPRCTARRATCRGTTSGCSPG

SEQ ID NO: 3045 - protein, 36 aa, Homo sapiens
MLLWLWSGPGMAVGPCRGVALLARSGMCSAEAVNSW

SEQ ID NO: 3046 - protein, 59 aa, Homo sapiens
MCVCVYVCACLCPRPCVPHTAPLSSVLPRDPSELACGAREAPWMGGGATGRLEGLHQAH

SEQ ID NO: 3047 - protein, 55 aa, Homo sapiens [sequence omitted]

SEQ ID NO: 3048 - protein, 347 aa, Homo sapiens
MFYCTRTLPNVLALPVVLLALAAWLRHEWARFIWLSAFAIIVFRVELCLFLGLLLLLALGNRKVSVVRALRHAVPAGILCLGLTVAVDSYFWRQLTWPEGKVLWYNTVLNKSSNWGTSPLLWYFYSALPRGLGCSLLFIPLGLVDRRTHAPTVLALGFMALYSLLPHKELRFIIYAFPMLNITAARGCSYLLNNYKKSWLYKAGSLLVIGHLVVNAAYSATALYVSHFNYPGGVAMQRLHQLVPPQTDVLLHIDVAAAQTGVSRFLQVNSAWRYDKREDVQPGTGMLAYTHISWRRPWAPGPLQGHTPGPGQRRGDHRCESEPDPTAPFNVHLQTKLVLLERLPRPS

SEQ ID NO: 3049 - protein, 28 aa, Homo sapiens
PFALSLQRVPFVLPSPQVASLPLGHSRG

SEQ ID NO: 3050 - protein, 410 aa, Homo sapiens
  SITE (83): Xaa equals any of the naturally occurring L-amino acids
MADSSGRGAGKPATGPTNSSSAKKKDKRVQGGRVIESRYLQYEKKTTQKAPAGDGSQTRGKMSEGGRKSSLLQKSKADSSGVXKGDLQSTLLEGHGTAPPDLDLSAINDKSIVKKTPQLAKTISKKPESTSFSAPRKKSPDLSEAMEMMESQTLLLTLLSVKMENNLAEFERRAEKNLLIMCKEKEKLQKKAHELKRRLLLSQRKRELADVLDAQIEMLSPFEAVATRFKEQYRTFATALDTTRHELPVRSIHLEGDGQQLLDALQHELVTTQRLLGELDVGDSEENVQVLDLLSELKDVTAKKDLELRRSFAQVLELSAEASKEAALANQEVWEETQGMAPPSRWYFNQDSACRESGGAPKNTPLSEDDNPGASSAPAQATFISPSEDFSSSSQAEVPPSLSRSGRDLS

SEQ ID NO: 3051 - protein, 66 aa, Homo sapiens
MFCWCGLCTSGMVTTGGSPQKHSFFYTSSQGHVSCPSLPGCGQKVICSWPSGGGGGPESEEMAQGQ

SEQ ID NO: 3052 - protein, 66 aa, Homo sapiens; identical to SEQ ID NO: 3051

SEQ ID NO: 3053 - protein, 29 aa, Homo sapiens
GFLGILYLTIFILYQTHLQFLGLLVKTFF

SEQ ID NO: 3054 - protein, 83 aa, Homo sapiens
PPDSRKVLRLNGVSSVYAALALHLRVPGRHLSLGFIFHGDMTCWLKHYSVLFLVGTGTELELFWSVPSYLKMLCCTIILKNYK

SEQ ID NO: 3055 - protein, 61 aa, Homo sapiens [sequence omitted]

SEQ ID NO: 3056 - protein, 36 aa, Homo sapiens
CVCVFICFLPSQFFSPLPTTTMTPSRETINVPIMFV

SEQ ID NO: 3057 - protein, 61 aa, Homo sapiens
MTIMFPQLFYFPTSFAVLSVAGRRKCCWLAQKKLLLLRLLLLSAISVTIETGAVYARGAGS

SEQ ID NO: 3058 - protein, 7 aa, Homo sapiens
MGCIIAT

SEQ ID NO: 3059 - protein, 11 aa, Homo sapiens
MFSPHMYICHM

SEQ ID NO: 3060 - protein, 16 aa, Homo sapiens
MRMCVCTSLSLCGMCV

SEQ ID NO: 3061 - protein, 47 aa, Homo sapiens
MSSRPVLWLMLLVGWMWIKKLCNTGGTQMCLGLGTAPTFLRQRPLLQ

SEQ ID NO: 3062 - protein, 31 aa, Homo sapiens
MTSAFLIHLTLVLVPTVNKTQTLGSKISCSR

SEQ ID NO: 3063 - protein, 8 aa, Homo sapiens
SWLKKLYF

SEQ ID NO: 3064 - protein, 42 aa, Homo sapiens
MEVLQSVLLLLLFSSLISSVFLISVVISGQLMAAQGTGICLA

SEQ ID NO: 3065 - protein, 19 aa, Homo sapiens
MFTLLFFLVTYILITGMLK

SEQ ID NO: 3066 - protein, 39 aa, Homo sapiens
MLQLFLASFIVLLQILIPFVLVMCAFEAVQLTTQLSSKR

SEQ ID NO: 3067 - protein, 305 aa, Homo sapiens
MESHVFLKAKTRDEYLSLVARLIIHFRDIHNKKSQASVSDPMNALQSLTGGPAAGAAGIGMPPRGPGQSLGGMGSLGAMGQPMSLSGQPPPGTSGMAPHSMAVVSTATPQTQLQLQQVALQQQQQQQQFQQQQQAALQQQQQQQQQQQFQAQQSAMQQQFQAVVQQQQQLQQQQQQQQHLIKLHHQNQQQIQQQQQQLQRIAQLQLQQQQQQQQQQQQQQQQALQAQPPIQQPPMQQPQPPPSQALPQQLQQMHHTQHHQPPPQPQQPPVAQNQPSQLPPQSQTQPLVSQAQALPGQMLYTQPPI

SEQ ID NO: 3068 - protein, 4 aa, Homo sapiens
MVCA

SEQ ID NO: 3069 - protein, 21 aa, Homo sapiens
MYFIPLLHIGQIAMCMHILFS

SEQ ID NO: 3070 - protein, 21 aa, Homo sapiens
MYFIPLLHIGQIAMCMHILFS

SEQ ID NO: 3071 - protein, 25 aa, Homo sapiens
MKGADKSSTLILCFLSVLPCCHLHG

SEQ ID NO: 3072 - protein, 25 aa, Homo sapiens
MKGADKSSTLILCFLSVLPCCHLHG

SEQ ID NO: 3073 - protein, 39 aa, Homo sapiens
  SITE (2): Xaa equals any of the naturally occurring L-amino acids
MXHLGLWGVILKLVVPGNHGPLALINPSFNGLLHPDTKV

SEQ ID NO: 3074 - protein, 9 aa, Homo sapiens
MEFLSLELA

SEQ ID NO: 3075 - protein, 44 aa, Homo sapiens
MIRLSAMLLVEMHVNLPASLSVFLDSGQLKSPNTFTFATQRGSS

SEQ ID NO: 3076 - protein, 39 aa, Homo sapiens
MVFIFLLSILFVSALVFITSFLLLALDLACSSLFRFLVV

SEQ ID NO: 3077 - protein, 46 aa, Homo sapiens
MDGWHEILKKILLLFQKCHSSPLKVQETWLSSVVYGGAWASESGQR

SEQ ID NO: 3078 - protein, 95 aa, Homo sapiens [sequence omitted]

SEQ ID NO: 3079 - protein, 194 aa, Homo sapiens
MLAAVGRPKPRSPLSSLSTLQLYLFCSSTRRADMDPNPRAALERQQLRLRERQKFFEDILQPETEFVFPLSHLHLESQRPPIGSISSMEVNVDTLEQVELIDLGDPDAADVFLPCEDPPPTPQSSGVDNHLEELSLPVPTSDRTTSRTSSSSSSDSSTNLHSPNPSDDGADTPLAQSDEEEERGDGGAEPGACS

SEQ ID NO: 3080 - protein, 22 aa, Homo sapiens
MGVRSRAWAFLTFTSTLATRSR

SEQ ID NO: 3081 - protein, 58 aa, Homo sapiens
MPGVGWAQALKSPFCLVVLHLALPGLWCRLGVDLSSVIYVCCLAPRWLCGQVLAKDII

SEQ ID NO: 3082 - protein, 58 aa, Homo sapiens; identical to SEQ ID NO: 3081

SEQ ID NO: 3083 - protein, 58 aa, Homo sapiens; identical to SEQ ID NO: 3081

SEQ ID NO: 3084 - protein, 443 aa, Homo sapiens
MAHHLYVLQALMLGLLEPRMRTPLDPYSQEQREQLQVLRQAAFEVEGESSGAGLSADRRRSLCAREFRKLGFSNSNPAQDLERVPPGLLALDNMLYFSRNAPSAYSRFVLENSSREDKHECPFARGSIQLTVLLCELLRVGEPCSETAQDFSPMFFGQDQSFHELFCVGIQLLNKTWKEMRATQEDFDKVMQVVREQLARTLALKPTSLELFRTKVNALTYGEVLRLRQTERLHQEGTLAPPILELREKLKPELMGLIRQQRLLRLCEGTLFRKISSRRRQDKLWFCCLSPNHKLLQYGDMEEGASPPTLESLPEQLPVADMRALLTGKDCPHVREKGSGKQNKDLYELAFSISYDRGEEEAYLNFIAPSKREFYLWTDGLSALLGSPMGSEQTRLDLEQLLTMETKLRLLELENVPIPERPPPVPPPPTNFNFCYDCSIAEP

SEQ ID NO: 3085 - protein, 31 aa, Homo sapiens
MKIPLYWRSHEMGLSYTCLLWHAIWQQGWGG

SEQ ID NO: 3086 - protein, 31 aa, Homo sapiens
MLLPLCWSSSYSIFIFWATERDSCLEKKKKK

SEQ ID NO: 3087 - protein, 32 aa, Homo sapiens
LIVLLVVFLPQSSDSSSAPRTQDAGIASGPGN

SEQ ID NO: 3088 - protein, 51 aa, Homo sapiens
MPGRRPPLAMWQPLLLCLTSAFQRAPILLSHKINLMPSGKKKKKKKKKKKK

SEQ ID NO: 3089 - protein, 37 aa, Homo sapiens
MPRPACLLIFISGHTLLALPVCPAPAHAPPPRAASVL

SEQ ID NO: 3090 - protein, 59 aa, Homo sapiens
MTRLLVALLFSSFLKLREVESISKIKNKMSKRQDLRTGWACSNMTACTLWGKIYWSSQV

SEQ ID NO: 3091 - protein, 39 aa, Homo sapiens
KAALSGSEIMCHFWWVAGPAIANYHKQKCILLYNSGGKV

SEQ ID NO: 3092 - protein, 120 aa, Homo sapiens
QGRVVPVHLVLLPGVLIPHGPPMCGPDPKYPQDNHEHQEADAHHDHNCRSAGDDCGRMRGRDARSLGPEGHCALDLLGCAWSKRAGQHASAEPTGQEEIPGKARHGPPTWLGHVLLHSCG

SEQ ID NO: 3093 - protein, 45 aa, Homo sapiens
  SITE (36): Xaa equals any of the naturally occurring L-amino acids
  SITE (37): Xaa equals any of the naturally occurring L-amino acids
  SITE (41): Xaa equals any of the naturally occurring L-amino acids
MFLQQLWWQLSLRNLWCVVGSYQNKKCRHFPFFWGXXVGGXALPS

SEQ ID NO: 3094 - protein, 20 aa, Homo sapiens
MACFLAVVMWVFLPVGSCPL

SEQ ID NO: 3095 - protein, 44 aa, Homo sapiens [sequence omitted]

SEQ ID NO: 3096 - protein, 35 aa, Homo sapiens
MALNTISHQIYLPPGPLPCPWASCILLPTCTYVWT

SEQ ID NO: 3097 - protein, 33 aa, Homo sapiens
TKPPLSVLFWGVGWVCVWGWVGMGNPSPSRSWG

SEQ ID NO: 3098 - protein, 39 aa, Homo sapiens
MIILNTIKVLILFVFVFMMCDNILGITQKELYFFKKFTF

SEQ ID NO: 3099 - protein, 29 aa, Homo sapiens
MWLQGLPAAILHAAGSAFHDPRQQPGPHS

SEQ ID NO: 3100 - protein, 33 aa, Homo sapiens
MIGCVIPYILILNYIIGGSFCFTLMCPGDSCLA

SEQ ID NO: 3101 - protein, 48 aa, Homo sapiens
MMVIVCVIVQKALSVPSPLQGTLLTPILQGLLQMPFSPGKPFRILSWI

SEQ ID NO: 3102 - protein, 49 aa, Homo sapiens
MHTHGSCLSMHWFCHWRPGIRPCWGAGAVRLRLILARAHTSKGQAGSAW

SEQ ID NO: 3103 - protein, 34 aa, Homo sapiens
MAACCSALLLLFPPCFHLCSLEAFPSWCVQDSSW

SEQ ID NO: 3104 - protein, 34 aa, Homo sapiens; identical to SEQ ID NO: 3103

SEQ ID NO: 3105 - protein, 21 aa, Homo sapiens
LLLHSVHLLLYEMTLRPPILL

SEQ ID NO: 3106 - protein, 36 aa, Homo sapiens
MTQNDLAAVLLRWRRPGLGWCSRLLTACCLPTLPAS

SEQ ID NO: 3107 - protein, 4 aa, Homo sapiens
MCAF

SEQ ID NO: 3108 - protein, 29 aa, Homo sapiens
PQVVCRVVFTPCQSPHSPARQTVFNSFHG

SEQ ID NO: 3109 - protein, 49 aa, Homo sapiens
EWGGLRKLIICACFPFTFCHDCKFLKPPQPFLTANRTVSKSNFLSFSLR

SEQ ID NO: 3110 - protein, 36 aa, Homo sapiens
CLQIASCFPFCQILIIFFFQKGKKKHKQPNFIFHIV

SEQ ID NO: 3111 - protein, 10 aa, Homo sapiens
MKTFVCAFDL

SEQ ID NO: 3112 - protein, 31 aa, Homo sapiens
MKMTFMYGRLTFFLSLPTLYLCYFYLPNKIP

SEQ ID NO: 3113 - protein, 84 aa, Homo sapiens
  SITE (25): Xaa equals any of the naturally occurring L-amino acids
MIWSAGRWTYAVLFHCCQTLLPWKXPLEKVWHHQDGQVGSGLSVQPRTQPPVSWLAVPGLAPFQQLSRPGRSGLSCSDSYSLIL

SEQ ID NO: 3114 - protein, 46 aa, Homo sapiens
MQVKVPSGRLAVTPFRLLAVALWTVSFLPLPLRRVVGTATSRLPDR

SEQ ID NO: 3115 - protein, 10 aa, Homo sapiens
SMVWLLGWCL

SEQ ID NO: 3116 - protein, 35 aa, Homo sapiens
MKSGCLKESGTPPFSCSCSCSPHDVTCLLSLCVLP

SEQ ID NO: 3117 - protein, 28 aa, Homo sapiens
MVNMGSAWPFLYGYFSLKMVLMFIHIYS

SEQ ID NO: 3118 - protein, 7 aa, Homo sapiens
MVDEKGF

SEQ ID NO: 3119 - protein, 4 aa, Homo sapiens
GFDL

SEQ ID NO: 3120 - protein, 60 aa, Homo sapiens [sequence omitted]

SEQ ID NO: 3121 - protein, 27 aa, Homo sapiens
MPPSPLGWCCGSIWWLYRQWVAAQLKN

SEQ ID NO: 3122 - protein, 119 aa, Homo sapiens
MLPLPSDAGLALLLQVCFSHSCGCRNLIYREEPVAAAAPATAALTVLTTHLGQPSLAGALVASHFPFPSLWLRGGVRGWRGRAAYHGLGLEEDEFVDLNKEFVILKKKKKKKKKKKKKK

SEQ ID NO: 3123 - protein, 6 aa, Homo sapiens
MAARGL

SEQ ID NO: 3124 - protein, 36 aa, Homo sapiens
VCSNMRSRSGTSSPARWGPATSRITWPSCSITVREP

SEQ ID NO: 3125 - protein, 49 aa, Homo sapiens
  SITE (34): Xaa equals any of the naturally occurring L-amino acids
  SITE (38): Xaa equals any of the naturally occurring L-amino acids
  SITE (39): Xaa equals any of the naturally occurring L-amino acids
MGLVRYVSISLCWFFCLQKPRFLFLFEKKKKKKXGGLXXGPGAHGFSHP

SEQ ID NO: 3126 - protein, 49 aa, Homo sapiens; identical to SEQ ID NO: 3125
  SITE (34): Xaa equals any of the naturally occurring L-amino acids
  SITE (38): Xaa equals any of the naturally occurring L-amino acids
  SITE (39): Xaa equals any of the naturally occurring L-amino acids

SEQ ID NO: 3127 - protein, 43 aa, Homo sapiens
MNQCRCIQFFFWKWKLHFIIVILRVIQDFEKSFGKNRKMLEKI

SEQ ID NO: 3128 - protein, 12 aa, Homo sapiens
MSCTLCFGSYVL

SEQ ID NO: 3129 - protein, 32 aa, Homo sapiens
MKSLLPGFGYCQSSPASFLYPFLSFPSLPRSS

SEQ ID NO: 3130 - protein, 43 aa, Homo sapiens [sequence omitted]

SEQ ID NO: 3131 - protein, 41 aa, Homo sapiens
MTISSQFLFFIFYFHLYVFEGRGKIKVCAHYTILVFPKSVP

SEQ ID NO: 3132 - protein, 33 aa, Homo sapiens
MGLVRYVSISLCWFFCLQKPRFLFLFEKKKKKK

SEQ ID NO: 3133 - protein, 66 aa, Homo sapiens
MGLQDNRILSPFLAIWVLFFKSFGLGRALFFFCFDIFIFSAVTGCQHNLHQLEIRNQKKKKKILTT

SEQ ID NO: 3134 - protein, 39 aa, Homo sapiens
MGRLGRELRTAYLLFILRLSYTSAGLSLRGTISSVSQPQ

SEQ ID NO: 3135 - protein, 30 aa, Homo sapiens
MWILSCIFMINVIVAVLPMRVGLEGLNNLS

SEQ ID NO: 3136 - protein, 38 aa, Homo sapiens
MPLNSLPQLAFHWELPLQFLVVLVCMTLGITVHHPHQS

SEQ ID NO: 3137 - protein, 243 aa, Homo sapiens
LAALSLHAAGSVLGVPPRAAVHPARRGRPAAGPGGLLHLPGGQPPEGPVPPHGWALPHLGQEAQGHRVLLHIRRRAEAPQQAAGVGLLGRGPPLQLRRRPDGQPGLLPGLWRWPPAALLLHHLHGHPADPPLPPGRAPLRQQVRPGLGALHRRSALPPAAWNLLRARPREKPCGAVKSVFCQVHGGWHPSSNSRSLSFLICKLERAQHLAGVQYLITLCSLLLPSREFRVSSTAVLPAQTDFL

SEQ ID NO: 3138 - protein, 33 aa, Homo sapiens
MLCSWFFLPLFLTILNIATTSTLCKHQVCAPYT

SEQ ID NO: 3139 - protein, 44 aa, Homo sapiens
VSLSCFLTLLPGLLCVHLRLAWSKQVRPLLLYSLVLFWHLVKLA

SEQ ID NO: 3140 - protein, 117 aa, Homo sapiens
  SITE (117): Xaa equals any of the naturally occurring L-amino acids
MDLSHLLALWCHPGLHCCWTCCSSPSQTTSFQSPFQFLLHPPPMASNSAALCSPLSVLSPEFHLLTRPGPLLPFPQALQLFFRTESLNSPFILLLLHLQKKKKKKKKKKKKKKKKKX

SEQ ID NO: 3141 - protein, 39 aa, Homo sapiens
MYLSISIFFFGFCIISCKCIVKNFIFGVAMRGGEVRLCT

SEQ ID NO: 3142 - protein, 32 aa, Homo sapiens
MPRGFTWLRYLGIFLGVALGNEPSENVALDAE

SEQ ID NO: 3143 - protein, 31 aa, Homo sapiens
MQCIIIFSILFCLFFCSCLTQNIKLVLQPTI

SEQ ID NO: 3144 - protein, 50 aa, Homo sapiens
MWIPLRPAPLHWSWRLIWEAVCALAPEGTWSTPHLENPHPEHSFPGAPLT

SEQ ID NO: 3145 - protein, 85 aa, Homo sapiens
MVGGPPFVGPVGFGPGDRSHLDSPEAREPCSCGGQLWPPRGPLSCVQPSSPTCYREQQPAPALWPYGPLTRPSWAPLCLGPLDHP

SEQ ID NO: 3146 - protein, 67 aa, Homo sapiens
MVSLALTLTIPSPILWTICMAILRVRTPCERPSSSCIQTGQTVTTLRPAVKHWWHSSLTTSGWSPQW

SEQ ID NO: 3147 - protein, 28 aa, Homo sapiens
MYIKLLIVLLESFALLSCLMEQFLMEMC

SEQ ID NO: 3148 - protein, 39 aa, Homo sapiens
MIWALGNLEVLGLCLCSSIFIRKESIGLLQGINPFVTYH

SEQ ID NO: 3149 - protein, 54 aa, Homo sapiens [sequence omitted]

SEQ ID NO: 3150 - protein, 38 aa, Homo sapiens
MSLNFVRIFIIVFHICEISSFFRVHRVSLFYRFLKMRF

SEQ ID NO: 3151 - protein, 179 aa, Homo sapiens
MGLIFAKLWSLFCNQEHKVIIVGLDNAGKTTILYQFLMNEVVHTSPTIGSNVEEIVVKNTHFLMWDIGGQESLRSSWNTYYSNTEFIILVVDSIDRERLAITKEELYRMLAHEDLRKAAVLIFANKQDMKGCMTAAEISKYLTLSSIKDHPWHIQSCCALTGEGLCQGLEWMTSRIGVR

SEQ ID NO: 3152 - protein, 81 aa, Homo sapiens
MFNFGSPMWLFVRSGLLKLDLARYSLPCWRFIPTNQLCGLWQPNGKWKIDCLQKAQGNYFFAHCAFIQSAQNFIKNTLGWS

SEQ ID NO: 3153 - protein, 55 aa, Homo sapiens
MFIYESNIANLSLIILFLKHQVYSQCVALMTISWERNRTAIMTNGKDSKAVSDGK

SEQ ID NO: 3154 - protein, 29 aa, Homo sapiens
MSLLPSMYLLCSTVEIFLPIFKLGFFFCY

SEQ ID NO: 3155 - protein, 31 aa, Homo sapiens
MTGCLCTVCIWLSRCLCAESMPPVGIRFYLF

SEQ ID NO: 3156 - protein, 33 aa, Homo sapiens
MSLWMHRLTSLSLQILSSAEGIIISHRTVMKTK

SEQ ID NO: 3157 - protein, 24 aa, Homo sapiens
MRNQGAWLWVSSICLACGASCGDQ

SEQ ID NO: 3158 - protein, 43 aa, Homo sapiens
MPARTSGKQSHICENSGRRCSLLLLVKCLERRGRSPTKGTPSG

SEQ ID NO: 3159 - protein, 32 aa, Homo sapiens
MMNYLLKLFTVPLPAICFLFFFSPAPSVCHMF

SEQ ID NO: 3160 - protein, 56 aa, Homo sapiens
MPTWVLCGRTSLLSHSWCGSGQQMKTPLPTTRSPTALSVHLSLAATSTSACTRAME

SEQ ID NO: 3161 - protein, 63 aa, Homo sapiens
MLPQMYLKSRHSFTKEEEAVLFCLIALVTKLMFTSLSLAPGSALILQKTELKSQAYFPVGLCL

SEQ ID NO: 3162 - protein, 34 aa, Homo sapiens
GLVVLFLPSSLALLLKSHRLRMRRAVKDTSSAAF

SEQ ID NO: 3163 - protein, 42 aa, Homo sapiens
MCGVCLCLLPRTITSFPFSHITALLAAAVVCCKSELINPTEY

SEQ ID NO: 3164 - protein, 100 aa, Homo sapiens
MWHLLVFIVCVFFVYYTLGNFVLPKKKKKGSVMSDTQEKQISVVSLKYNFKGHYQQQGFFYTLKTLCYISLPFSYFGVLLLLYNGINGNVIQPLNCHYYI

SEQ ID NO: 3165 - protein, 41 aa, Homo sapiens
WGCQKWRLQPPRVSSSGAPCFVPPSCAIQRGPPGLAETPPG

SEQ ID NO: 3166 - protein, 3 aa, Homo sapiens
MEM

SEQ ID NO: 3167 - protein, 30 aa, Homo sapiens
MPGVFFFFVFFFNSYFGCALVSQCSFNLHF

SEQ ID NO: 3168 - protein, 60 aa, Homo sapiens
MRSVPAILQMLWILRRSTNWTLYLILHGCPAVVCAWPRQHAPWGMVRLWVPTAAPAALSP

SEQ ID NO: 3169 - protein, 38 aa, Homo sapiens
MEKTLKVLFLFSHPATINTVDFCEMCGVFSPDTKQVLT

SEQ ID NO: 3170 - protein, 21 aa, Homo sapiens
VHKKHSTGTKSFSKPAVFGEH

SEQ ID NO: 3171 - protein, 57 aa, Homo sapiens
MALDSSTLVALLGTAPLLAAFTAGVECLWLFQALSASCPWIDHSGVWRTVALFSQLH

SEQ ID NO: 3172 - protein, 51 aa, Homo sapiens
MAPCCWALWVGSAPWEPASMPGPHSSHSCWSLAPWPLCSSILWVWGRRTSA

SEQ ID NO: 3173 - protein, 35 aa, Homo sapiens
MLAVLSLCNFCRCSLGRELFFRRLAKSQVLSLDLR

SEQ ID NO: 3174 - protein, 186 aa, Homo sapiens
LAGRLPHPGRPAAQLLRVCRTHEAPGGHGPAGLGAAATLPAPARPERLPGPRLCALRRGRLGHGAGALRPARVRGELRQGPGRAQTPRPPSCSPSWASLTSSRGRPRASWRGLGRCGPTPSTSSASPCSSTASRTWRALRRATTAASWSSASSLASPTAWWGPCSSRCSWPSWAPTSSPVPLAWCC

SEQ ID NO: 3175 - protein, 57 aa, Homo sapiens
MTLLLLSLTPHPNAHCCCPKRTYQCVDVSRKVPFLFGLVVLDCFLTSFNFSHFLTDY

SEQ ID NO: 3176 - protein, 23 aa, Homo sapiens
EKSRKVGHSWIYFFFSLINIFPY

SEQ ID NO: 3177 - protein, 453 aa, Homo sapiens
MSIVTVQLGQCGNQIGFEVFDALLSDSHSSQGLCSMRENEAYQASCKERFFSEEENGVPIARAVLVDMEPKVINQTLSKAAQSGQWKYGQHACFCQKQGSGNNWAYGYSVHGPRHEESIMNIIRKEVEKCDSFSGFFIIMSMAGGTGSGLGAFVTQNLEDQYSNSLKMNQIIWPYGTGEVIVQNYNSILTLSHLYRSSDALLLHENDAIHKICAKLMNIKQISFSDINQVLAHQLGSVFQPTYSAESSFHYRRNPLGDLMEHLVPHPEFKMLSVRNIPHMSENSLAYTTFTWAGLLKHLRQMLISNAKMEEGIDRHVWPPLSGLPPLSKMSLNKDLHFNTSIANLVILRGKDVQSADVEGFKDPALYTSWLKPVNAFNVWKTQRAFSKYEKSAVLVSNSQFLVKPLDMIVGKAWNMFASKAYIHQYTKFGIEEEDFLDSFTSLEQVVASYCNL

SEQ ID NO: 3178 - protein, 21 aa, Homo sapiens
MRARPSPSPLRSWACRPPCCC

SEQ ID NO: 3179 - protein, 78 aa, Homo sapiens
MGHLIQRKKVHVFGDELSLVTLFRCIQNMPETLPNNSCYSAGIAKLEEGDELQLAIPRENAQISLDGDVTFFGALKLL

SEQ ID NO: 3180 - protein, 32 aa, Homo sapiens
MTQVTISKLGRLLLLALPLCPISCQYSQFSRE

SEQ ID NO: 3181 - protein, 35 aa, Homo sapiens
MDHFLVFFFLIGALNKYGTWTKRFSGILWKLTFLT

SEQ ID NO: 3182 - protein, 68 aa, Homo sapiens
FFFFFFFKLHGTEFNVNHEMRQKPPPGRWEDPAPNQTLEHAALNQTPGRGCVVMHRLRLRGEDGKTQP

SEQ ID NO: 3183 - protein, 50 aa, Homo sapiens
MAVALETVLIIFSLFGTTLTKLVVLLLHVQKLDILYMQQFSYATMRQEEH

SEQ ID NO: 3184 - protein, 8 aa, Homo sapiens
MKLYFLMC

SEQ ID NO: 3185 - protein, 97 aa, Homo sapiens
RQPCPGLWPPPFYSPCGLGLCSLHDRPALVVGAHRVPTPGLHCGCLRVPADDRLPPGAAPTLQRGRECEAGPCEAQGADLSGQGPSPHSAALALSIH

SEQ ID NO: 3186 - protein, 310 aa, Homo sapiens
  SITE (127): Xaa equals any of the naturally occurring L-amino acids
MVYKTLFALCILTAGWRVQSLPTSAPLSVSLPTNIVPPTTIWTSSPQNTDADTASPSNGTHNNSVLPVTASAPTSLLPKNISIESREEEITSPGSNWEGTNTDPSPSGFSSTSGGVHLTTTLEEHSXGTPEAGVAATLSQSAAEPPTLISPQAPASSPSSLSTSPPEVFSASVTTNHSSTVTSTQPTGAPTAPESPTEESSSDHTPTSHATAEPVPQEKTPPTTVSGKVMCELIDMETTTTFPRVIMQEVEHALSSGSIAAITVTVIAVVLLVFGVAAYLKIRHSSYGRLLDDHDYGSWGNYNNPLYDDS

SEQ ID NO: 3187 - protein, 64 aa, Homo sapiens
MESGQVSLFGLVFSLMPCCQHIQKGAACPKTVNLRRPQLSGLLISWRFLKCILLDFNGWVWKSP

SEQ ID NO: 3188 - protein, 16 aa, Homo sapiens
MALSFIFPSDFCPSFL

SEQ ID NO: 3189 - protein, 16 aa, Homo sapiens
MVVLFLFPITVLALKL

SEQ ID NO: 3190 - protein, 31 aa, Homo sapiens
MSASLNHIKVSSVWLLLLFEMVLCFGCGLKL

SEQ ID NO: 3191 - protein, 39 aa, Homo sapiens
MKEQLAQFLKVTSSFRLLLLLTWMGLGIAPLTLCYTAIT

SEQ ID NO: 3192 - protein, 39 aa, Homo sapiens; identical to SEQ ID NO: 3191

SEQ ID NO: 3193 - protein, 39 aa, Homo sapiens; identical to SEQ ID NO: 3191

SEQ ID NO: 3194 - protein, 35 aa, Homo sapiens
MLRVMNLFHLLFEIATCLICLSISSKNSGENSMIE

SEQ ID NO: 3195 - protein, 37 aa, Homo sapiens
MLDFLRSQLKLLSYLLLGFLLLRQRGIGRTSEIFVNS

SEQ ID NO: 3196 - protein, 23 aa, Homo sapiens
MSQACLQLAMLSPSPLPGGTTAK

SEQ ID NO: 3197 - protein, 310 aa, Homo sapiens
  SITE (307): Xaa equals any of the naturally occurring L-amino acids
MMFLAVGIYALFVSTNYWERYYTLVPSAVALGMAIVPLWASMGNYITRMAQKYHEYSHYKEQDGQGMKQRPPRGSHAPYLLVFQAIFYSFFHLSFACAQLPMIYFLNHYLYDLNHTLYNVQSCGTNSHGILSGFNKTVLRTLPRSGNLIVVESVLMAVAFLAMLLVLGLCGPLTGPRRRSICAAWAGATSSSCPSSTCVTTACATSCLSLSTAASRCSLPALVSPWAMACARWGWSGWLTSSWLTAWAPQPPHSWACWACGCHARCPWWPEQGCTCCSPSSSFSGPLCLGSCNTAGSSMWQLPFGVXAVP

SEQ ID NO: 3198 - protein, 310 aa, Homo sapiens
MMFLAVGIYALFVSTNYWERYYTLVPSAVALGMAIVPLWASMGNYITRMAQKYHEYSHYKEQDGQGMKQRPPRGSHAPYLLVFQAIFYSFFHLSFACAQLPMIYFLNHYLYDLNHTLYNVQSCGTNSHGILSGFNKTVLRTLPRSGNLIVVESVLMAVAFLAMLLVLGLCGPLTGPRRRSICAAWAGATSSSCPSSTCVTTACATSCLSLSTAASRCSLPALVSPWAMACARWGWSGWLTSSWLTAWAPQPPHSWACWACGCHARCPWWPEQGCTCCSPSSSFSGPLCLGSCNTAGSSMWQLPFGVWAVP

SEQ ID NO: 3199 - protein, 370 aa, Homo sapiens
  SITE (370): Xaa equals any of the naturally occurring L-amino acids
MMFLAVGIYALFVSTNYWERYYTLVPSAVALGMAIVPLWASMGNYITRMAQKYHEYSHYKEQDGQGMKQRPPRGSHAPYLLVFQAIFYSFFHLSFACAQLPMIYFLNHYLYDLNHTLYNVQSCGTNSHGILSGFNKTVLRTLPRSGNLIVVESVLMAVAFLAMLLVLGLCGAAYRPTEEIDLRSVGWGNIFQLPFKHVRDYRLRHLVPFFIYSGFEVLFACTGIALGYGVCSVGLERLAYLLVAYSLGASAASLLGLLGLWLPRPVPLVAGAGVHLLLTFILFFWAPVPRVLQHSWILYVAAALWGVGSALNKTGLSTLLGILYEDKERQDFIFTIYHWWQAVAIFTVYLGSSLHMKAKLAVLLVTLVAX

SEQ ID NO: 3200 - protein, 137 aa, Homo sapiens
  SITE (54): Xaa equals any of the naturally occurring L-amino acids
MVSVCFYFIRDYFWWLLTYTFFALMLQFLVMLTKCGFSFLKSCLGFIVFGFCEXFSHKIWKNSAFSSSVTAFCFCPPSFAILIERRPFYSLSCLLTSFFCFPFLCLSVLPSDYFIRTICQFPNSLFGFVSSVIRNIY

SEQ ID NO: 3201 - protein, 10 aa, Homo sapiens
MIQCCIMILL

SEQ ID NO: 3202 - protein, 39 aa, Homo sapiens [sequence omitted]

SEQ ID NO: 3203 - protein, 50 aa, Homo sapiens
MFLSSNFPIFSILFFAFPYFCLPVFHFKLLSSPNCFILPLPINLSIFVCV

SEQ ID NO: 3204 - protein, 50 aa, Homo sapiens
MFLPSNFPIFSILFFAFPYFCLPVFHFKLLSSPNCFILPLPINLSIFVCV

SEQ ID NO: 3205 - protein, 32 aa, Homo sapiens
MAKIHVMSINLYFLSPALLSMAMGLTPEGCKS

SEQ ID NO: 3206 - protein, 55 aa, Homo sapiens
MHAHIWPYLYMCAHIHMHLCTYMPIHTHTHTHAHTHQPQSHSFCGGTSGLRAAPG

SEQ ID NO: 3207 - protein, 23 aa, Homo sapiens
MAPIMRLLEAIFMTAIVPSVLQL

SEQ ID NO: 3208 - protein, 49 aa, Homo sapiens
HLPCKLVFFLSDKFWYCRLSPNHKVLHYGDLEESPQGEVPHDSLQDKRK

SEQ ID NO: 3209 - protein, 29 aa, Homo sapiens
VIVIVQLCIFYASYSAWHIVGAQLTLLKE

SEQ ID NO: 3210 - protein, 126 aa, Homo sapiens [sequence omitted]

SEQ ID NO: 3211 - protein, 52 aa, Homo sapiens
MHTACLCNAIIALLKVPLSFQRYFFPETTVYQHQACSVTIAPESCRAHCCPE

SEQ ID NO: 3212 - protein, 50 aa, Homo sapiens
MVSCLLRTARQHCVCEDVLHLLLCASQLLLLKQLSLLFGFLRLLASERHL

SEQ ID NO: 3213 - protein, 37 aa, Homo sapiens
MKRRERRWKWFFFFFFYFLSFFFFFFLVNSRFSSSKF

SEQ ID NO: 3214 - protein, 34 aa, Homo sapiens
MKNIIAISPKFLSWLGWGRFLLWTISGTYSMKSR

SEQ ID NO: 3215 - protein, 37 aa, Homo sapiens
MLCSLLLLFLLLFVIPKSPWQHTSGWFATCSERLIKN

SEQ ID NO: 3216 - protein, 75 aa, Homo sapiens
MQMLRKLFTAIRALFLAVCVLKVIVSLVSLGVGLRNLCGQSSQPLNEEGSEKRLLGENSVPPSPSREQTSTAIVL

SEQ ID NO: 3217 - protein, 35 aa, Homo sapiens
MLHLCSLLQGVLGKCRYVYYGKNSEGNRFIRDDQL

SEQ ID NO: 3218 - protein, 25 aa, Homo sapiens
FQCPCVHVSALQELAAGVLGGPRPV

SEQ ID NO: 3219 - protein, 9 aa, Homo sapiens
MHSCRNHDR

SEQ ID NO: 3220 - protein, 37 aa, Homo sapiens
MRFHILLIVLLLRMKNQQQILCWTCGLVKLLFLVLPV

SEQ ID NO: 3221 - protein, 36 aa, Homo sapiens
  SITE (16): Xaa equals any of the naturally occurring L-amino acids
  SITE (33): Xaa equals any of the naturally occurring L-amino acids
MRGLFFFSLLDKVLAXCNCLLSYSTAEMKQSFXCTD

SEQ ID NO: 3222 - protein, 31 aa, Homo sapiens
MDLQVCMGSKYWFMVLFLELLVGLYFGVVFG

SEQ ID NO: 3223 - protein, 85 aa, Homo sapiens
MPRSGPLSIPWPLWLPLGYVVCVREWCAGAVPYAPCVLCVSRHGSLRPMCAVCVLPVYVASSDADKVGNNPCQSGLGPDFVLFLT

SEQ ID NO: 3224 - protein, 207 aa, Homo sapiens [sequence omitted]

SEQ ID NO: 3225 - protein, 33 aa, Homo sapiens
MRYLIFLLLHLSFSWLQKIMAFTVFLFSFMSSF

SEQ ID NO: 3226 - protein, 34 aa, Homo sapiens
MWPIASLTYMGKPLALCSPAFLLCLVHAVSSQQP

SEQ ID NO: 3227 - protein, 31 aa, Homo sapiens
MKLFQYIQYTLSLMLLLLTVISFFFSFLYLH

SEQ ID NO: 3228 - protein, 31 aa, Homo sapiens; identical to SEQ ID NO: 3227

SEQ ID NO: 3229 - protein, 33 aa, Homo sapiens
MYVVTVYMCMSVVYACVSVCLYVCTTKEAAETL

SEQ ID NO: 3230 - protein, 55 aa, Homo sapiens
EILHRFLVLFCSFFVFCCFVIYLYTYKILLKIKKKKKSRSRIHWSRFSYNVLKTK

SEQ ID NO: 3231 - protein, 75 aa, Homo sapiens [sequence omitted]

SEQ ID NO: 3232 - protein, 6 aa, Homo sapiens
LKGIYL

SEQ ID NO: 3233 - protein, 12 aa, Homo sapiens
HETIVTWRPQLL

SEQ ID NO: 3234 - protein, 59 aa, Homo sapiens
MATLLLCPHVAFPLYVRAPATSILRGHQSYWIRVPPQQLHVNIISLKTLPPAGHGSSRL

SEQ ID NO: 3235 - protein, 24 aa, Homo sapiens
MFDLLFISTFILIFLASLDLEVNY

SEQ ID NO: 3236 - protein, 38 aa, Homo sapiens
MVFILTISYLLKGVMVITKAFRMQFLICCGHDHKKISQ

SEQ ID NO: 3237 - protein, 32 aa, Homo sapiens
MSMECFSICYVISDFFVQCFVTFIVEILYLPG

SEQ ID NO: 3238 - protein, 79 aa, Homo sapiens
MDDFISISLLSLAMLVGCYVAGIIPLAVNFSEERLKLVTVLGAGLLCGLLWQSSCLKEYMPFMKIFLRENTTKQVKHIM

SEQ ID NO: 3239 - protein, 55 aa, Homo sapiens
MTRLSFLGLFLLRPAPSWAHLRFTEVSGGPKSLLVFNFFLTIHFCGQFQQHCPYF

SEQ ID NO: 3240 - protein, 4 aa, Homo sapiens
MQST

SEQ ID NO: 3241 - protein, 30 aa, Homo sapiens
MYIRLFLIFCYLYAHCSEHSLYICPCSVVS

SEQ ID NO: 3242 - protein, 20 aa, Homo sapiens
MFLIFYLAKLDNLSLGKIKN

SEQ ID NO: 3243 - protein, 59 aa, Homo sapiens
STLFSILLSRLWGSFCQGQATRKVEVEITWYVSLWVPQLELPQLRKKMRHNDLECNWSK

SEQ ID NO: 3244 - protein, 30 aa, Homo sapiens
MLALNIFFLSLTSAINSTIGLQIQFTLGLN

SEQ ID NO: 3245 - protein, 34 aa, Homo sapiens
MESIYCRTTLVLCLLSLPSALQLSPSLAASSLCS

SEQ ID NO: 3246 - protein, 44 aa, Homo sapiens
MTRHLLIIFHDCFLFSHCVGFVNLYITGNKILCKIYWGKSIWSA

SEQ ID NO: 3247 - protein, 16 aa, Homo sapiens
MLQRIVLACCWPAASQ

SEQ ID NO: 3248 - protein, 68 aa, Homo sapiens
MDFHFLVVFFFSYHFPFLFLHVGNLSSAAFLCQLKGKSHLNAHQENTLWSAIQSFIMYPLTVMPARRD

SEQ ID NO: 3249 - protein, 38 aa, Homo sapiens
MKKMSQRSGTLWLALLLHSVVTTGVIGDIMWAKNISGL

SEQ ID NO: 3250 - protein, 29 aa, Homo sapiens
MLIWGSHLLPLGQSTIKLLYLPWLLDHVC

SEQ ID NO: 3251 - protein, 10 aa, Homo sapiens
MLNCDHFLAL

SEQ ID NO: 3252 - protein, 31 aa, Homo sapiens
MGINTRELFLNFTIVLITVILMWLLVRSYQY

SEQ ID NO: 3253 - protein, 36 aa, Homo sapiens
MKTTSFYCIFTRVHSGRMLIAGSVQATDMLLLVIQY

SEQ ID NO: 3254 - protein, 42 aa, Homo sapiens
MVMFVLCLNYWDLVLTISLKKTAFCHFKLTTSGRWRIRSASQ

SEQ ID NO: 3255 - protein, 23 aa, Homo sapiens
LPLSLFSVLLTLLFLVVFKKIAT

SEQ ID NO: 3256 - protein, 14 aa, Homo sapiens
MLLIWVFLPVLTTD

SEQ ID NO: 3257 - protein, 118 aa, Homo sapiens
  SITE (109): Xaa equals any of the naturally occurring L-amino acids
  SITE (115): Xaa equals any of the naturally occurring L-amino acids
MAHGLYSILIGLGLLTGLLLLHNWSPCFQFLPSISSNLTPKVILSSLKKKKKNSRGGPVPNSPYSESYYNSLAVVLQRRDWENPGVTQLNRLAAHPPFASWRNSEEARXDRPSQXLRT

SEQ ID NO: 3258 - protein, 35 aa, Homo sapiens
PLELTSWTLLLYCLNCSALYFASVCEFCCFWGISL

SEQ ID NO: 3259 - protein, 1 aa, Homo sapiens
M

SEQ ID NO: 3260 - protein, 23 aa, Homo sapiens
MILLIIPSFRLSPFSSSTIKEPL

SEQ ID NO: 3261 - protein, 113 aa, Homo sapiens
MSFCFQLLLGVAMSQPQSLISPVSITNCLHLKAFLYLLIFPQAFPFLSCIFPLFWQTCMGKDVTLHVSASNPAMLLYQKFGFKTEEYVLDFYDKYYPLESTECKHAFFLRLRR

SEQ ID NO: 3262 - protein, 42 aa, Homo sapiens
MSNYTILGQYCVFLVLCFLRSPTYWNFDYLDIFVFKRGGEFA

SEQ ID NO: 3263 - protein, 10 aa, Homo sapiens
EFTFPCAGLT

SEQ ID NO: 3264 - protein, 23 aa, Homo sapiens
MSVLLLSSSCGAAFAVLCPPHCE

SEQ ID NO: 3265 - protein, 13 aa, Homo sapiens
MGCFGLWAPSFPW

SEQ ID NO: 3266 - protein, 86 aa, Homo sapiens
MLMLLTLFSSLGMFGTGGLGGRVFCPHTHTDSEYLIHVVDSPITVQWGRGPRFFPFLSPFISCGQRLQPTIALRVPSSAFSKYGLT

SEQ ID NO: 3267 - protein, 35 aa, Homo sapiens
  SITE (9): Xaa equals any of the naturally occurring L-amino acids
MFVYCPHLXLIYSGILLLLEHIVYSCNNYFNIFAY

SEQ ID NO: 3268 - protein, 17 aa, Homo sapiens
RGRPGALPSCLFSVFPL

SEQ ID NO: 3269 - protein, 25 aa, Homo sapiens
MQVLLLLVGFFQMELSLFILKNMKI

SEQ ID NO: 3270 - protein, 18 aa, Homo sapiens
MTNLLFAYSSILNKSLKL

SEQ ID NO: 3271 - protein, 118 aa, Homo sapiens
  SITE (34): Xaa equals any of the naturally occurring L-amino acids
  SITE (52): Xaa equals any of the naturally occurring L-amino acids
MGLVICSFLALKIVVSKRDHGRNHCNGSNSNTCXLYCALGLPGVSKYISIFXMCRTRYLGTCHTPLSRYVLASLELKGLELRTCSLFFIHMSLVGLHPDHTMTSYRARENNIIISSFA

SEQ ID NO: 3272 - protein, 14 aa, Homo sapiens
LTWLLLPHRAARSQ

SEQ ID NO: 3273 - protein, 380 aa, Homo sapiens
MRISPWWYFAMISVSGVFSVTFSVIFAYVADVTQEHERSTAYGWVSATFAASLVSSPAIGAYLSASYGDSLVVLVATVVALLDICFILVAVPESLPEKMRPVSWGAQISWKQADPFASLKKVGKDSTVLLICITVFLSYLPEAGQYSSFFLYLRQVIGFGSVKIAAFIAMVGILSIVAQTAFLSILMRSLGNKNTVLLGLGFQMLQLAWYGFGSQAWMMWAAGTVAAMSSITFPAISALVSRNAESDQQGVAQGIITGIRGLCNGLGPALYGFIFYMFHVELTELGPKLNSNNVPLQGAVIPGPPFLFGACIVLMSFLVALFIPEYSKASGVQKHSNSSSGSLTNTPERGSDEDIEPLLQDSSIWELSSFEEPGNQCTEL

SEQ ID NO: 3274 - protein, 11 aa, Homo sapiens
MRWNLLLVKLL

SEQ ID NO: 3275 - protein, 31 aa, Homo sapiens
MFVFTIYCIVGLFTFGHSSMKCKLFQESHEK

SEQ ID NO: 3276 - protein, 28 aa, Homo sapiens
MAFSFPASAGVVRVGARRALLFPFLLPG

SEQ ID NO: 3277 - protein, 105 aa, Homo sapiens
MAHKIGPPMLFFFLSLFNYLLRLSKAKGNCEIKSVKYNNIFKRKWIPLFLFATEKAPRRHRLCRISKQTMMEWRPVQPFKERQVEQPGERPGGEESETPESKAVF

SEQ ID NO: 3278 - protein, 22 aa, Homo sapiens
EVQYVQIFHIFLLLSLYLFSLF

SEQ ID NO: 3279 - protein, 39 aa, Homo sapiens
MTIIMCPLAPLISGVCAIPLSTSLIFLTPSLTKSLQKPL

SEQ ID NO: 3280 - protein, 28 aa, Homo sapiens
MRSLICPNPHQRLLFSVLLIITILMGMN

SEQ ID NO: 3281 - protein, 36 aa, Homo sapiens
  SITE (25): Xaa equals any of the naturally occurring L-amino acids
  SITE (31): Xaa equals any of the naturally occurring L-amino acids
MLRKVILCMLPFCFILLLKQNCGVXLCVCAXPRCPS

SEQ ID NO: 3282 - protein, 22 aa, Homo sapiens
MNVFSKNVKCIYFLYLYSCFIF

SEQ ID NO: 3283 - protein, 32 aa, Homo sapiens
MILFLLLLWSCISSVRSHGYLQIKAPINQMHL

SEQ ID NO: 3284 - protein, 38 aa, Homo sapiens
MPSPEKNFYHLLLPFLLALLKALKCDSSSIASTSMYNF

SEQ ID NO: 3285 - protein, 21 aa, Homo sapiens
MILFFHFLSTYVEASLPKHNL

SEQ ID NO: 3286 - protein, 71 aa, Homo sapiens
MASWETFKRPSLILSAYSNSITGITDDVSIGLASTSTVTRCLLSPKVLSKVSVARTEFRMVSRYATWRGPR

SEQ ID NO: 3287 - protein, 145 aa, Homo sapiens
  SITE (85): Xaa equals any of the naturally occurring L-amino acids
QVVGMTVEHVECQDAGVREAPGPLEGAGEAGGEEADEKPPQFVCRECKETFSTMTLLRRHERSHPELRPFPCTQCGKSFSDRAGXRKHSRTHSSVRPYTCPHCPKAFLSASDLRKHERTHPVPMGTPTPLEPLVALLGMPEEGPA

SEQ ID NO: 3288 - protein, 32 aa, Homo sapiens
MNLPSVNLGFRCFYLFIDFCFPSSIFFCTEFT

SEQ ID NO: 3289 - protein, 117 aa, Homo sapiens [sequence omitted]

SEQ ID NO: 3290 - protein, 30 aa, Homo sapiens
  SITE (28): Xaa equals any of the naturally occurring L-amino acids
MRLFSQMLKSWMALFMRNVWLEMTIATXIQ

SEQ ID NO: 3291 - protein, 50 aa, Homo sapiens
MFSLIILLVKYDIPKENHFNLSSLLTKNTWLKKYSLHLYEHLPYNIPAII

SEQ ID NO: 3292 - protein, 14 aa, Homo sapiens
MKDGSRSLPQLSIC

SEQ ID NO: 3293 - protein, 37 aa, Homo sapiens
MPVVFVLFSLFLTCVHDSFDSASKSKSCVVTGAFIYL

SEQ ID NO: 3294 - protein, 56 aa, Homo sapiens
MLHLTPLKLPFCCWEESGASLSSCTAIPMLVGAALPLVPGVASAQSQRAGSRVLHR

SEQ ID NO: 3295 - protein, 90 aa, Homo sapiens
MTSPHFQLSSSLFMWLCWGWMAEVGWTDGYKRICESIEGVTKSLRDKRGNRTFQKVVLLLSQTLYIHVYFCKLLSPFGQTTITRVKSYQE

SEQ ID NO: 3296 - protein, 37 aa, Homo sapiens
MRKGIHYITFLVSLCSLFHFYQTEGVNFLTRNLKDRN

SEQ ID NO: 3297 - protein, 6 aa, Homo sapiens
MCHVTT

SEQ ID NO: 3298 - protein, 32 aa, Homo sapiens
MSDPLLRITLGLWGMWLFCGRQAHLGFLWRGR

SEQ ID NO: 3299 - protein, 13 aa, Homo sapiens
MASLGQILFWSII

SEQ ID NO: 3300 - protein, 35 aa, Homo sapiens
MVCLPVHSRALLTGFLFFKMLCCKILSYLLFPGTV

SEQ ID NO: 3301 - protein, 62 aa, Homo sapiens
MGLSAASQICGLCLLWLSPHFASQICPPVHILPTSNPGSVSASQRTWTKALAVSGLVDPSTS

SEQ ID NO: 3302 - protein, 28 aa, Homo sapiens
MTFFLLWFICILLVLFQKNSIEMRHRYQ

SEQ ID NO: 3303 - protein, 74 aa, Homo sapiens [sequence omitted]

SEQ ID NO: 3304 - protein, 18 aa, Homo sapiens
MCIQLLLLLLVWGRGLES

SEQ ID NO: 3305 - protein, 30 aa, Homo sapiens
MLISLSLSLSLLTKVYQRPQAQGLSQVKAG

SEQ ID NO: 3306 - protein, 26 aa, Homo sapiens
NFKHQFTMLIKSTFIFSSELNNPINK

SEQ ID NO: 3307 - protein, 20 aa, Homo sapiens
MYKSCGFLCFYDKSGIVFLN

SEQ ID NO: 3308 - protein, 34 aa, Homo sapiens [sequence omitted]

SEQ ID NO: 3309 - protein, 16 aa, Homo sapiens
MWIGVVLSIWKLLLEI

SEQ ID NO: 3310 - protein, 27 aa, Homo sapiens
MATLTFSLRKPLQRSLIRPSRLPLCCF

SEQ ID NO: 3311 - protein, 68 aa, Homo sapiens
MSCYFLLCLSLLQPHWPSYCSINMPGTFLPQGLCTSHAFCSSRFLQSSFPTSFMSLLVHLLMRLSYHV

SEQ ID NO: 3312 - protein, 12 aa, Homo sapiens
MWRHTELPPVYV

SEQ ID NO: 3313 - protein, 44 aa, Homo sapiens
MIFPLQEFSLFGQWWLQVFLEGIIFIPTILLYVHTCVPSNSHSI

SEQ ID NO: 3314 - protein, 6 aa, Homo sapiens
EIPYKE

SEQ ID NO: 3315 - protein, 26 aa, Homo sapiens
MEPGFDLSHSCFGVCPLNTLYGVSNL

SEQ ID NO: 3316 - protein, 30 aa, Homo sapiens
MGNLFFLALLVNLWVYPVATLRISIINKTQ

SEQ ID NO: 3317 - protein, 5 aa, Homo sapiens
MPKIL

SEQ ID NO: 3318 - protein, 5 aa, Homo sapiens
MPKIL

SEQ ID NO: 3319 - protein, 6 aa, Homo sapiens
MFQGQW

SEQ ID NO: 3320 - protein, 31 aa, Homo sapiens
MTFCFCIGFTVIQFSSLISSKTKSECTRFFR

SEQ ID NO: 3321 - protein, 109 aa, Homo sapiens
MVFLPAHSQPFLFPFLFFFSPHTFLGLPPWKEEGLTWVLSSPQVRRVTRAPSLWTWALPEPLPQLPQLRPAGPGHGLRKSPAPNPGRNWPLLGSLFDFFRKMISISFQP

SEQ ID NO: 3322 - protein, 19 aa, Homo sapiens
MLEYGLLLLVILVLFPSFP

SEQ ID NO: 3323 - protein, 26 aa, Homo sapiens
MHPDLWPDCGLWLPQAFSSLHWVFLH

SEQ ID NO: 3324 - protein, 36 aa, Homo sapiens
MIRYWGFGGTQTLAILCVPLDQSPKRRGAGRKEWGS

SEQ ID NO: 3325 - protein, 63 aa, Homo sapiens
MFYILFICLGSRVLNLERSTSIETYGSCSLESQWRLIAVLHMNSNLTLNHQQTLSFHQDVDKE

SEQ ID NO: 3326 - protein, 5 aa, Homo sapiens
SYCSV

SEQ ID NO: 3327 - protein, 30 aa, Homo sapiens
MKLEAFIDFCCFLVVLTWIQVVLIHLFCLK

SEQ ID NO: 3328 - protein, 10 aa, Homo sapiens
MLLLDSDVWF

SEQ ID NO: 3329 - protein, 14 aa, Homo sapiens
MPWLQQLVSFGLMS

SEQ ID NO: 3330 - protein, 41 aa, Homo sapiens
ESLLLVIAFLFFCSFSFPSIKDLLYAFRKITKAECLLTIYG

SEQ ID NO: 3331 - protein, 15 aa, Homo sapiens
KNCYPKGFLRANCLL

SEQ ID NO: 3332 - protein, 15 aa, Homo sapiens
MTQGIIFLVCILDVL

SEQ ID NO: 3333 - protein, 40 aa, Homo sapiens
MKSTNFLKQALFFFFWKTCVVCPVYLFLMRRPAFCGPREH

SEQ ID NO: 3334 - protein, 53 aa, Homo sapiens
MGSSTFILFFSFLLFSPFLSPSPTTSLYFFFIYSRLIFSAKRCLGPLTSQEAL

SEQ ID NO: 3335 - protein, 11 aa, Homo sapiens
MHFHADYMHGC

SEQ ID NO: 3336 - protein, 37 aa, Homo sapiens
NSLKTIIFALKTVVFLDLPVYAHSLLWHLYSYCNAYS

SEQ ID NO: 3337 - protein, 55 aa, Homo sapiens
MTFSPALPPLRSPCSELLLWRYPGSLIPEALRLLRLGDTPSPPYPATPAGDIMEL

SEQ ID NO: 3338 - protein, 19 aa, Homo sapiens
GMLHDGQLLPSLVIIHCSC

SEQ ID NO: 3339 - protein, 29 aa, Homo sapiens
LELLVCNYVYGNGVVFMICIYIIIWMYIY

SEQ ID NO: 3340 - protein, 50 aa, Homo sapiens
WPLLPQVLQERVWWAHLQSQLLGKLQGLLEPRKSQLAGHLELPKNTLSRK

SEQ ID NO: 3341 - protein, 62 aa, Homo sapiens
MFLGSLGICRFALWILTVFKVLMISQSFFLTSEKKMHCFLIFPMQNQNKKLILCFKKKKKNS

SEQ ID NO: 3342 - protein, 40 aa, Homo sapiens
MKGVLLINLLYYLDTFVYSLQPTCIRGIGVGLNHQHYFIK

SEQ ID NO: 3343 - protein, 142 aa, Homo sapiens [sequence omitted]

SEQ ID NO: 3344 - protein, 43 aa, Homo sapiens
MMLLNSIQVLLYVPIVFRFLTDCCGCTSLSDCSLIYCRTLGCF

SEQ ID NO: 3345 - protein, 36 aa, Homo sapiens
MCILFCTPISLFLCWLPGPSLEPWVERLLKDHHRQP

SEQ ID NO: 3346 - protein, 81 aa, Homo sapiens [sequence omitted]

SEQ ID NO: 3347 - protein, 7 aa, Homo sapiens
MTIFEPS

SEQ ID NO: 3348 - protein, 51 aa, Homo sapiens [sequence omitted]

SEQ ID NO: 3349 - protein, 40 aa, Homo sapiens [sequence omitted]

SEQ ID NO: 3350 - protein, 17 aa, Homo sapiens
MSTGHGACLVSLPVVQA

SEQ ID NO: 3351 - protein, 41 aa, Homo sapiens
MRTLLFLSLAFKACHNLVTPLIPVSSSIFPATHRFPVFTIS

SEQ ID NO: 3352 - protein, 7 aa, Homo sapiens
MICLALY

SEQ ID NO: 3353 - protein, 57 aa, Homo sapiens
  SITE (39): Xaa equals any of the naturally occurring L-amino acids
MTGLYAVGRGAWTAGLCAVGWGGLDVWLLCGAGAGLGPXGRLEGQPGPVVSLVRNRK

SEQ ID NO: 3354 - protein, 52 aa, Homo sapiens
MPAVSAFFSLAALAEVAAMENVHRGQRSTPLTHDGQPKEMPQLPVLISCADQ

SEQ ID NO: 3355 - protein, 38 aa, Homo sapiens
MLITLIIVVGTFCSWVQAYFTHIWLLCLFWKTAASWSD

SEQ ID NO: 3356 - protein, 22 aa, Homo sapiens
MKFVLFYLCTGYPLFWECFFIL

SEQ ID NO: 3357 - protein, 15 aa, Homo sapiens
DTIVLSGCLCLCYYV

SEQ ID NO: 3358 - protein, 10 aa, Homo sapiens
MGTSSILQMK

SEQ ID NO: 3359 - protein, 43 aa, Homo sapiens
MVCGEWVPGMLRALRAALFLFIAISVKLSFLGNVHRLATADVL

SEQ ID NO: 3360 - protein, 68 aa, Homo sapiens
KLWQTMCDAFFCIGCSHWIAGSGYCVIVAALGLAEGPLCLDSLGQWNYTFAQHRGPVPSGYLHMVRVH

SEQ ID NO: 3361 - protein, 26 aa, Homo sapiens
MALTGAFIVKSYSRGWSCGCVCSVPI

SEQ ID NO: 3362 - protein, 10 aa, Homo sapiens
MLWIFKWQVL

SEQ ID NO: 3363 - protein, 218 aa, Homo sapiens
MGMWSIGAGALGAAALALLLANTDVFLSKPQKAALEYLEDIDLKTLEKEPRTFKAKELWEKNGAVIMAVRRPGCFLCREEAADLSSLKSMLDQLGVPLYAVVKEHIRTEVKDFQPYFKGEIFLDEKKKFYGPQRRKMMFMGFIRLGVWYNFFRAWNGGFSGNLEGEGFILGGVFVVGSGKQGILLEHREKEFGDKVNLLSVLEAAKMIKPQTLASEKK

SEQ ID NO: 3364 - protein, 195 aa, Homo sapiens
MGMWSIGAGALGAAALALLLANTDVFLSKPQKAALEYLEDIDLKTLEKEPRTFKAKELWEKNGAVIMAVRRPGCFLCREEAADLSSLKSMLDQLGVPLYAVVKEHIRTEVKDFQPYFKGEIFLDEKKKFYGPQRRKMMFMGFIRLGVWYNFFRAWNGGFSGNLEGEGSSLGEFSWWDQESRAFFLSTEKKNLGTK

SEQ ID NO: 3365 - protein, 21 aa, Homo sapiens
MSWILFLLALVEHIFPLQSSG

SEQ ID NO: 3366 - protein, 18 aa, Homo sapiens
GRSYVKNQVFCGIFYRNR

SEQ ID NO: 3367 - protein, 41 aa, Homo sapiens
MKCFLLLCCAIVLCFSKHCKNSIFGLVFWIIYYNLRSVLLM

SEQ ID NO: 3368 - protein, 21 aa, Homo sapiens
MFIYLAVFVYLLELWSQLPGT

SEQ ID NO: 3369 - protein, 29 aa, Homo sapiens
MSKPKKYTIVLVLLPYREAIQTVGMNLSY

SEQ ID NO: 3370 - protein, 45 aa, Homo sapiens
MVTSGMLVFSIKTFSSKAFLAVVSFILVVSIKCSEGADTSRKGFS

SEQ ID NO: 3371 - protein, 38 aa, Homo sapiens
MSALLEILALLLHSVSGPGMGVFRSSPSFPGAATWLFG

SEQ ID NO: 3372 - protein, 38 aa, Homo sapiens; identical to SEQ ID NO: 3371

SEQ ID NO: 3373 - protein, 30 aa, Homo sapiens
MRFFCSLMFFGYGYGICRLGGKELKITGAG

SEQ ID NO: 3374 - protein, 35 aa, Homo sapiens
MNNLLILFLKTSCLCFLICVCIFKHFVRLSATLGS

SEQ ID NO: 3375 - protein, 78 aa, Homo sapiens
MYIALSSVHALILCGFQFISCVRGQWTECSDFSPPITVILLIFLCLEGLLFFTFTGSYVWHPNPLHMQRRDGDRAIEK

SEQ ID NO: 3376 - protein, 8 aa, Homo sapiens
MLASGEYI

SEQ ID NO: 3377 - protein, 34 aa, Homo sapiens
MNVFFFPCWSLIFMIVFQFLDLTSCMRSTESTQE

SEQ ID NO: 3378 - protein, 76 aa, Homo sapiens
MKKHVLVAHFHYLINSYFGLRTEEMGEQPKTNDTVSIEKIPPPDKYYCKKCNAQCQQPGCVNVSHFDIRHTQRFGE

SEQ ID NO: 3379 - protein, 12 aa, Homo sapiens
MNGRRLIFPYVL

SEQ ID NO: 3380 - protein, 49 aa, Homo sapiens [sequence omitted]

SEQ ID NO: 3381 - protein, 20 aa, Homo sapiens
MFSWKLLYSLILHGLALNCL

SEQ ID NO: 3382 - protein, 30 aa, Homo sapiens
MFVLLFSEIFLSTVAGKLRSGPCAACLLLP

SEQ ID NO: 3383 - protein, 34 aa, Homo sapiens
MTRDDTLSLWLGLVILINCLYLYLTETSLKMPLY

SEQ ID NO: 3384 - protein, 28 aa, Homo sapiens
ILSTGFCFLLFLFVLRKGKKSQVCLTIQ

SEQ ID NO: 3385 - protein, 37 aa, Homo sapiens
MSFSLSLTTQYLCVSLSLVMKCLSLWPVSHCLYICFP

SEQ ID NO: 3386 - protein, 31 aa, Homo sapiens
MHRKFCIFTLLLVFSRSESEHLPFLAAAGAL

SEQ ID NO: 3387 - protein, 73 aa, Homo sapiens
MTVLLLLIPLSKREPFSKSFDGKSSGIHFAVLIGLLLTFCFLILKSCKGHPFLFSSQCRDYTDKVKFPGASVL

SEQ ID NO: 3388 - protein, 41 aa, Homo sapiens
  SITE (30): Xaa equals any of the naturally occurring L-amino acids
  SITE (35): Xaa equals any of the naturally occurring L-amino acids
MLLVLTVFSFHKHCSGKLVLCAAGPFAYVXTINQXLNLKKK

SEQ ID NO: 3389 - protein, 8 aa, Homo sapiens
  SITE (2): Xaa equals any of the naturally occurring L-amino acids
  SITE (7): Xaa equals any of the naturally occurring L-amino acids
  SITE (8): Xaa equals any of the naturally occurring L-amino acids
VXPCGCXX

SEQ ID NO: 3390 - protein, 40 aa, Homo sapiens
  SITE (3): Xaa equals any of the naturally occurring L-amino acids
  SITE (27): Xaa equals any of the naturally occurring L-amino acids
  SITE (29): Xaa equals any of the naturally occurring L-amino acids
  SITE (33): Xaa equals any of the naturally occurring L-amino acids
  SITE (35): Xaa equals any of the naturally occurring L-amino acids
MLXLRLTIVIIHISVSADLSLQYFFSXLXNFLXLXVKPKC

SEQ ID NO: 3391 - protein, 37 aa, Homo sapiens
MKEMNDFCQSLFIQSSHSVNCFLIRSASARTVLTSII

SEQ ID NO: 3392 - protein, 91 aa, Homo sapiens
  SITE (13): Xaa equals any of the naturally occurring L-amino acids
  SITE (40): Xaa equals any of the naturally occurring L-amino acids
MEKTLFLYHYLPXLTFQILLLPVVLQHISDHLCRSQLQRXIFSALVVAWYSSACHVSNTLRPLTYGDKSLSPHELKALRWKDSWDILIRKH

SEQ ID NO: 3393 - protein, 48 aa, Homo sapiens
MSSRPLWRARALIWLTWGQPRTVSFLRLTGCSRRPQSMLQRVKSASEA

SEQ ID NO: 3394 - protein, 43 aa, Homo sapiens
FSYCLRVISLCKPLSFVLVFFSIMKLWYCTRSVVRCSLVSGLV

SEQ ID NO: 3395 - protein, 38 aa, Homo sapiens
MANLAALSLCFLLFSFLPLFPTLLSSLQSTTCTPGAPG

SEQ ID NO: 3396 - protein, 19 aa, Homo sapiens
MWLMMQLLSFFVFLCLLYL

SEQ ID NO: 3397 - protein, 19 aa, Homo sapiens
MWLMMQLLSFFVFLCLLYL

SEQ ID NO: 3398 - protein, 19 aa, Homo sapiens
MWLMMQLLSFFVFLCLLYL

SEQ ID NO: 3399 - protein, 134 aa, Homo sapiens
MEMMESQTLLLTLLSVKMENNLAEFERRAEKNLLIMCKEKEKLQKKAHELKRRLLLSQRKRELADVLDAQIEMLSPFEAVATRFKEQYRTFATALDTTRHELPVKSIHLEGDGQQLLDALQLELVTIQRLLGRT

SEQ ID NO: 3400 - protein, 35 aa, Homo sapiens
MPLMSLLVTVHFVVLSKCCANSKPFLKFFALIRVP

SEQ ID NO: 3401 - protein, 24 aa, Homo sapiens
MHINFLFSFYSTYQLHSVCFPKLV

SEQ ID NO: 3402 - protein, 39 aa, Homo sapiens
MDSLAWGGIFELHFLQCASPSQRIQGCHQLLLEGALCLV

SEQ ID NO: 3403 - protein, 12 aa, Homo sapiens
FFHICITICSFS

SEQ ID NO: 3404 - protein, 13 aa, Homo sapiens
MEAEEALLWILLQ

SEQ ID NO: 3405 - protein, 43 aa, Homo sapiens
MVNDSLLYFSFFFFFFLWFSSWIHPLILNQNVRSMNYELKYFS

SEQ ID NO: 3406 - protein, 17 aa, Homo sapiens
GIVLLIGVLVQVSAVDD

SEQ ID NO: 3407 - protein, 74 aa, Homo sapiens
MEQVHPGRTRTRLHCGLEIQGCQRFLLCAFLISWLPGGAPGCHSPLLWPYSIFHSNASLCGRSSDNSSDQDFKI

SEQ ID NO: 3408 - protein, 435 aa, Homo sapiens
MGHNFGMFHDDYSCKCPSTICVMDKALSFYIPTDFSSCSRLSYDKFFEDKLSNCLFNAPLPTDIISTPICGNQLVEMGEDCDCGTSEECTNICCDAKTCKIKATFQCALGECCEKCQFKKAGMVCRPAKDECDLPEMCNGKSGNCPDDRFQVNGFPCHHGKGHCLMGTCPTLQEQCTELWGPGTEVADKSCYNRNEGGSKYGYCRRVDDTLIPCKANDTMCGKLFCQGGSDNLPWKGRIVTFLTCKTFDPEDTSQEIGMVANGTKCGDNKVCINAECVDIEKAYKSTNCSSKCKGHAVCDHELQCQCEEGWIPPDCDDSSVVFHFSIVVGVLFPMAVIFVVVAMVIRHQSSREKQKKDQRPLSTTGTRPHKQKRKPQMVKAVQPQEMSQMKPHVYDLPVEGNEPPASFHKDTNALPPTVFKDNPMSTPKDSNPKA

SEQ ID NO: 3409 - protein, 32 aa, Homo sapiens
MKVLSFLLCIRISFLFVVESIVRGISKLNEVN

SEQ ID NO: 3410 - protein, 32 aa, Homo sapiens; identical to SEQ ID NO: 3409

SEQ ID NO: 3411 - protein, 27 aa, Homo sapiens
MLHIIQKLYPDHLFLFFIVKYLCFIHC

SEQ ID NO: 3412 - protein, 14 aa, Homo sapiens
MGITHEYLCVCVCV

SEQ ID NO: 3413 - protein, 105 aa, Homo sapiens
MWGAFWNTLLCPVSGAEGYRQSMPHKPAHPRDTSTLCPSCMYHWGRNLGSVFTTAAAWSHEFFPSAADSLQGGSSLPPPLLKLQSTGYGSGWFPQGSRYVGGEEN

SEQ ID NO: 3414 - protein, 36 aa, Homo sapiens
MKYSCLKGSYTVFMAILALLLVVCIFYQRKPVFRDG

SEQ ID NO: 3415 - protein, 21 aa, Homo sapiens
VGICLSFTQGWSWSFTCQFCL

SEQ ID NO: 3416 - protein, 29 aa, Homo sapiens
MDSATAPVAAGDCGQWWTLLLCTCCRLFL

SEQ ID NO: 3417 - protein, 30 aa, Homo sapiens
MWGGQRVCWAGFAFPAGATAVLTNEVCCQV

SEQ ID NO: 3418 - protein, 51 aa, Homo sapiens
GCEGLAILLSWVHVSDRNGAAWERSPSFTFSLLPPPPYSKTVPPTEGQGLL

SEQ ID NO: 3419 - protein, 30 aa, Homo sapiens
MIHLGFLLPLSLVWRRRDGIQWTEEFIFQG

SEQ ID NO: 3420 - protein, 30 aa, Homo sapiens
MIIQLVLSLPLFFLCCDSVTEYELVARVLW

SEQ ID NO: 3421 - protein, 6 aa, Homo sapiens
MTYMVA

SEQ ID NO: 3422 - protein, 39 aa, Homo sapiens
MAIEFYVFAFFVLIEIIPSSLSAYLMTPAFQIHRFTFSI

SEQ ID NO: 3423 - protein, 56 aa, Homo sapiens
MPNNLSLFYVFSLSFLSSFIPLIVTAKKMSVPVTLPPLFSLSPALWSGPWSTSNSP

SEQ ID NO: 3424 - protein, 44 aa, Homo sapiens
MHQNVLGRVSWLRIGLFELFQWALGHRGCPLLSGARAWGDEGRG

SEQ ID NO: 3425 - protein, 756 aa, Homo sapiens
ARVHCLKKAVRLDSNNHLYWNALGVVACYSGIGNYALAQHCFIKSIQSEQINAVAWTNLGVLYLTNENIEQAHEAFKMAQSLDPSYLMCWIGQALIAEAVGSYDTMDLFRHTTELNMHTEGALGYAYWVCTTLQDKSNRETELYQYNILQMNAIPAAQVILNKYVERIQNYAPAFTMLGYLNEHLQLKKEAANAYQRAILLLQTAEDQDTYNVAIRNYGRLLCSTGEYDKAIQAFKSTPLEVLEDIIGFALALFMKGLYKESSKAYERALSIVESEQDKAHILTALAITEYKQGKTDVAKTLLFKCSILKEPTTESLQALCALGLAMQDATLSKAALNELLKHIKHKDSNYQRCLLTSAIYALQGRSVAVQKQISKAVHSNPGDPALWSLLSRVVAQYAQRNAKGGVVAGNVAHILDSNHGKKALLYTAVNQLAMGSSSAEDEKNTALKTIQKAALLSPGDPAIWAGLMAACHADDKLALMNNTQPKRIDLYLALLSAVSASIKDEKFFENYNQSLEKWSLSQAVTGLIDTGRISEAETLCTKNLKSNPDQPAVILLLRQVQCKPLPESQKPLPDAVLEELQKTVMSNSTSVPAWQWLAHVYQSQGMMRAAEMCYRKSLQLASQRGSWSGKLSSLLRLALLALKVCMANISNDHWPSLVQEATTEALKLCFCPLAVLLQALLQFKRKMGARETRRLLERVVYQPGYPKSIASTARWYLLRHLYAKDDYELIDVLVNNAKTHGDTRALELNQRLSSQ

SEQ ID NO: 3426 - protein, 81 aa, Homo sapiens
MAARVGAFLKNAWDKEPVLVVSFVVGGLAVILPPLSPYFKYSVMINKATPYNYPAAGEKGHRIELSSHSTQRQSCPGARRS

SEQ ID NO: 3427 - protein, 29 aa, Homo sapiens
MRLQSCSSQTAALLLSFYLPESCASQSPG

SEQ ID NO: 3428 - protein, 39 aa, Homo sapiens
MCTLLIFFLILPHWWLGTWEREQAFLHGPSLGCGEQRPM

SEQ ID NO: 3429 - protein, 39 aa, Homo sapiens; identical to SEQ ID NO: 3428

SEQ ID NO: 3430 - protein, 39 aa, Homo sapiens; identical to SEQ ID NO: 3428

SEQ ID NO: 3431 - protein, 32 aa, Homo sapiens
MHILNVCLYFFILNIIFVPLCFTSNIYLYKCV

SEQ ID NO: 3432 - protein, 10 aa, Homo sapiens
MCCCMRLHCC

SEQ ID NO: 3433 - protein, 92 aa, Homo sapiens
MRRRMRMLALWQQLLHPSGDPEQTQSWSVWKVPSSGGSCRCRSSGTQSSIGTRCSARWAGVVGSRPQHHGCQLPGWTKQGATSPFPRFQSSL

SEQ ID NO: 3434 - protein, 103 aa, Homo sapiens
MLQNSVYVNFLLTGLVAQLACHPQPLLRSFLLNTNMVFQPSVKSLLQVLGSVKNKIENFAASQEDFPALLSKAKKYLIARGKLDWAEGPAAGPAPRRSDPLEP

SEQ ID NO: 3435 - protein, 30 aa, Homo sapiens
MKAVGFVFLFTTILSHILLWAFVVYFKKTV

SEQ ID NO: 3436 - protein, 93 aa, Homo sapiens
MLLIVVSVCTATGAWNWLIDPETQKVSFFTSLWNHPFFTISCITLIGLFFAGIHKRVVAPSIIAARCRTVLAEYNMSCDDTGKLILKPRPHVQ

SEQ ID NO: 3437 - protein, 46 aa, Homo sapiens
MLFRFVFIYLFGPAKLPSLQRPWTRIQPVPLCPTTLHSQRLAMQPT

SEQ ID NO: 3438 - protein, 161 aa, Homo sapiens
MWPGRIMTVTVVLLCCSTASIWPCLSHSASPSRTCPNFVGRSTRSCVTANSLCEPRTPDPKPINGKGDMGVPSQETPVPFLSCLFPLTSLWFFIFKCFNFCIFFSLREYLLISDVQGVATEKPLSSSVCRGVWPCGLGGAVILPLPRAGSRKSVLGVVGGQ

SEQ ID NO: 3439 - protein, 11 aa, Homo sapiens
MSPGGICNCII

SEQ ID NO: 3440 - protein, 57 aa, Homo sapiens
MWLLKPSAHSPVHVLVLLFPRGWSQPGTHKRQILVNAASLPGGCLLPWIWSGAALRF

SEQ ID NO: 3441 - protein, 68 aa, Homo sapiens
ICLRLCLCARHRLGAGALRLRRLWRGSETRGPAGGSLCVSRHCSPSHPGGSLEWVLQLPSWVRSEAGR

SEQ ID NO: 3442 - protein, 3 aa, Homo sapiens
ACV

SEQ ID NO: 3443 - protein, 27 aa, Homo sapiens
MNVIIVLVHALCPWCRGCPHWGPLVPP

SEQ ID NO: 3444 - protein, 34 aa, Homo sapiens
MQVQTTVLLLQADFFRVRAPCGELRAASIRAKPW

SEQ ID NO: 3445 - protein, 50 aa, Homo sapiens
MAQITWIHLLSVVICSAPPRRLHRQHSAVQAWAAHREHVQPSLTSSGRMP

SEQ ID NO: 3446 - protein, 26 aa, Homo sapiens
MRSPPHFIFFFLKCPGLGWGGQPPGV

SEQ ID NO: 3447 - protein, 50 aa, Homo sapiens
MGVRICGVQASCTCVHLCGVWVYLDCGLRLPYRTLLLPPPQGITGPCSSC

SEQ ID NO: 3448 - protein, 27 aa, Homo sapiens
MNIPIYVIGYLFLSSLELCTQTKTISG

SEQ ID NO: 3449 - protein, 12 aa, Homo sapiens
GFLFHLLHFFYF

SEQ ID NO: 3450 - protein, 43 aa, Homo sapiens
MEAFLHLWPDGSLGDWKSFSCHCYWGWAGPTCQEPRPGPKEAV

SEQ ID NO: 3451 - protein, 101 aa, Homo sapiens
MQGSGSQFRACLLCLCFSCPCSPGGPRWNSRQGGRRFPKTCRAISQNLVFKYKTFCPVRYMQPHRSSLCLHFTSYVFILSTWGSLRTYSTDLKKKKKKKKK

SEQ ID NO: 3452 - protein, 21 aa, Homo sapiens
MNTPGLSLFLLRISLLLMCGC

SEQ ID NO: 3453 - protein, 27 aa, Homo sapiens
MTIAIVILIIFPTVKNLALSSEIVMAL

SEQ ID NO: 3454 - protein, 37 aa, Homo sapiens
MFSRLYKQRLLLLLWYSHFGGGGSRLERISFALKSRM

SEQ ID NO: 3455 - protein, 47 aa, Homo sapiens
MMVPGGPAPLLLCFLFLLFWYLGELITKSLLRVMESYPSIPQAVFQR

SEQ ID NO: 3456 - protein, 47 aa, Homo sapiens
MFKDAGLFLLWGPFPGVPVSPSPGGSAPTRVGGISSQRLARPHLGEA

SEQ ID NO: 3457 - protein, 26 aa, Homo sapiens
MTVVLLLLHGITVYYVVGKYSLLNPT

SEQ ID NO: 3458 - protein, 26 aa, Homo sapiens
MTVVLLLLHGITVYYVVGKYSLLNPT

SEQ ID NO: 3459 - protein, 26 aa, Homo sapiens
MTVVLLLLHGITVYYVVGKYSLLNPT

SEQ ID NO: 3460 - protein, 26 aa, Homo sapiens
MTVVLLLLHGITVYYVVGKYSLLNPT

SEQ ID NO: 3461 - protein, 37 aa, Homo sapiens
MGMLFLLLCIHRSLVKANLPTQISKVVAIKTDTSQRK

SEQ ID NO: 3462 - protein, 19 aa, Homo sapiens
MAVFLYFDFCISILIFLVM

SEQ ID NO: 3463 - protein, 90 aa, Homo sapiens
PLLLALLSLALCRGRVVRVPTATLVRVVGTELVIPCNVSDYDGPSEQNFDWSFSSLGSSFVELASTWEVGFPAQHWPFGSIPVGFSEARW

SEQ ID NO: 3464 - protein, 40 aa, Homo sapiens [sequence omitted]

SEQ ID NO: 3465 - protein, 35 aa, Homo sapiens
MGTIRLLQIGLSLPFFTFLLANQSGFRKPFVICEK

SEQ ID NO: 3466 - protein, 32 aa, Homo sapiens
MELMNVRTRLWRVLSVRFLGFIHVVVYDLLPC

SEQ ID NO: 3467 - protein, 34 aa, Homo sapiens
MFTFISMFTFLVTLTCWLNTSNSPVEGSPPGRKG

SEQ ID NO: 3468 - protein, 74 aa, Homo sapiens
MNKTFHPLKHFPVLRFLFVFVVSSPCYPFCPFSLTMVIWSLGSYQSPRDILQSLSPFWVDFILFYFVFFKKITF

SEQ ID NO: 3469 - protein, 24 aa, Homo sapiens
GTRIWGVVCLFLEHRVAWPCWNDK

SEQ ID NO: 3470 - protein, 38 aa, Homo sapiens [sequence omitted]

SEQ ID NO: 3471 - protein, 59 aa, Homo sapiens
MLWSLASYIVNLAVKVLCLCKGRFVLVQNCPCLSKQVCLILSSISGGYCWHKLKVHPLT

SEQ ID NO: 3472 - protein, 65 aa, Homo sapiens [sequence omitted]

SEQ ID NO: 3473 - protein, 31 aa, Homo sapiens
MCWSSSVLFFFHWPVCLSFVYYHQAITLDSW

SEQ ID NO: 3474 - protein, 35 aa, Homo sapiens
MHICTFYLIILFWEIVICCFVCLLREARRRIYKCE

SEQ ID NO: 3475 - protein, 36 aa, Homo sapiens
MSQTWPHPFICYCLSWFCTTTAELNRCSRSFTEKVF

SEQ ID NO: 3476 - protein, 66 aa, Homo sapiens
MLKCGFMKYVVFLSVLVSFLEMCKSEKHTNHKSGIHHKPKKKKKKKKKKKKKKKKKKKKKKKKKKK

SEQ ID NO: 3477 - protein, 24 aa, Homo sapiens
MDFTVEGSSIHLWLLFNLVLLDFV

SEQ ID NO: 3478 - protein, 37 aa, Homo sapiens
MAQWHSGSSFLFFILGWNLKVVCSSGFGLIFEATLPS

SEQ ID NO: 3479 - protein, 35 aa, Homo sapiens
MLFFNLFCYLGSVLISGQIFTVLSQNITKRRVTTT

SEQ ID NO: 3480 - protein, 30 aa, Homo sapiens
FFFFSAFQHLFHGMSAQHFHELPQGYISTK

SEQ ID NO: 3481 - protein, 111 aa, Homo sapiens
WLLFRSLQRAPSWSFPSNLGTKTADLKGASELPTPCHECREDNDGEGHARPQSGMKPLTEGMRKNGTWLQATAATTRDCGVNPEEADSAFSLLATCSFYDHALHLWEWEGN

SEQ ID NO: 3482 - protein, 32 aa, Homo sapiens
KFQTAVIIFYFCHFSSSNRGPMQQEHKCEIMG

SEQ ID NO: 3483 - protein, 113 aa, Homo sapiens
  SITE (112): Xaa equals any of the naturally occurring L-amino acids
NSILHLPFWIELLKARTVLLTLSSSWCLAPRCSRNICMIELKLKVAVNLFEDYSGNSVYQRIKSLKSESTNSRRSWGMVPSKNRKDQKSQELTAYGGGGNNGLRRVDPQGLXN

SEQ ID NO: 3484 - protein, 172 aa, Homo sapiens
PVCGGFGVLWAWLCTGRWTLLWSSSFPYPGSDVGRLGGPVSSPPFALSCPFPLSPGRCLARLRPPSRQPGCELSLSLFPLVGKWPFPQHLLPGPRGTHLFWSSAWPSVSLGKGKEGWTALIRAGSVCSSGQPECQRCTGMWCVAPGPRHLCFGGFLPCLHTCQGRGDSKVGG

SEQ ID NO: 3485 - protein, 172 aa, Homo sapiens; identical to SEQ ID NO: 3484

SEQ ID NO: 3486 - protein, 34 aa, Homo sapiens
  SITE (17): Xaa equals any of the naturally occurring L-amino acids
MQGAGKALHELLLSAQXQGCLTAGVYESAKVLNV

SEQ ID NO: 3487 - protein, 68 aa, Homo sapiens [sequence omitted]

SEQ ID NO: 3488 - protein, 23 aa, Homo sapiens
KSFCLDLFSCSIFCKMYYIVSLL

SEQ ID NO: 3489 - protein, 65 aa, Homo sapiens
MMFITLPLPLQSYPALLILPQQTDAPGNNVGVSTKKFRRRKYIHVIQNCYLYHKIVKSLCSDFLL

SEQ ID NO: 3490 - protein, 19 aa, Homo sapiens
MDPRPLQAPIAIGSLKLSG

SEQ ID NO: 3491 - protein, 34 aa, Homo sapiens
MFSFISVLFCLFLLVSLRTIHLLFLHWLHLSCDI

SEQ ID NO: 3492 - protein, 35 aa, Homo sapiens
MFSFISVLFCLFLLVSFENNTPSIPSFGYTFPCDI

SEQ ID NO: 3493 - protein, 35 aa, Homo sapiens; identical to SEQ ID NO: 3492

SEQ ID NO: 3494 - protein, 14 aa, Homo sapiens
MAHWHVFYVFSCHS

SEQ ID NO: 3495 - protein, 32 aa, Homo sapiens
MWTSSSRGWGSFLNVCSLLPAWPSMQTLWLTS

SEQ ID NO: 3496 - protein, 47 aa, Homo sapiens
GLSRPTSSSPWPPGAMLLPLGSLCGPSSCLPVASVDQARASGQPFQA

SEQ ID NO: 3497 - protein, 19 aa, Homo sapiens
MGANILLSIATITIGWLWI

SEQ ID NO: 3498 - protein, 31 aa, Homo sapiens
MKFTLMLVMSLELSLRKVLSSVYPLGKYNHE

SEQ ID NO: 3499 - protein, 31 aa, Homo sapiens
MDLSSPTILIIFSGCVSAFLCHIKHCIRNQK

SEQ ID NO: 3500 - protein, 39 aa, Homo sapiens
MIMMRRRKILIFLKILILMKMKGDCLEVKNLSQVKVPEI

SEQ ID NO: 3501 - protein, 10 aa, Homo sapiens
MSCSFLEFSI

SEQ ID NO: 3502 - protein, 17 aa, Homo sapiens
TILFSLLLGFSITKKQI

SEQ ID NO: 3503 - protein, 17 aa, Homo sapiens
TILFSLLLGFSITKKQI

SEQ ID NO: 3504 - protein, 29 aa, Homo sapiens
MAFCFCFFLHPSETAPLCGRQGMGFSPGH

SEQ ID NO: 3505 - protein, 41 aa, Homo sapiens
MALTSVLLFILLFFGVILMCLLRAFYLPDFSWLTFGLYFAP

SEQ ID NO: 3506 - protein, 15 aa, Homo sapiens
MQSLFYSLLLIRVSG

SEQ ID NO: 3507 - protein, 35 aa, Homo sapiens
MAPPGLAVFLLWVLMPPGPTASSQPRAAAPPVSFS

SEQ ID NO: 3508 - protein, 26 aa, Homo sapiens
MLTSGFIFQKIWLLCGEWTMLGQKTK

SEQ ID NO: 3509 - protein, 33 aa, Homo sapiens
MNILIKRILVLAQLMHISDSHICCINWFNTFGT

SEQ ID NO: 3510 - protein, 3 aa, Homo sapiens
LVY

SEQ ID NO: 3511 - protein, 31 aa, Homo sapiens
MVLLILFIHCPLVRCYRILMNAFCIVVFHTS

SEQ ID NO: 3512 - protein, 38 aa, Homo sapiens
MWYLTFSKHFLLLGFPVPFSDGELTVPIEIFIFITILT

SEQ ID NO: 3513 - protein, 33 aa, Homo sapiens
MRQMSLNWKDILTLLCVLTACFWTSTEPALLMQ

SEQ ID NO: 3514 - protein, 80 aa, Homo sapiens
MWGRRQCALWMVFTSTAHTTLGSRPSTKQESARTARPWSSKRLRVRPFSSIPQSENCVASKVAGKPGGNPTTAHIPEVFP

SEQ ID NO: 3515 - protein, 35 aa, Homo sapiens
MVEPGGATMGAGPGSCILLSLLPLARTCLSGDFGL

SEQ ID NO: 3516 - protein, 21 aa, Homo sapiens
MIMGALIRTLDTFVIVFNICI

SEQ ID NO: 3517 - protein, 38 aa, Homo sapiens
MHISYLHSSYVSGAIVWLLSLSVWFHHQSIHPYIKLKI

SEQ ID NO: 3518 - protein, 83 aa, Homo sapiens
MQFHASVPSLMLFLPTGMPSPAPPALSAWQVHLSRSPQRPPPPGRQPLCPSPPGYLCTLSMLLLWHLSHCILLVYMFVSPSRL

SEQ ID NO: 3519 - protein, 98 aa, Homo sapiens
MTRRLRRLSGCRCTPGLGASLPGPGGSWVAWLQGKTGARTHVSPAGVGGAAALGSGVRPWGMFPMVGSLARPEKTCSRASIRCPLEEAELFEGCCKVR

SEQ ID NO: 3520 - protein, 36 aa, Homo sapiens
MLRVDLFTFSFNFTLTEFFFPNQTNSLASVAFSSLR

SEQ ID NO: 3521 - protein, 14 aa, Homo sapiens
NGIAALIWQLCLAF

SEQ ID NO: 3522 - protein, 24 aa, Homo sapiens
MRPIGPSEPFCGCTWGPLWTMGCG

SEQ ID NO: 3523 - protein, 49 aa, Homo sapiens
MPWGNCYVISHLQGSILIQFLLNIQLGCRDIDISFELSEFFIFISKNLI

SEQ ID NO: 3524 - protein, 48 aa, Homo sapiens
MSSISFLLHFLHVLPLWAPLVSLSPLLPVPHLFAVLVEAEVWAAKIWM

SEQ ID NO: 3525 - protein, 41 aa, Homo sapiens
MCRIHLNICKKLQGEELFFVFLFLFVLFFCHFTNWPHDRLR

SEQ ID NO: 3526 - protein, 32 aa, Homo sapiens
MQLCSGVLNPGLISNLFSSHSSQLFCAVHLGS

SEQ ID NO: 3527 - protein, 36 aa, Homo sapiens
MHGLVCFLGFSVSLSCFAFQRSCSYQGITQPLKLSS

SEQ ID NO: 3528 - protein, 56 aa, Homo sapiens
MRIAVLLMTYHSSCMGKQSRKQCPKWKKDTHTEQNSSWSCSWSCQTLPDALSKVKI

SEQ ID NO: 3529 - protein, 23 aa, Homo sapiens
MGLFLLFLLRVGVGCVICKYFCA

SEQ ID NO: 3530 - protein, 136 aa, Homo sapiens
MIQNILFLSAFFWGEGPIIPTLPHTVKSCPLWEPGSFPQNVSRSLEDDPSSTPHACSMGQCPQLPAFPLTMEPGTPGKPGAPRRPRSSRVASLSCRARWPNRPHGTTLARSTRHAGSPLLSCLALLSCSSWITLQR

SEQ ID NO: 3531 - protein, 33 aa, Homo sapiens
MPLSYSFCVLFIVWCIHSWKICNSCVSRICVFT

SEQ ID NO: 3532 - protein, 33 aa, Homo sapiens; identical to SEQ ID NO: 3531

SEQ ID NO: 3533 - protein, 20 aa, Homo sapiens
MLCVCLSTAISATFSLMHVE

SEQ ID NO: 3534 - protein, 8 aa, Homo sapiens
MSAWCNFY

SEQ ID NO: 3535 - protein, 35 aa, Homo sapiens
MCSGNGAACICRAQVLLALCCGICTSPAICCPWAT

SEQ ID NO: 3536 - protein, 13 aa, Homo sapiens
MGSCLLPNVYFSC

SEQ ID NO: 3537 - protein, 32 aa, Homo sapiens
MMFLIIMVITTVLFSDESVRSPGTCEYVVFDL

SEQ ID NO: 3538 - protein, 14 aa, Homo sapiens
FFTFPSAAHTAIQQ

SEQ ID NO: 3539 - protein, 31 aa, Homo sapiens
  SITE (23): Xaa equals any of the naturally occurring L-amino acids
MCMCVHVCACMCVPMCMCACRCXCVCLCVCT

SEQ ID NO: 3540 - protein, 187 aa, Homo sapiens
MVDILRALEKLRKLRKEAAARKGVCPPASADETFTHHLQRLRKLIKKRSELYEAEERALRVMLEGEQEEERKRELEKKQRKEKEKILLQKREIESKLFGDPDEFPLAHLLEPFRQYYLQAEHSLPALIQIRHDWDQYLVHPIIPKATSFPKDGSFPRSPATTSGQLLLSCISKDAPGVWSSQRSFQL

SEQ ID NO: 3541 - protein, 25 aa, Homo sapiens
MESLCCRVHTSRICLMNGVCLLYWS

SEQ ID NO: 3542 - protein, 21 aa, Homo sapiens
MKDLLSQAHETSSEEAVLFLY

SEQ ID NO: 3543 - protein, 27 aa, Homo sapiens
LMLTARFVQCTVVDPSAGFLIWIQARA

SEQ ID NO: 3544 - protein, 6 aa, Homo sapiens
LYLCGS

SEQ ID NO: 3545 - protein, 93 aa, Homo sapiens
QNTLTRFMRLPLISVALVQGWALGGGAEFTTACDFRLMTPESKIRFVHKEMGIIPSWGGTTRLVEIIGSRQALKVLSGALKLGFKKCSKHRNG

SEQ ID NO: 3546 - protein, 12 aa, Homo sapiens
MFLVVVVVLAFN

SEQ ID NO: 3547 - protein, 13 aa, Homo sapiens
IYLFQFTLSFCCF

SEQ ID NO: 3548 - protein, 39 aa, Homo sapiens
PFSLPPFSNCWYVSIVPSPHMQEAARILEIAAWSSETLP

SEQ ID NO: 3549 - protein, 62 aa, Homo sapiens
MTILQVVALPLYLYIILTWHLWPFLCSYVSVFPGRVYALECQELVSLVFFIYLAYKILLRIW

SEQ ID NO: 3550 - protein, 30 aa, Homo sapiens
MEFFETLGLNDSSELSLLFDTKEWHVWGFL

SEQ ID NO: 3551 - protein, 24 aa, Homo sapiens
  SITE (22): Xaa equals any of the naturally occurring L-amino acids
MACKLKLFTIWCFTGKALPTSXFN

SEQ ID NO: 3552 - protein, 45 aa, Homo sapiens
MLWEVCSFAFCNIACCCSLFGFVPPLSAVTLTAKSATSLLRPARP

SEQ ID NO: 3553 - protein, 136 aa, Homo sapiens [sequence omitted]

SEQ ID NO: 3554 - protein, 19 aa, Homo sapiens
MPLLFMSLTLLWQSGCSRK

SEQ ID NO: 3555 - protein, 26 aa, Homo sapiens
AVPHPNLIWNCSSHNSHTSWDGPGER

SEQ ID NO: 3556 - protein, 14 aa, Homo sapiens
MRSLPFYFLLCCFL

SEQ ID NO: 3557 - protein, 4 aa, Homo sapiens
MRKA

SEQ ID NO: 3558 - protein, 8 aa, Homo sapiens
MCAAEPYF

SEQ ID NO: 3559 - protein, 36 aa, Homo sapiens
  SITE (17): Xaa equals any of the naturally occurring L-amino acids
  SITE (34): Xaa equals any of the naturally occurring L-amino acids
MVNFFCFVLLRRVSSLXKKKKKSERHERCKEAQXWL

SEQ ID NO: 3560 - protein, 21 aa, Homo sapiens
MSFHMIVILLQSITKDSTILV

SEQ ID NO: 3561 - protein, 26 aa, Homo sapiens
MQAQFKTPAYSKVSVLILTHCILWVW

SEQ ID NO: 3562 - protein, 26 aa, Homo sapiens
MLNVKHMPNISLVLFVTFFPQYFRVI

SEQ ID NO: 3563 - protein, 30 aa, Homo sapiens
MHSRKPVRVLSILQLVLGLYPSCKDVMPQK

SEQ ID NO: 3564 - protein, 21 aa, Homo sapiens
MQRFVGLCGNIIIIWPCVAMS

SEQ ID NO: 3565 - protein, 9 aa, Homo sapiens
FHLYSLLLV

SEQ ID NO: 3566 - protein, 25 aa, Homo sapiens
MAQESLSPLGLLILVCAEPSVCAEG

SEQ ID NO: 3567 - protein, 34 aa, Homo sapiens
MKCISMAILFWIYGGSRAFLTLKVVCVREKAFTA

SEQ ID NO: 3568 - protein, 21 aa, Homo sapiens
FLCMFFLQTLQRCDYTIVYKQ

SEQ ID NO: 3569 - protein, 21 aa, Homo sapiens
FLCMFFLQTLQRCDYTIVYKQ

SEQ ID NO: 3570 - protein, 78 aa, Homo sapiens
MQFLKNVRCFTFSFSHLVFNIWCVFYTSSTSQFTPATFKMLSSRMQLVQPYLGPVSAWGRAGELSCVHGGPGEPPVLC

SEQ ID NO: 3571 - protein, 11 aa, Homo sapiens
MSSLHTTITVF

SEQ ID NO: 3572 - protein, 34 aa, Homo sapiens
MGLTGPFTFIYLLFEILSGQTTEPQINYFLTKFW

SEQ ID NO: 3573 - protein, 28 aa, Homo sapiens
MRFSKNVIWVHNFILLWSDNSPCEISAF

SEQ ID NO: 3574 - protein, 16 aa, Homo sapiens
DPPCPASIPTILYSTL

SEQ ID NO: 3575 - protein, 73 aa, Homo sapiens
MAPRPHLLTVLLLLPLGLNPKASLQWGGPCLGKAGASSPLVPLLLWRVSCEVSVIPKVKFAGLNDSVCPASLC

SEQ ID NO: 3576 - protein, 91 aa, Homo sapiens [sequence omitted]

SEQ ID NO: 3577 - protein, 32 aa, Homo sapiens
MGLKGAALCLFITWVHCILVVTGFPVYSSPTQ

SEQ ID NO: 3578 - protein, 39 aa, Homo sapiens
MEIGFFLLFFLLRYTANPETTTFLNSSSLAVQTIFCFQM

SEQ ID NO: 3579 - protein, 29 aa, Homo sapiens
MFLNRLKLLYGFWLIIINTVNYTRQPTRS

SEQ ID NO: 3580 - protein, 62 aa, Homo sapiens
  SITE (19): Xaa equals any of the naturally occurring L-amino acids
MLQKEVRQQILIVLMTFKXTYIRESLFSTFFRQNLLLSLHNIYQVFSGMEGEKSKLTLLNIF

SEQ ID NO: 3581 - protein, 76 aa, Homo sapiens
MNSEVECMPFTSVHILPDFLLGCLHTSLTFLLLNLPLCMVLLPPFNRLDVLTSAYCILHPHTSCQVFPYTGSILHS

SEQ ID NO: 3582 - protein, 70 aa, Homo sapiens
MLLYVSVQTPCLLIFCVDVLLTIESGSFQPPAMIRATPYFLQFHQWLLHIFWDSVFDFGTYIFKIIVSPC

SEQ ID NO: 3583 - protein, 34 aa, Homo sapiens
MNGNHAWISWAFSMLFFPSPLPGIYSKLTYNSEN

SEQ ID NO: 3584 - protein, 54 aa, Homo sapiens [sequence omitted]

SEQ ID NO: 3585 - protein, 44 aa, Homo sapiens
MLNGGGELGILHLFLIILDISLLEEKLSVTTEHKVDFSLSSPIF

SEQ ID NO: 3586 - protein, 7 aa, Homo sapiens
MAPKAWP

SEQ ID NO: 3587 - protein, 361 aa, Homo sapiens
  SITE (303): Xaa equals any of the naturally occurring L-amino acids
MWVLTPAAFAGKLLSVFRQPLSSLWRSLVPLFCWLRATFWLLATKRRKQQLVLRGPDETKEEEEDPPLPTTPTSVNYHFTRQCNYKCGFCFHTAKTSFVLPLEEAKRGLLLLKEAGMEKINFSGGEPFLQDRGEYLGKLVRFCKVELRLPSVSIVSNGSLIRERWFQNYGEYLDILAISCDSFDEEVNVLIGRGQGKKNHVENLQKLRRWCRDYRVAFKINSVINRFNVEEDMTEQIKALNPVRWKVFQCLLIEGENCGEDALREAERFVIGDEEFERFLERHKEVSCLVPESNQKMKDSYLXLDEYMRFLNCRKGRKDPSKSILDVGVEEAIKFSGFDEKMFLKRGGKYIWSKADLKLDW

SEQ ID NO: 3588 - protein, 37 aa, Homo sapiens
MNVCFVLFLLYCLLDLGCFPLSVRTVNVDMKVHSPVE

SEQ ID NO: 3589 - protein, 33 aa, Homo sapiens
MVLLVQADCFSLLMNIAWLLIISYLEGSLGEQF

SEQ ID NO: 3590 - protein, 104 aa, Homo sapiens
  SITE (99): Xaa equals any of the naturally occurring L-amino acids
  SITE (103): Xaa equals any of the naturally occurring L-amino acids
MLSPWWGSDCFLELALFFSASELSLLPLALSIFPIYICLSRFKFYLLQDANHNFPIKCNLLVFASPTVLCQKCSPRGTENYSFLQCGCSHPPFFLPFCXQTPXR

SEQ ID NO: 3591 - protein, 399 aa, Homo sapiens
MLSLPCGWLCTAIGLPTMFGYIICGVLLGPSGLNSIKSIVQVETLGEFGVFFTLFLVGLEFSPEKLRKVWKISLQGPCYMTLLMIAFGLLWGHLLRIKPTQSVFISTCLSLSSTPLVSRFLMGSARGDKEGDIDYSTVLLGMLVTQDVQLGLFMAVMPTLIQAGASASSSIVVEVLRILVLIGQILFSLAAVFLLCLVIKKYLIGPYYRKLHMESKGNKEILILGISAFIFLMLTVTELLDVSMELGCFLAGALVSSQGPVVTEEIATSIEPIRDFLAIVFFASIGLHVFPTFVAYELTVLVFLTLSVVVMKFLLAALVLSLILPRSSQYIKWIVSAGLAQVSEFSFVLGSRARRAGVISREVYLLILSVTTLSLLLAPVLWRAAITRCVPRPERRSSL

SEQ ID NO: 3592 - protein, 23 aa, Homo sapiens
MGLAQVVLPAVAHMSLAPVTLLA

SEQ ID NO: 3593 - protein, 39 aa, Homo sapiens
MAFFCSCGSRAVETSWVFLLILCQPPGAVCTGVGHLAPF

SEQ ID NO: 3594 - protein, 61 aa, Homo sapiens
MWLFRSLSGLFTDILASPQLSLTKGYSQKWSPYFPSSNDYLPGGRSSSVHSICFRTYAQRL

SEQ ID NO: 3595 - protein, 48 aa, Homo sapiens
MSILSVSHFEDFFSLLYLCFSFFGFYFVVLSVIFNVPKICTCSIKNVV

SEQ ID NO: 3596 - protein, 71 aa, Homo sapiens
MAGMALARAWKQMSWFYYQYLLVTALYMLEPWERTVFNSMLVSIVGMALYTGYVFMPQHIMAILHYFEIVQ

SEQ ID NO: 3597 - protein, 7 aa, Homo sapiens
ELFILQI

SEQ ID NO: 3598 - protein, 60 aa, Homo sapiens [sequence omitted]

SEQ ID NO: 3599 - protein, 71 aa, Homo sapiens [sequence omitted]

SEQ ID NO: 3600 - protein, 30 aa, Homo sapiens
MTVCGSFAIFLCIKSAIVAASEHACIPTDI

SEQ ID NO: 3601 - protein, 32 aa, Homo sapiens
MHLSNACLVFVLQTCLWWRVVSCSPVRLKAAL

SEQ ID NO: 3602 - protein, 34 aa, Homo sapiens
MTMFFSTWKIATLCSTFSQPQPWSTITMKKKNMP

SEQ ID NO: 3603 - protein, 28 aa, Homo sapiens
MCTAGIAELLTWILVLAFLLLQFQYLHL

SEQ ID NO: 3604 - protein, 42 aa, Homo sapiens
MYLVIFSCCPLGVFPFFSHVNIFHRYPCSLLNLQAHTMLHRS

SEQ ID NO: 3605 - protein, 30 aa, Homo sapiens
MVIVLYINIEHCCDCSRTFYVTALKQRHDY

SEQ ID NO: 3606 - protein, 26 aa, Homo sapiens
GQLRWSSLVSQFACLFILFSAKCIPF

SEQ ID NO: 3607 - protein, 37 aa, Homo sapiens
MVFTFDLFGILLTSGILGRHFFYSSAYEFKAIFCKYF

SEQ ID NO: 3608 - protein, 72 aa, Homo sapiens [sequence omitted]

SEQ ID NO: 3609 - protein, 39 aa, Homo sapiens
CASSPFLSLGPPRHTISVKGLSSPHGLLSQPFPLWQPWG

SEQ ID NO: 3610 - protein, 28 aa, Homo sapiens
FGFGGCFFVVAWFGIFGFVCICINFLYN

SEQ ID NO: 3611 - protein, 48 aa, Homo sapiens
MMGWRILAIGAVLTAAGRLGFPLPSLILVLYPPFHSSPDSLSSSSLYL

SEQ ID NO: 3612 - protein, 21 aa, Homo sapiens
MKLEFFWIFLVICWCVLSSDT

SEQ ID NO: 3613 - protein, 36 aa, Homo sapiens
MCLCCFLLKNCQRSGEGNDRSRKAPHHCVVRQYTER

SEQ ID NO: 3614 - protein, 54 aa, Homo sapiens
MKVVLMLLFICLGNMYLHGLRNLWQILFHIGVAFLSSYQILTRQLQEKQSDCGV

SEQ ID NO: 3615 - protein, 116 aa, Homo sapiens
MVRGPICYSFPPAPLFQFWLLLVSLRYLQPPWLGNHRSAQLSPWSPVSQSLVLPGPPHPHPQEPQPFLRGFQKDSLWRLFLLTFESSPFQFSFTRSNCTQAVLKIGNAFIYTKPFP

SEQ ID NO: 3616 - protein, 32 aa, Homo sapiens
MRLFLCLWSNPAWGKVSISDTIDVFYSALNFI

SEQ ID NO: 3617 - protein, 46 aa, Homo sapiens
MHNLMLILISLFILQISKDKGIFCFVLILARLRGTRHSYTLLGMNR

SEQ ID NO: 3618 - protein, 42 aa, Homo sapiens
MSLGETLLITTYVPVFLLLGVPGCRPPLGKAVTGRCSSTFLD

SEQ ID NO: 3619 - protein, 36 aa, Homo sapiens [sequence omitted]

SEQ ID NO: 3620 - protein, 51 aa, Homo sapiens [sequence omitted]

SEQ ID NO: 3621 - protein, 106 aa, Homo sapiens
MLFTLLVSCYVFLPLALPCFAFFFSFWPIPFYMCPQQRWGDTEHPGSFPALLGRPRLQAPAVETLKGNKQPSTLPDPRLFREAAHFHPGPRTPSLCPTRISLNGRD

SEQ ID NO: 3622 - protein, 36 aa, Homo sapiens
MTFVCKWLLGLEMAWFLFFFFFFLSSSRWEGGLRVL

SEQ ID NO: 3623 - protein, 18 aa, Homo sapiens
GSCLKLTQFKYSFCKTDF

SEQ ID NO: 3624 - protein, 62 aa, Homo sapiens
MGFSLFFLFFLPPFAVFPDLHLLKSKCTFLGLSKCRSFMLSYHTPTECRSHTAKALACHIVM

SEQ ID NO: 3625 - protein, 30 aa, Homo sapiens
MVVAYGRVFMLYLSLLFNFYQIKGSKNINL

SEQ ID NO: 3626 - protein, 18 aa, Homo sapiens
MQQIKFVVFAFQGVTGCP

SEQ ID NO: 3627 - protein, 54 aa, Homo sapiens
MLIQMEKTGEGVGVTVQYFLALGLLLSQFLSLPLLIISGMLAVINPISMMNGLG

SEQ ID NO: 3628 - protein, 10 aa, Homo sapiens
MFVYCIHFHS

SEQ ID NO: 3629 - protein, 7 aa, Homo sapiens
MQSIKRT

SEQ ID NO: 3630 - protein, 34 aa, Homo sapiens [sequence omitted]

SEQ ID NO: 3631 - protein, 45 aa, Homo sapiens
MRGLYFCLGVVICTHAILLKPSCLVLFLESFFFPVLMYAGFGNSS

SEQ ID NO: 3632 - protein, 2 aa, Homo sapiens
MG

SEQ ID NO: 3633 - protein, 44 aa, Homo sapiens
MIFHLSNLLLDTICTFLFSCSQGGGLQGPELCYPTRFLIEIPNH

SEQ ID NO: 3634 - protein, 37 aa, Homo sapiens
MLGIVISCLFYCWTKWEAKEVCQRRWRVRRYHLSKIS

SEQ ID NO: 3635 - protein, 31 aa, Homo sapiens
MILDTKMWVLSILVAVGVLIASRASQDRARK

SEQ ID NO: 3636 - protein, 22 aa, Homo sapiens
MVFIFISTCQLCISKTAGFSKE

SEQ ID NO: 3637 - protein, 30 aa, Homo sapiens
MLEMLLRLLRAIWANVFLWHFYFTNSISSI

SEQ ID NO: 3638 - protein, 756 aa, Homo sapiens
MSALFLLVIGTAYLEAQGIWEPFRRRLSFEASNPPFDVGRPFDLRRIVGISSEGNLNTLSCDPGHSRGFCGAGGSSSRPSAGSHKQCGPSVHPHSSHSNRNSADVENVRAKNSSSTSSRTSAQAASSQSANKTSPLVLDSNTVTQGHTAGRKSKGAKQSQHGSQHHAHSPLEQHPQPPLPPPVPQPQEPQPERLSPAPLAHPSHPERASSARHSSEDSDITSLIEAMDKDFDHHDSPALEVFTEQPPSPLPKSKGKGKPLQRKVKPPKKQEEKEKKGKGKPQEDELKDSLADDDSSSTTTETSNPDTEPLLKEDTEKQKGKQAMPEKHESEMSQVKQKSKKLLNIKKEIPTDVKPSSLELPYTPPLESKQRRNLPSKIPLPTAMTSGSKSRNAQKTKGTSKLVDNRPPALAKFLPNSQELGNTSSSEGEKDSPPPEWDSVPVHKPGSSTDSLYKLSLQTLNADIFLKQRQTSPTPASPSPPAAPCPFVARGSYSSIVNSSSSSDPKIKQPNGSKHKLTKAASLPGKNGNPTFAAVTAGYDKSPGGNGFAKVSSNKTGFSSSLGISHAPVDSDGSDSSGLWSPVSNPSSPDFTPLNSFSAFGNSFNLTGEVFSKLGLSRSCNQASQRSWNEFNSGPSYLWESPATDPSPSWPASSGSPTHTATSVLGNTSGLWSTTPFSSSIWSSNLSSALPFTTPANTLASIGLMGTENSPAPHAPSTSSPADDLGQTYNPWRIWSPTIGRRSSDPWSNSHFPHEN

SEQ ID NO: 3639 - protein, 1 aa, Homo sapiens
F

SEQ ID NO: 3640 - protein, 7 aa, Homo sapiens
KILDFHS

SEQ ID NO: 3641 - protein, 35 aa, Homo sapiens
APSISTGSPSIANLFLTGLLGPEVLHLKHPMLKAA

SEQ ID NO: 3642 - protein, 32 aa, Homo sapiens
MFARCSLLLISFLLFTARFSQVRGHQPWPPFP

SEQ ID NO: 3643 - protein, 17 aa, Homo sapiens
MPLSCYFKLWPSIALSL

SEQ ID NO: 3644 - protein, 34 aa, Homo sapiens
MRKYCLGFCYSVFILGRVLNFMHLHLLACGCAKC

SEQ ID NO: 3645 - protein, 37 aa, Homo sapiens
KTIHSYLFFFSPYCLSQLTLYTDFVSPSIPFTPDYKF

SEQ ID NO: 3646 - protein, 28 aa, Homo sapiens
MKGFFLIVFMLSRAEEEEDEGLVLLSCG

SEQ ID NO: 3647 - protein, 31 aa, Homo sapiens
MIRHLRNTGALLLFSLQLVWADKREIEPSHS

SEQ ID NO: 3648 - protein, 1 aa, Homo sapiens
I

SEQ ID NO: 3649 - protein, 17 aa, Homo sapiens
MRGSSQLCLVLLLPAAL

SEQ ID NO: 3650 - protein, 9 aa, Homo sapiens
MWGRSFLQL

SEQ ID NO: 3651 - protein, 16 aa, Homo sapiens
GHTEGIAVVSHFGFLL

SEQ ID NO: 3652 - protein, 34 aa, Homo sapiens
MDLFGFRALLSFHWNVLFALALFFFFFWFLLAFI

SEQ ID NO: 3653 - protein, 46 aa, Homo sapiens
MTRRHIVLLREFWHWERCRLSRMTAIPTPQSVLRDCGEGASGTGKV

SEQ ID NO: 3654 - protein, 126 aa, Homo sapiens [sequence omitted]

SEQ ID NO: 3655 - protein, 66 aa, Homo sapiens
MALILIVFKYQSFFRLHSCNQQPHAKVLEPAVELQDEDGMVHLSTVISYNLKNRQAGNVYIESYIP

SEQ ID NO: 3656 - protein, 49 aa, Homo sapiens
DQRQWLGVMCELSLLLRMLFCERNCECNGNVGASGDSLSCPLTSKASCA

SEQ ID NO: 3657 - protein, 69 aa, Homo sapiens [sequence omitted]

SEQ ID NO: 3658 - protein, 38 aa, Homo sapiens
MSIFSVLIFFPSHCYSLPSRVRCGEIMLACFHGDTEEK

SEQ ID NO: 3659 - protein, 19 aa, Homo sapiens
MACIPSGLLIWAWNLWFRA

SEQ ID NO: 3660 - protein, 84 aa, Homo sapiens [sequence omitted]

SEQ ID NO: 3661 - protein, 36 aa, Homo sapiens
MCYFLVISIILCIFRLFNSQMYMILPCFLKKNLSIM

SEQ ID NO: 3662 - protein, 20 aa, Homo sapiens
MKAVWYLASSFLIFLVVQKR

SEQ ID NO: 3663 - protein, 27 aa, Homo sapiens
MIRTVIFSTLFLYSVPGMTYSIDFMTH

SEQ ID NO: 3664 - protein, 32 aa, Homo sapiens
TFLFLFWYCKLAGWLHWLTHYPLHHILFFTYY

SEQ ID NO: 3665 - protein, 39 aa, Homo sapiens
MYIIISLTLIMWRFRFFQLMRLQPCLCLKKMKKQNKTMS

SEQ ID NO: 3666 - protein, 36 aa, Homo sapiens
MGLSGPGGSQHSLHFLTSSSFLIFFSFFSIETGAEA

SEQ ID NO: 3667 - protein, 77 aa, Homo sapiens [sequence omitted]

SEQ ID NO: 3668 - protein, 26 aa, Homo sapiens
MSPFFLTVLKHYFAFLFVTKSFIFNG

SEQ ID NO: 3669 - protein, 10 aa, Homo sapiens
MLKSDAVKAI

SEQ ID NO: 3670 - protein, 31 aa, Homo sapiens
  SITE (27): Xaa equals any of the naturally occurring L-amino acids
MYYVQKTNPLVIAMGTVSINFFFFYKXRKVY

SEQ ID NO: 3671 - protein, 39 aa, Homo sapiens
MYICLIILLSTVFCGPDSAFLCFFGFRLLVACDFSDFWP

SEQ ID NO: 3672 - protein, 42 aa, Homo sapiens [sequence omitted]

SEQ ID NO: 3673 - protein, 80 aa, Homo sapiens
ISSTDIWWNRSLDTGLRLLLSWPGAAGTTACVCADTVYYYQMVPSWKFRSPPTWISLLGPFSGSFNVDNDSGMWLYLLLY

SEQ ID NO: 3674 - protein, 37 aa, Homo sapiens
MLIFQIISQQLPYLLLAITTGSQESRYFYSCWTNEKK

SEQ ID NO: 3675 - protein, 30 aa, Homo sapiens
MTPCTLSFPVFLIYIISKYLWLLSSCSPEP

SEQ ID NO: 3676 - protein, 38 aa, Homo sapiens
MTCARSPLALPTPLFFFLLILYSQKRISFSSFFHSLKF

SEQ ID NO: 3677 - protein, 5 aa, Homo sapiens
GKCAC

SEQ ID NO: 3678 - protein, 77 aa, Homo sapiens
MQKQLYFRAWCYLLANFLFFDLTATTFDSTSLKTSARSRQYTLTTLVLTAFPIASLPFKLLLVSVLPSDWSKHNKGL

SEQ ID NO: 3679 - protein, 28 aa, Homo sapiens
MRPYQRKNRTLAFFLRFLIMFLVFCESL

SEQ ID NO: 3680 - protein, 34 aa, Homo sapiens
MATILILSMHLHLLQASSKGLCFCTLPSTFLYDF

SEQ ID NO: 3681 - protein, 66 aa, Homo sapiens
MTLPSWFSCYLSDCPLRGPLSPPVLSFLVSLKGLVMGLRPSKYAPGFNYHLYAAESKSIQLVLNCT

SEQ ID NO: 3682 - protein, 33 aa, Homo sapiens
MVVMEAGGIMPCWFQCWDWLLFVGFGLGSPRKK

SEQ ID NO: 3683 - protein, 34 aa, Homo sapiens
KWLLFIFLLCLQLVNALLSLFQERFVHCPARFVS

SEQ ID NO: 3684 - protein, 29 aa, Homo sapiens
MQLAVFAFSTLWLWLLAMPRLSVGMPYGS

SEQ ID NO: 3685 - protein, 39 aa, Homo sapiens
MRWLLLVFNQIRFTVISLICIYYLFAIILYRIFWIHVLA

SEQ ID NO: 3686 - protein, 30 aa, Homo sapiens
MAFFKVSYHFLIALLTYNWTQPTLSASVNS

SEQ ID NO: 3687 - protein, 38 aa, Homo sapiens
MARADWVLSLLLYNHITALPCIFSSKNGDYLLCGSVCR

SEQ ID NO: 3688 - protein, 6 aa, Homo sapiens
MFIIKI

SEQ ID NO: 3689 - protein, 22 aa, Homo sapiens
HCLHQKQFLFFFLILLLLYLKF

SEQ ID NO: 3690 - protein, 28 aa, Homo sapiens
PRTPCNVGRPALSSMALTSCSGRTSSPG

SEQ ID NO: 3691 - protein, 16 aa, Homo sapiens
MGSSRGREASWGLPLG

SEQ ID NO: 3692 - protein, 74 aa, Homo sapiens
FRFLFSFFHEALWRSMFLLSFLRKPSFWATGLILSTSSFPPFSIVSLPPSHPTPCPSLPQLPLFPCSEFPAQRH

SEQ ID NO: 3693 - protein, 27 aa, Homo sapiens
MCLFLFCLFYFYFSVNARTDLHVKSGL

SEQ ID NO: 3694 - protein, 25 aa, Homo sapiens
GHPKCKLLLSDPCLLMYSLFNCVEF

SEQ ID NO: 3695 - protein, 40 aa, Homo sapiens
MACVILGFCVFWWVSFLGSPDLLLGPVLSANPASFTCPAH

SEQ ID NO: 3696 - protein, 36 aa, Homo sapiens
MWVREGIWFCYLAVVFSHPSFLTIKSHLGLEKKKKK

SEQ ID NO: 3697 - protein, 433 aa, Homo sapiens
  SITE (298): Xaa equals any of the naturally occurring L-amino acids
MATLFTIWCTLCDRAYPSDCPEHGPVTFVPDTPIESRARLSLPKQLVLRQSIVGAEVGVWTGETIPVRTCFGPLIGQQSHSMEVAEWTDKAVNHIWKIYHNGVLEFCIITTDENECNWMMFVRKARNREEQNLVAYPHDGKIFFCTSQDIPPENELLFYYSRDYAQQIGVPEHPDVHLCNCGKECNSYTEFKAHLTSHIHNHLPTQGHSGSHGPSHSKERKWKCSMCPQAFISPSKLHVHFMGHMGMKPHKCDFCSKAFSDPSNLRTHLKIHTGQKNYRCTLCDKSFTQKAHLESHMXIHTGEKNLKCDYCDKLFMRRQDLKQHVLIHTQERQIKCPKCDKLFLRTNHLKKHLNSHEGKRDYVCEKCTKAYLTKYHLTRHLKTCKGPTSSSSAPEEEEEDDSEEEDLADSVGTEDCRINSAVYSADESLSAHK

SEQ ID NO: 3698 - protein, 38 aa, Homo sapiens
MGSPMTWSCRSLSSLWWPPVSSARHRRCSRRGDPGTRG

SEQ ID NO: 3699 - protein, 39 aa, Homo sapiens
MVMFLSLSLWINPVIGKDMTIWRWNTYRKDQISYLLFFH

SEQ ID NO: 3700 - protein, 28 aa, Homo sapiens
MIGLTFASTSDFALLSKFNTFQLLMCVL

SEQ ID NO: 3701 - protein, 31 aa, Homo sapiens
MGKGIAVLALWYAATSLGSRPCPCPTTHSQL

SEQ ID NO: 3702 - protein, 17 aa, Homo sapiens
MLLFLIVTLLMNVRSLG

SEQ ID NO: 3703 - protein, 50 aa, Homo sapiens
MFLLFPQTSLTVLFVSCPVEGSRVHILLSVNMPWNLHKGRTMCSFFQQLF

SEQ ID NO: 3704 - protein, 65 aa, Homo sapiens
MHRLALWLLGLWGVMWSHTSALLALVKLWKGRLGKAGTRKKRKRQQQESMQVGKNLVWRAQQRKR

SEQ ID NO: 3705 - protein, 34 aa, Homo sapiens
MERVGRNLTALRFLLFVLILRLLKIIFICSVYYE

SEQ ID NO: 3706 - protein, 43 aa, Homo sapiens
MCESTELNMTFHLFIVALAGAGARNSDRNTTRVNGSQPCSDPQ

SEQ ID NO: 3707 - protein, 55 aa, Homo sapiens
MTQKDGICKDQLLFALLIVCNAVYSNTWSFSSGSGMWINLTNQDPSLNVNTTNYT

SEQ ID NO: 3708 - protein, 24 aa, Homo sapiens
MNCKKQLLTDIFLLLFLGGFFFFF

SEQ ID NO: 3709 - protein, 53 aa, Homo sapiens
MRFLAHVLCSFSVVFLHLKNSHGSMFYKMNYQRNRDGPRFSEMVPCDQVLLFG

SEQ ID NO: 3710 - protein, 35 aa, Homo sapiens
MDLFCSFLPSLLAIMFLCPPVLHFMGYHVQQQLRR

SEQ ID NO: 3711 - protein, 11 aa, Homo sapiens
MSHCVWSLAVS

SEQ ID NO: 3712 - protein, 28 aa, Homo sapiens
MPEWWGQMLWTLGPAALPLLAGRCTREV

SEQ ID NO: 3713 - protein, 38 aa, Homo sapiens
MFGNSSCSTYLLWVSLFNFGHSSECIMISCYGFKFAFS

SEQ ID NO: 3714 - protein, 66 aa, Homo sapiens; identical to SEQ ID NO: 2967

SEQ ID NO: 3715 - protein, 36 aa, Homo sapiens
MFCHCIVCLLLVLWSSLPFFIPSFLLLKVILSCGMI

SEQ ID NO: 3716 - protein, 25 aa, Homo sapiens
MMTLGLSLFLFFCFVGCEFERFCDK

SEQ ID NO: 3717 - protein, 38 aa, Homo sapiens
MDFTKLLTYTFGFAVFIVLGKNCGFKNYSLIKLLKKKK

SEQ ID NO: 3718 - protein, 33 aa, Homo sapiens
MFIGDSAYIFITYLLFWLLSNILSFVFANSVHE

SEQ ID NO: 3719 - protein, 32 aa, Homo sapiens
MLKILMCKSPLSPHLFYKLLWLEGFCFWLLSG

SEQ ID NO: 3720 - protein, 406 aa, Homo sapiens
  SITE (254): Xaa equals any of the naturally occurring L-amino acids
MIRIAALNASSTIEDDHEGSFKSHKTQTKEAQEAEAFALYHKALDLQKHDRFEESAKAYHELLEASLLREAVSSGDEKEGLKHPGLILKYSTYKNLAQLAAQREDLETAMEFYLEAVMLDSTDVNLWYKIGHVALRLIRIPLARHAFEEGLRCNPDHWPCLDNLITVLYTLSDYTTCLYFICKALEKDCRYSKGLVLKEKIFEEQPCLRKDSLRMFLKCDMSIHDVSVSAAETQAIVDEALGLRKKRQALIVRXKEPDLKLVQPIPFFTWKCLGESLLAMYNHLTTCEPPRPSLGKRIDLSDYQDPSQPLESSMVVTPVNVIQPSTVSTNPAVAVAEPVVSYTSVATTSFPLHSPGLLETGAPVGDISGGDKSKKGVKRKKISEESGETAKRRSARVRNTKCKKKK

SEQ ID NO: 3721 - protein, 58 aa, Homo sapiens
MPFCMNACEMLLLLCMAWLPWLAGISSFVVFLSSLCITVSFVFLACKLLEDKGMSESI

SEQ ID NO: 3722 - protein, 14 aa, Homo sapiens
NILFVLIDSILGSS

SEQ ID NO: 3723 - protein, 37 aa, Homo sapiens
MVWICVLLQTLLRHILRSMERNRVDDKVCVVFTKEYS

SEQ ID NO: 3724 - protein, 410 aa, Homo sapiens
  SITE (8): Xaa equals any of the naturally occurring L-amino acids
  SITE (404): Xaa equals any of the naturally occurring L-amino acids
  SITE (409): Xaa equals any of the naturally occurring L-amino acids
GRLRNGIXGAAGIPRANASRTNFSSHTNQSGGSELRQREGQRFGAAHVWENGARSNVTVRNTNQRLEPIRLRSTSNSRSRSPIQRQSGTVYHNSQRESRPVQQTTRRSVRRRGRTRVFLEQDRERERRGTAYTPFSNSRLVSRITVEEGEESSRSSTAVRRHPTITLDLQVRRIRPGENRDRDSIANRTRSRVGLAENTVTIESNSGGFRRTISRLERSGIRTYVSTITVPLRRISENELVEPSSVALRSILRQIMTGFGELSSLMEADSESELQRNGQHLPDMHSELSNLGTDNNRSQHREGSSQDRQAQGDSTEMHGENETTQPHTRNSDSRGGRQLRNPNNLVETGTLPILRLAHFFLLNESDDDDRIRGLTKEQIDNLSTRHYEHNSIDSELGKICSVSXAEFWXP

SEQ ID NO: 3725 - protein, 37 aa, Homo sapiens
MADATCTLLVIFCVMGYEMVHRKKPEKYAKVRFILRV

SEQ ID NO: 3726 - protein, 26 aa, Homo sapiens
MDLVEAFNHSRGPQVMLISLLAGVLV

SEQ ID NO: 3727 - protein, 35 aa, Homo sapiens
MWSRMVRSLWYIMFTWQGGSCVLSGTGSLLSYTRT

SEQ ID NO: 3728 - protein, 224 aa, Homo sapiens
MLRAPGCLLRTSVAPAAALAAALLSSLARCSLLEPRDPVASSLSPYFGTKTRYEDVNPVLLSGPEAPWRDPELLEGTCTPVQLVALIRHGTRYPTVKQIRKLRQLHGLLQARGSRDGGASSTGSRDLGAALADWPLWYADWMDGQLVEKGRQDMRQLALRLASLFPALFSRENYGRCGSSPVPSTAAWIAAPPSCRGCGSTTTLACRRRTSQIWSLDLQQLMIN

SEQ ID NO: 3729 - protein, 11 aa, Homo sapiens
MWPWDMVFSWS

SEQ ID NO: 3730 - protein, 51 aa, Homo sapiens
  SITE (51): Xaa equals any of the naturally occurring L-amino acids
MTVVTALLLIILQTRNLNSGQISVKNWQMFFMRTLIMNLSAAFQKVRCKMX

SEQ ID NO: 3731 - protein, 40 aa, Homo sapiens [sequence omitted]

SEQ ID NO: 3732 - protein, 34 aa, Homo sapiens
MLSQCLLQFVVWVFFFLKPHNNFGKQCMGRTCVC

SEQ ID NO: 3733 - protein, 25 aa, Homo sapiens
MYFCDTVIMFCICLILADLQYAIKV

SEQ ID NO: 3734 - protein, 45 aa, Homo sapiens
MRWTCLLGTPGHPLFFLLCAWSIMSTPADPWKRKCLCCRVLHGHE

SEQ ID NO: 3735 - protein, 36 aa, Homo sapiens
MLYLNMNGKFWFLAFTFYYLNFINANISFVISYSIS

SEQ ID NO: 3736 - protein, 36 aa, Homo sapiens; identical to SEQ ID NO: 3735

SEQ ID NO: 3737 - protein, 36 aa, Homo sapiens; identical to SEQ ID NO: 3735

SEQ ID NO: 3738 - protein, 70 aa, Homo sapiens
MPWCPCWTVLTSKPFLSMLPACSAWPRSTFSSRTSVWKSLRSPRLSWRNTTRLQCFSPSNSCSGMSYFAS

SEQ ID NO: 3739 - protein, 45 aa, Homo sapiens
MGVFDPTEIHNRGQLKSHMKEAMIKLGFHLLCFFMYLYSGSNCPC

SEQ ID NO: 3740 - protein, 29 aa, Homo sapiens
MVLVLLCVGPLGTQAGANGIWAELTEFLE

SEQ ID NO: 3741 - protein, 58 aa, Homo sapiens
MLLLVSVFSPVLFSRSSTVEMDVEPFCLVLSSAFPEITPPISCLCLNMFFSLLRSPHS

SEQ ID NO: 3742 - protein, 33 aa, Homo sapiens
MVCACLLSLRLGLLTECEYKYPYLGEKYIFKGW

SEQ ID NO: 3743 - protein, 33 aa, Homo sapiens
MFCSLLFSQYVQWLLAQNRQYSLTECYWTLSVY

SEQ ID NO: 3744 - protein, 290 aa, Homo sapiens
MAVTAQVKSLTQKVQAGAYPTEKGLSFLEVKDQLLLMYLMDLTHLILDKASGGSLQGHDAVLRLVEIRTVLEKLRPLDQKLKYQIDKLIKTAVTGSLSENDPLRFKPHPSNMMSKLSSEDEEEDEAEDDQSEASGKKSVKGVSKKYVPPRLVPVHYDETEAEREKKRLERAKRRALSSSVIRELKEQYSDAPEEIRDARHPHVTRQSQEDQHRINYEESMMVRLSVSKREKGRRKRANVMSSQLHSLTHFSDISALTGGTVHLDEDQNPIKKRKKIPQKGRKKKGFRRRR

SEQ ID NO: 3745 - protein, 24 aa, Homo sapiens
MGGTPSTKCLVTSAWSGFSACTPC

SEQ ID NO: 3746 - protein, 25 aa, Homo sapiens
MTRSLVLRFKVLLMLGLLIEVSEEL

SEQ ID NO: 3747 - protein, 73 aa, Homo sapiens
MPSLWDRFSSSSTFQLTLVLRLDSRLWPKIQGLFSSANSPFLPGFSQSLTLSTGFRVIKKKLYSSEQLLIEEC

SEQ ID NO: 3748 - protein, 55 aa, Homo sapiens
MPHPPLPETSLEAQLPMGLLQLLRCSVQAWSPPPSSFCPGSEPRSASAHWGYWWP

SEQ ID NO: 3749 - protein, 27 aa, Homo sapiens
MPISVSSFCAAVIVGLPVSFELWALPG

SEQ ID NO: 3750 - protein, 33 aa, Homo sapiens
MIVVVLWINLCSWFCFVSPLPKCSFQYYTRKRS

SEQ ID NO: 3751 - protein, 67 aa, Homo sapiens
  SITE (45): Xaa equals any of the naturally occurring L-amino acids
MVLMGIFFSTLFVFMDSGTWASSIFFHLMTCVLSLGVVLPWLHRXIRRIPCSGFFSFSSRQTPASTS

SEQ ID NO: 3752 - protein, 7 aa, Homo sapiens
VGILCLW

SEQ ID NO: 3753 - protein, 144 aa, Homo sapiens
MDVRKLDFPSASFDVVLEKGTLDALLAGERDPWTVSPEGVHTVDQVLSEVSRVLVPGGRFISMTSAAPHFRTRHYAQAYYGWSLRHATYGSGFHFHLYLMHKGGKLSVAQLALGAQILSPPRTPTSPCFLQDSDHEDFLSAIQL

SEQ ID NO: 3754 - protein, 18 aa, Homo sapiens
VLCSLSCMLKLGVCWRAS

SEQ ID NO: 3755 - protein, 96 aa, Homo sapiens [sequence omitted]

SEQ ID NO: 3756 - protein, 15 aa, Homo sapiens
MLHFCFIFYFSLLCF

SEQ ID NO: 3757 - protein, 24 aa, Homo sapiens
EKRRKKARSTGNLGCGTMSRRMRT

SEQ ID NO: 3758 - protein, 148 aa, Homo sapiens
  SITE (128): Xaa equals any of the naturally occurring L-amino acids
MAKFRRRTCIILALFILFIFSLMMGLKMLRPNTATFGAPFGLDLLPELHQRTIHLGKNFDFQKSDRINSETNTKNLKSVEITMKPSKASELNLDELPPLNNYLHVFYYSWYGNPQFDGKYIHWNHPVXEHWDPRIAKNYPQGRHNPSR

SEQ ID NO: 3759 - protein, 14 aa, Homo sapiens
MPEAHGPSEGLWGT

SEQ ID NO: 3760 - protein, 36 aa, Homo sapiens [sequence omitted]

SEQ ID NO: 3761 - protein, 25 aa, Homo sapiens
MGLHLTFLVILVDQMPLGHQSLLQD

SEQ ID NO: 3762 - protein, 377 aa, Homo sapiens [sequence omitted]

SEQ ID NO: 3763 - protein, 175 aa, Homo sapiens
MDLAGRKVLLFVSAAIMFAANLTLGLYIHFGPRPLSPNSTAGLESESWGDLAQPLAAPAGYLTLVPLLATMLFIMGYAVGWGPITWLLMSEVLPLRARGVASGLCVLASWLTAFVLTKSFLPVVSTFGLQVPFFFFAAICLVSLVFTGCCVPETKGRSLEQIESFFRTGRRSFLR

SEQ ID NO: 3764 - protein, 31 aa, Homo sapiens
MWFMSNSAVLLWLWFKFLMFKVDAVFRRAFY

SEQ ID NO: 3765 - protein, 59 aa, Homo sapiens
  SITE (37): Xaa equals any of the naturally occurring L-amino acids
MWAKVPPPHKALGSPRSPHRQTWGSRPRVGPREEGLXVGRGITEWKEIEGAESAFAVMS

SEQ ID NO: 3766 - protein, 48 aa, Homo sapiens [sequence omitted]

SEQ ID NO: 3767 - protein, 11 aa, Homo sapiens
MRLLVLFCFIN

SEQ ID NO: 3768 - protein, 417 aa, Homo sapiens
NSRVDPRVRGEIPISSSQTNRSSFDLLPREFRLVEVHDPPLHQPSANKPKPPTMLDIPSEPCSLTIHTIQLIQHNRRLRNLIATAQAQNQQQTEGVKTEESEPLPSCPGSPPLPDDLLPLDCKNPNAPFQIRHSDPESDFYRGKGEPVTELSWHSCRQLLYQAVATILAHAGFDCANESVLETLTDVAHEYCLKFTKLLRFAVDREARLGQTPFPLNGKEQGFHEVGIGSVLSLQKFWQHRIKDYHSYMLQISKQLSEEYERIVNPEKATEDAKPVKIKEEPVSDITFPVSEELEADLASGDQSLPMGVLGAQSERFPSNLEVEASPQASSAEVNASPLWNLAHVKMEPQESEEGNVSGHGVLGSDVFEEPISGMSEAGIPQSPDDSDSSYGSHSTDSLMGSSPVFNQRCKKRMRKI

SEQ ID NO: 3769 - protein, 38 aa, Homo sapiens
MLSGYPLSFFLLTICLVVLTARGTEGLCPGIWRPALFT

SEQ ID NO: 3770 - protein, 19 aa, Homo sapiens
MLLFLLLLLLSSLLALNDC

SEQ ID NO: 3771 - protein, 30 aa, Homo sapiens
MGAPTRKCSVQWLSLSVPFLSAQCSAWRSI

SEQ ID NO: 3772 - protein, 31 aa, Homo sapiens
MQSHFLKDFHPDPALDKHFLLFRSKTYKSCK

SEQ ID NO: 3773 - protein, 37 aa, Homo sapiens
MPFKYLFMGFISHILSAPSSETLHLFHLPSKESEADD

SEQ ID NO: 3774 - protein, 44 aa, Homo sapiens
MSGCGASGMNLFHVLCWELALGDHNPQSPQHQGKVPGAQEGKPT

SEQ ID NO: 3775 - protein, 33 aa, Homo sapiens
MATPSFLFFFLLLNFNSSFVWLFSFLCLFPVKL

SEQ ID NO: 3776 - protein, 44 aa, Homo sapiens
  SITE (8): Xaa equals any of the naturally occurring L-amino acids
  SITE (40): Xaa equals any of the naturally occurring L-amino acids
MCPLPMLXSLLTFSFFSLSYLLLLWSSSNSSSVHLNSTFXDPVG

SEQ ID NO: 3777 - protein, 25 aa, Homo sapiens
HLLIYRIFICTCFHLFVVNFLRQTH

SEQ ID NO: 3778 - protein, 38 aa, Homo sapiens
METSYITLLCVFTHVGFAVLALTAHGSAGHTPTHTNCH

SEQ ID NO: 3779 - protein, 39 aa, Homo sapiens
MWIMGLLYILVFYNFKISINSQKWERKRQQDFGSWRQIY

SEQ ID NO: 3780 - protein, 32 aa, Homo sapiens
MGAGCVAVLLLGQAAGETVFPWPCPVGPSMMS

SEQ ID NO: 3781 - protein, 25 aa, Homo sapiens
MLFFLCFCFLQLFHVYKANPFCSAH

SEQ ID NO: 3782 - protein, 45 aa, Homo sapiens
MDSILIFKWQKLGWGAFKTCFLNCVLTYTIWCFICLFFLTMSRRP

SEQ ID NO: 3783 - protein, 42 aa, Homo sapiens
MQKFVVIMYLCLVTIMFYRPTLVPGHYCKMLKSQENFTELKK

SEQ ID NO: 3784 - protein, 29 aa, Homo sapiens
MVIHYFLLFLVKSWCVMESTCSMCVCLCV

SEQ ID NO: 3785 - protein, 40 aa, Homo sapiens
MLAVFLRIKLRLAGTVKPKFLFVSFLAPLIFLDFEKFTVW

SEQ ID NO: 3786 - protein, 102 aa, Homo sapiens
MGLRNILKVCCTHDITTISIPLLLVHDMSEEMTIPWCLRRAELVFKCVKGFMMEMASWDGGISRTVQFLVPQSISEEMFYQLSNMLPQIFRVSSTLTLTSKH

SEQ ID NO: 3787 - protein, 102 aa, Homo sapiens; identical to SEQ ID NO: 3786

SEQ ID NO: 3788 - protein, 14 aa, Homo sapiens
MVPSEACPLVCTLV

SEQ ID NO: 3789 - protein, 57 aa, Homo sapiens
MWRRDQSLLLVSLQLPFSPVSGTPRFMPAVQPCQPHRLNTPSNSCSVFLGGGAPRGN

SEQ ID NO: 3790 - protein, 122 aa, Homo sapiens
VAEYREWGRARAGGRDQGLDPLSSFSLGRTGQLPPTLTPLLPVNGAVREESIHCKSVEEISTLVQKLADQSGLDVIRIRKPFHTDNPSIQGQWHPFTNKPTTFRGLRPREVQDPAPAQVQAQ

SEQ ID NO: 3791 - protein, 65 aa, Homo sapiens
MLSLLSLCLLNPQAPVLPDSGTCTLPLQSGVLRALRTMKHAWCIFLSVNFPHWLLFNPLHFYSKS

SEQ ID NO: 3792 - protein, 40 aa, Homo sapiens
MGTDALSFLLWGFPFLWSPCSPCPPSGAAGLKGGTRGGRV

SEQ ID NO: 3793 - protein, 55 aa, Homo sapiens
MPVTWFLAWSAFFQVCLGPSPARGYSTLQARYAFFQPLGCGHCIQVGTSFPSLPF

SEQ ID NO: 3794 - protein, 30 aa, Homo sapiens
MAMWVVAVIASSATLGLAKITHDLQSTLQL

SEQ ID NO: 3795 - protein, 38 aa, Homo sapiens
MLFFPHSPLNIVLYALLNTFSFVSQASLWMTPKYNFFH

SEQ ID NO: 3796 - protein, 46 aa, Homo sapiens
ADGPCFGPALFLTLALTWEGLEGPSHHPRSPSAVPFPCRLAAASPA

SEQ ID NO: 3797 - protein, 31 aa, Homo sapiens
MCVCVCVCVCVCVHRVLPCVVFFWRLSLWSR

SEQ ID NO: 3798 - protein, 32 aa, Homo sapiens
MRLSTWLTFNMCIFTLCIFLTGLSRLDCIHHI

SEQ ID NO: 3799 - protein, 17 aa, Homo sapiens
ASQTFSTELWCFGLWHT

SEQ ID NO: 3800 - protein, 33 aa, Homo sapiens
MKDRKQWAFKTRWPFFHFLMLSLALDCYRFLTS

SEQ ID NO: 3801 - protein, 30 aa, Homo sapiens
MAILLTFLVYVIITSIGKQLHKKNLYIFNF

SEQ ID NO: 3802 - protein, 15 aa, Homo sapiens
MRFLWCQPVASVWGS

SEQ ID NO: 3803 - protein, 294 aa, Homo sapiens
MMVQMISDANTAGNGFMAMFSAAEPNERGDQYCGGLLDRPSGSFKTPNWPDRDYPAGVTCVWHIVAPKNQLIELKFEKFDVERDNYCRYDYVAVFNGGEVNDARRIGKYCGDSPPAPIVSERNELLIQFLSDLSLTADGFIGHYIFRPKKLPTTTEQPVTTTFPVTTGLKPTVALCQQKCRRTGTLEGNYCSSDFVLAGTVITTITRDGSLHATVSIINIYKEGNLAIQQAGKNMSARLTVVCKQCPLLRRGLNYIIMGQVGEDGRGKIMPNSFIMMFKTKNQKLLDALKNKQC

SEQ ID NO: 3804 - protein, 40 aa, Homo sapiens
MFVPYLWVFRSLSLSLFLFLSVFSISHLHLGSILCSLSQD

SEQ ID NO: 3805 - protein, 32 aa, Homo sapiens
MSIKRQSVLATLSLQIVAFPLQQGPRGDTGNL

SEQ ID NO: 3806 - protein, 31 aa, Homo sapiens
MQMLRKLFTAIRALFLAVCVLKVIVSLVPWE

SEQ ID NO: 3807 - protein, 37 aa, Homo sapiens
MLTHISFASFIRLVLTLGGDIYSQMRSRHKVKNGTIY

SEQ ID NO: 3808 - protein, 33 aa, Homo sapiens
MTSAFLFLFLDSVLFTWACVWLGDRQECQKAGR

SEQ ID NO: 3809 - protein, 26 aa, Homo sapiens
VNYLFKILTVHYVPTMKPLSPKTQTD

SEQ ID NO: 3810 - protein, 21 aa, Homo sapiens
MIRTPNQIQKPVLLYLLHWPS

SEQ ID NO: 3811 - protein, 55 aa, Homo sapiens
MDLLFLDMGLSAWQMWKLKFLVPLQVLASQPCRKVVYRPFILKLITCPWWTFLWW

SEQ ID NO: 3812 - protein, 12 aa, Homo sapiens
DSTLLIFLIITL

SEQ ID NO: 3813 - protein, 25 aa, Homo sapiens
  SITE (7): Xaa equals any of the naturally occurring L-amino acids
LNTSDFXFVYCFSLSFSSLSKQLLD

SEQ ID NO: 3814 - protein, 37 aa, Homo sapiens
MNKQKRKQGTCVSLSLLFCLSLCPLSYVSHAVSCPCF

SEQ ID NO: 3815 - protein, 23 aa, Homo sapiens
MLLCILIVCIYSAYVACLQNYIK

SEQ ID NO: 3816 - protein, 18 aa, Homo sapiens
MPFRWAASLATWFQGAVL

SEQ ID NO: 3817 - protein, 383 aa, Homo sapiens
LLLYAPVGFCLLVLRLFLGIHVFLVSCALPDSVLRRFVVRTMCAVLGLVARQEDSGLRDHSVRVLISNHVTPFDHNIVNLLTTCSTPLLNSPPSFVCWSRGFMEMNGRGELVESLKRFCASTRLPPTPLLLFPEEEATNGREGLLRFSSWPFSIQDVVQPLTLQVQRPLVSVTVSDASWVSELLWSLFVPFTVYQVRWLRPVHRQLGEANEEFALRVQQLVAKELGQTGTRLTPADKAEHMKRQRHPRLRPQSAQSSFPPSPGPSPDVQLATLAQRVKEVLPHVPLGVIQRDLAKTGCVDLTITNLLEGAVAFMPEDITKGTQSLPTASASKFPSSGPVTPQPTALTFAKSSWARQESLQERKQALYEYARRRFTERRAQEAD

SEQ ID NO: 3818 - protein, 44 aa, Homo sapiens
KALYTWLPSVLPLALSMRSQALGRLCNHPPNLVHFPQVAFLNSP

SEQ ID NO: 3819 - protein, 37 aa, Homo sapiens
KTITHVLQLLVLLPAHSWYLSIIVVASEKNSKKKEYT

SEQ ID NO: 3820 - protein, 29 aa, Homo sapiens
MSTFYIFIFMNNTVRKGSNASCNYWYIKV

SEQ ID NO: 3821 - protein, 123 aa, Homo sapiens
YWALLRTLLALAAFSTAIAALKLWNEDFRYGYSYYNSACRISSSSDWNTPAPTQSPEEVRRLHLCTSFMDMLKALFRTLQAMLLGVWILLLLASLAPLWLYCWRMFPTKGKRDQKEMLEVSGI

SEQ ID NO: 3822 - protein, 40 aa, Homo sapiens
MCSHPLASRALFPGILVKVVSCIPLPFYLGFDIGKVYLKT

SEQ ID NO: 3823 - protein, 74 aa, Homo sapiens [sequence omitted]

SEQ ID NO: 3824 - protein, 43 aa, Homo sapiens
  SITE (41): Xaa equals any of the naturally occurring L-amino acids
MSHHAWLSVLFSVSVPSVSSAYMFSILSCSFSSVPTRYFWXKN

SEQ ID NO: 3825 - protein, 67 aa, Homo sapiens
MTKVPSCFLLPVLLLGRKRGLMRLHSGAHITRCICRHRAGCLQPGEGQREGVYECECVCMEVGALGV

SEQ ID NO: 3826 - protein, 67 aa, Homo sapiens; identical to SEQ ID NO: 3825

SEQ ID NO: 3827 - protein, 129 aa, Homo sapiens [sequence omitted]

SEQ ID NO: 3828 - protein, 36 aa, Homo sapiens
MHNTFFNTILITKHLIYCYFVCFLNCIFCQCGISCL

SEQ ID NO: 3829 - protein, 31 aa, Homo sapiens
MKSQSSLSVGILRVTLCLVPSCVPAIDCNAQ

SEQ ID NO: 3830 - protein, 46 aa, Homo sapiens
MLVLSEQWELVWDLLLQLPWWLKIEALGNGSSVWKETVHLGFLAWR

SEQ ID NO: 3831 - protein, 55 aa, Homo sapiens
MRQQRWPRSILLLCGELCFSLVTIGKGSCSYVSLPVPQSFVHGVGHHLLPIQGND

SEQ ID NO: 3832 - protein, 51 aa, Homo sapiens
MPRAWWPSYTCSLLCLSISVHQFDSQTMFPSKWLWSRNEKESSSLGKSKRK

SEQ ID NO: 3833 - protein, 51 aa, Homo sapiens
MNPFIFNVITDTVQFKSSILLLTFASIFLSSFPAFSYFNQIVLTISLHHVF

SEQ ID NO: 3834 - protein, 44 aa, Homo sapiens
MRQNFVAQFVQLLKCWLCDVWSGVVVEKNWAPSVDQCQLQVLQF

SEQ ID NO: 3835 - protein, 45 aa, Homo sapiens [sequence omitted]

SEQ ID NO: 3836 - protein, 40 aa, Homo sapiens
MCLHLLLAISGILNLHCHLVLCSCGRYTQKTQANTTWVTS

SEQ ID NO: 3837 - protein, 40 aa, Homo sapiens; identical to SEQ ID NO: 3836

SEQ ID NO: 3838 - protein, 343 aa, Homo sapiens
  SITE (184): Xaa equals any of the naturally occurring L-amino acids
  SITE (198): Xaa equals any of the naturally occurring L-amino acids
  SITE (210): Xaa equals any of the naturally occurring L-amino acids
  SITE (300): Xaa equals any of the naturally occurring L-amino acids
  SITE (307): Xaa equals any of the naturally occurring L-amino acids
MYISPEEFKPIAEKLTGSTPAASYEEEELPPDPSEETLTIEARFQPLLPETMTKSKDGFLGVSRLALSGLRNWTAAASPSAVFATRHFQPFLPPPGQELGEPWWIIPSELSMFTGYLSNNRFYPPPPKGKEVIIHRLLSMFHPRPFVKTRFAPQGAVACLTAISDFYYTVMFRIHAEFQLSEPXDFPFWFSPAQFTGXIILSKDATHVRXFRLFVPNHRSLNVDMEWLYGASESSNMEVDIGYIPQMELEATGPSVPSVILDEDGSMIDSHLPSGEPLQFVFEEIKWAAGAELGGGCPAXGGGHVPXQEVSYLPFTEAFDRAKAENKLVHSILLWGALDDQSC

SEQ ID NO: 3839 - protein, 55 aa, Homo sapiens
MTFGEYVALIFFTLIIFLSSRQPIAPWRPHQPCKFSPAAWRLGRGAAVTRRYTRL

SEQ ID NO: 3840 - protein, 52 aa, Homo sapiens
MTLHVSRLWCCCPKKGQAWSAYGALLWCYLAPVSLESEEVWPLKIKLPPELL

SEQ ID NO: 3841 - protein, 51 aa, Homo sapiens
MYFPCRWLLPSVLGYLAMELLRQSLPRWRSSQCLHLPIRNTRCLPWCKVPR

SEQ ID NO: 3842 - protein, 16 aa, Homo sapiens
MLLGNLIATMQATGNL

SEQ ID NO: 3843 - protein, 48 aa, Homo sapiens
MFWEVLFIVCFPTFALITRLSSLIIETMSLYLVPSIVPSTQCMHSLLV

SEQ ID NO: 3844 - protein, 10 aa, Homo sapiens
MRLFVLLLMT

SEQ ID NO: 3845 - protein, 1 aa, Homo sapiens
I

SEQ ID NO: 3846 - protein, 32 aa, Homo sapiens
MGGIQYCMWGHPGWGGDAWHPSLHSPARPGGV

SEQ ID NO: 3847 - protein, 21 aa, Homo sapiens
MVIIEMLLKILWVVFWAGYPC

SEQ ID NO: 3848 - protein, 7 aa, Homo sapiens
DVHMRSR

SEQ ID NO: 3849 - protein, 38 aa, Homo sapiens
  SITE (14): Xaa equals any of the naturally occurring L-amino acids
MRSPLSASALLLWXSSVARAFSSPSLLMAVPSPTCSRY

SEQ ID NO: 3850 - protein, 38 aa, Homo sapiens
  SITE (14): Xaa equals any of the naturally occurring L-amino acids
  SITE (34): Xaa equals any of the naturally occurring L-amino acids
MRSPLSASALLLWXSSVARAFSSPSLLMAVPSPXCSRY

SEQ ID NO: 3851 - protein, 38 aa, Homo sapiens; identical to SEQ ID NO: 3850
  SITE (14): Xaa equals any of the naturally occurring L-amino acids
  SITE (34): Xaa equals any of the naturally occurring L-amino acids

SEQ ID NO: 3852 - protein, 38 aa, Homo sapiens; identical to SEQ ID NO: 3850
  SITE (14): Xaa equals any of the naturally occurring L-amino acids
  SITE (34): Xaa equals any of the naturally occurring L-amino acids

SEQ ID NO: 3853 - protein, 41 aa, Homo sapiens
ISSLVGNLATIQKFKIYCQPSRFWNTSPSIRTGWRPVDTPK

SEQ ID NO: 3854 - protein, 15 aa, Homo sapiens
MTAWYIWVTCVGSLL

SEQ ID NO: 3855 - protein, 60 aa, Homo sapiens [sequence omitted]

SEQ ID NO: 3856 - protein, 61 aa, Homo sapiens [sequence omitted]

SEQ ID NO: 3857 - protein, 17 aa, Homo sapiens
MGFVVLLLCQVPLGQLG

SEQ ID NO: 3858 - protein, 146 aa, Homo sapiens
MVVWYLFQIVSAVSCIHKAGILHRDIKTLNIFLTKANLIKLGDYGLAKKLNSEYSMAETLVGTPYYMSPELCQGVKYNFKSDIWAVGCVIFELLTLKRTFDATNPLNLCVKIVQGIRAMEVDSSQYSLELIQMVHSCLDQVQEPLP

SEQ ID NO: 3859 - protein, 54 aa, Homo sapiens
MLAFICSISSLLGCFWGITCLSSKLETSNSPGDAVALFVGQWHLLVVCNVYSLV

SEQ ID NO: 3860 - protein, 26 aa, Homo sapiens
MYQYYIPLHCLIIIIIIVHCMGIPRL

SEQ ID NO: 3861 - protein, 31 aa, Homo sapiens
MARAATGAGKATWTLFCWLMAPRACVHKTSS

SEQ ID NO: 3862 - protein, 23 aa, Homo sapiens
MGLFLLFLLRVGVGCVICKYFCA

SEQ ID NO: 3863 - protein, 62 aa, Homo sapiens
LECWKDMIRAACSSQKSVSTIKWMPNHQTHKCSRCVPGYGISRYKKYFNYSFVINITYEKKI

SEQ ID NO: 3864 - protein, 26 aa, Homo sapiens
MYILFLSSVLIMGAFLKLISYFPIYI

SEQ ID NO: 3865 - protein, 37 aa, Homo sapiens
MLLAYHIFISVSICRLLGPGNDSGEFPSLVSGIYSHL

SEQ ID NO: 3866 - protein, 43 aa, Homo sapiens
MSTLFTWLMVLRYLLPNSCFVLNRPSFCNPFGTSPISCRKASS

SEQ ID NO: 3867 - protein, 70 aa, Homo sapiens
MPNGHWHWACLCHWGSTQAVSICATLAFPSRSSRRWASTTTRPLAASLLSHCTLLRGFLRRQDSAVPCCS

SEQ ID NO: 3868 - protein, 33 aa, Homo sapiens
MTSITSHVLVTVLLIISLSTQTLETVSLTRSRE

SEQ ID NO: 3869 - protein, 23 aa, Homo sapiens
MACILFLNAFLLIPILLGIWTFY

SEQ ID NO: 3870 - protein, 58 aa, Homo sapiens
MKSFQIPLFFFPNGFHMCLKYLYFELSDFPCPPFSFVPSLSQHQSRIQNLPVKGQPSF

SEQ ID NO: 3871 - protein, 28 aa, Homo sapiens
MLVGAALPLVPGVASAQSQRAGSRVLHR

SEQ ID NO: 3872 - protein, 32 aa, Homo sapiens
MSNAELALLLFIILTVGHYAVVWSIYLGKTTG

SEQ ID NO: 3873 - protein, 46 aa, Homo sapiens
MVSGLIKHSNWLCFTLALVHAKCSISFSLLHCSFAMLLCSGLDVIF

SEQ ID NO: 3874 - protein, 24 aa, Homo sapiens
MWFLSLLLSFICFLISAEYEICLF

SEQ ID NO: 3875 - protein, 32 aa, Homo sapiens
MAAPGWPGPRSASVVALTFDKSFPCLCLGCPI

SEQ ID NO: 3876 - protein, 55 aa, Homo sapiens
GLPFCLVLACILPCYHLLLFLPRWFVKNKSPGCMCPLIHSVWAKENEALMVTWCF

SEQ ID NO: 3877 - protein, 9 aa, Homo sapiens
MYCLSAILI

SEQ ID NO: 3878 - protein, 50 aa, Homo sapiens
MALSHLLLHSRPLLEVCLSHVLLSPHERPLLLFPCLLSGLSGAVLRVLLG

SEQ ID NO: 3879 - protein, 34 aa, Homo sapiens
FCTVCLLTFIEHILPSSIRITHLMVRKSCWEYDS

SEQ ID NO: 3880 - protein, 57 aa, Homo sapiens
MAAIWHFAFCTYLDVLDISPRPLIDNCPGVFLAAEMMWTEFIWPIPRQWPLRLFPKF

SEQ ID NO: 3881 - protein, 72 aa, Homo sapiens
MRAGTFDWFAVACQELYLLRAQMTESVQPSVIHLFSLFLFPYRVCEPLLTKYQSGPSPAHVKEEGAVGLRPH

SEQ ID NO: 3882 - protein, 15 aa, Homo sapiens
MTTVSPIPISCLFAA

SEQ ID NO: 3883 - protein, 23 aa, Homo sapiens
MLVGVVDVSCLLWPSLPLLPENT

SEQ ID NO: 3884 - protein, 59 aa, Homo sapiens
TLAQEHRSRGLAWSTRPPLCKAPEGPRGCGLIRRLHLWTGLHTRSYRTAICLPCRGRWP

SEQ ID NO: 3885 - protein, 86 aa, Homo sapiens
MQSREPPPVCFMAMVLSACVFSFFLNRLFSGSLISLSASRSLFCLGCFSPAVPSTRFPGSCPPRALPQGSTTPRCSPTALSGRPPV

SEQ ID NO: 3886 - protein, 19 aa, Homo sapiens
MLHCFKKKKMLMIVLGLQA

SEQ ID NO: 3887 - protein, 33 aa, Homo sapiens
MMLALFIVLLLIPPRQNENQMPFPEGLSEGFGP

SEQ ID NO: 3888 - protein, 48 aa, Homo sapiens
MGLQVTPPLSFTGLWFVVMANMGWQRTILTKVEALQHGVQPLSMDSGP

SEQ ID NO: 3889 - protein, 20 aa, Homo sapiens
MGCPGLEGTLFLPPPLPNLS

SEQ ID NO: 3890 - protein, 98 aa, Homo sapiens
MNTKGRDFHLAVFVFPQPSMVRGSRNGCLITAVTPSRKDSQRNCSLKKKKIHKVGCTLKVLRRASVLENLPEILKAYKKGESSKLNFDSHGWGLYLFL

SEQ ID NO: 3891 - protein, 21 aa, Homo sapiens
METSGLVWLLLLEKLGAKAAS

SEQ ID NO: 3892 - protein, 10 aa, Homo sapiens
MGGVSGFSVA

SEQ ID NO: 3893 - protein, 38 aa, Homo sapiens
  SITE (35): Xaa equals any of the naturally occurring L-amino acids
  SITE (38): Xaa equals any of the naturally occurring L-amino acids
MALQWFCILVGNLFWFILAFPQPSCWFFGKMWHPXQTX

SEQ ID NO: 3894 - protein, 59 aa, Homo sapiens
  SITE (26): Xaa equals any of the naturally occurring L-amino acids
MALYAGFLLWAGHLQEGYSWRNGWGXVAVDSSLGPERIESELGKLQSELKSRNPVGGKY

SEQ ID NO: 3895 - protein, 141 aa, Homo sapiens
HSLLLLLLLTLLGLGLVQPSYGQDGMYQRFLRQHVHPEETGGSDRYCNLMMQRRKMTLYHCKRFNTFIHEDIWNIRSICSTTNIQCKNGKMNCHEGVVKVTDCRDTGSSRAPNCRYRAIASTRRVVIACEGNPQVPVHFDG

SEQ ID NO: 3896 - protein, 68 aa, Homo sapiens
MWRGVARGRKRKCLVLFCSPALLSQQLFVIVVVVLRQVPPGACGILLPVSVSKCHRPPIATYSWHCTF

SEQ ID NO: 3897 - protein, 16 aa, Homo sapiens
MFQSVSLTYLHFKYGL

SEQ ID NO: 3898 - protein, 29 aa, Homo sapiens
MAVRFEALQSCGTPWCVCSVLGTCMGTHR

SEQ ID NO: 3899 - protein, 32 aa, Homo sapiens
MLHLSSFLVYFANWLLNSETWSDSGSVSLAIL

SEQ ID NO: 3900 - protein, 15 aa, Homo sapiens
MFSIIAFPLILLTCC

SEQ ID NO: 3901 - protein, 72 aa, Homo sapiens
MISSGSSRYAETWDLLLFLRLTCCAHCAWTPWHDAGRGCRTHTSFEVRQSTNPSSTTHSFSSSQLCGLGQIA

SEQ ID NO: 3902 - protein, 37 aa, Homo sapiens
LLLVLLIFVASAHGALVSPQSNGGSPKQLHYRVILGK

SEQ ID NO: 3903 - protein, 25 aa, Homo sapiens
MFEIRTALSLRLIPLFVSTCGVTQK

SEQ ID NO: 3904 - protein, 30 aa, Homo sapiens
MLVAFLVLYFSFPYLAFVGPKPTNNRLLKE

SEQ ID NO: 3905 - protein, 66 aa, Homo sapiens [sequence omitted]

SEQ ID NO: 3906 - protein, 70 aa, Homo sapiens
MLGFLTFRSLTWIRLGAAQWSRWVPVSLVIRRGLGVGRAPESQQCAWAPTPSSTCHTSEGSYSCTQAVES

SEQ ID NO: 3907 - protein, 30 aa, Homo sapiens
MYIKSPCCACLIYVIFICQLCLTKACGWGE

SEQ ID NO: 3908 - protein, 20 aa, Homo sapiens
MLLLYFFQHIQPSPWGAFHI

SEQ ID NO: 3909 - protein, 18 aa, Homo sapiens
MFPSWPFLWLTLCSLCIC

SEQ ID NO: 3910 - protein, 42 aa, Homo sapiens
MEKCEKLNCLEMSRFFYLQLLLACPTVVFEYFLYSTPKDFNF

SEQ ID NO: 3911 - protein, 50 aa, Homo sapiens
MFYFMNLTKFFFLDLANFNRVFSYQTFTYLLKLHSCKLFGGICFYFYFVV

SEQ ID NO: 3912 - protein, 37 aa, Homo sapiens
LNDGLCWFFCLFGWFVCLFWHSVKGSQTFTYYLLSCP

SEQ ID NO: 3913 - protein, 37 aa, Homo sapiens; identical to SEQ ID NO: 3912

SEQ ID NO: 3914 - protein, 38 aa, Homo sapiens; identical to SEQ ID NO: 3676

SEQ ID NO: 3915 - protein, 34 aa, Homo sapiens
HLFYLGFIHLLECVGLHLLPKLGSFKAFFLQIYF

SEQ ID NO: 3916 - protein, 140 aa, Homo sapiens
SQLFGWLLIGVVAILVFLTKCLKHYCSPLSYRQEAYWAQYRANEDQLFQRTAEVHSRVLAANNVRRFFGFVALNKDDEELIANFPVEGTQPRPQWNAITGVYLYRENQGLPLYSRLHKWAQGLAGNGAAPDNVEMALLPS

SEQ ID NO: 3917 - protein, 11 aa, Homo sapiens
MQESPSQLLSS

SEQ ID NO: 3918 - protein, 33 aa, Homo sapiens
MQSVSFLVVSFLGQCFFVFFLEMFVLPPPVDPG

SEQ ID NO: 3919 - protein, 79 aa, Homo sapiens
MPLRRSGGFEYLSLPPIQEIQSLVSLSLSVSFFLFLPPNPSHSLPPSLLPLFAIIFSLCFFSLLPSLWAVMKINSDCVH

SEQ ID NO: 3920 - protein, 31 aa, Homo sapiens
MSGEDPLLSIPTCATPGSPCWGLLGPFSSCL

SEQ ID NO: 3921 - protein, 1 aa, Homo sapiens
I

SEQ ID NO: 3922 - protein, 23 aa, Homo sapiens
MSDPKENVFTLMLRCSAAPLCSV

SEQ ID NO: 3923 - protein, 35 aa, Homo sapiens
MFPNIMFCTLMLISLCVVPDTSWDLKKCCFFLKDG

SEQ ID NO: 3924 - protein, 9 aa, Homo sapiens
MVGSVDFSF

SEQ ID NO: 3925 - protein, 22 aa, Homo sapiens
MLLLGLEGLLFMLFNALSNVFF

SEQ ID NO: 3926 - protein, 3 aa, Homo sapiens
LLI

SEQ ID NO: 3927 - protein, 37 aa, Homo sapiens
MGIGALILLFFLTVVLPFYGFNQPPPPGKHLLWACWV

SEQ ID NO: 3928 - protein, 43 aa, Homo sapiens
MAVHHPAFQLNVTCLLLLKMAFCVLQRLAWEVLCSIAVNLDTF

SEQ ID NO: 3929 - protein, 52 aa, Homo sapiens
LPLEDLCKGGLGTKENVLFGRAGSKGTGQGLVGLGNGSLSWIPLMKRLGLFT

SEQ ID NO: 3930 - protein, 39 aa, Homo sapiens
MAARPLPVSPARALLARPGRCSARALRGPRGELMEPRKS

SEQ ID NO: 3931 - protein, 72 aa, Homo sapiens
MMPVCRVGLWNGSCLCVCVCIFMGMGACLVCICTCLYCCVPVNTCLCMDGRSQAQAWPLPRACGHTSCSSPK

SEQ ID NO: 3932 - protein, 11 aa, Homo sapiens
MHFHADYMHGC

SEQ ID NO: 3933 - protein, 31 aa, Homo sapiens
MGSYKGSTKKVKFILMTLKIYMFVLNVGRCQ

SEQ ID NO: 3934 - protein, 6 aa, Homo sapiens
MCSLPL

SEQ ID NO: 3935 - protein, 32 aa, Homo sapiens
MFLISIEIALLPHISLAYPWSLAILDKDMLFK

SEQ ID NO: 3936 - protein, 33 aa, Homo sapiens
MFLIIFISLNFSLCHSNLTFTHQQITMQKKKYF

SEQ ID NO: 3937 - protein, 53 aa, Homo sapiens
  SITE (8): Xaa equals any of the naturally occurring L-amino acids
MSHCLFLXFCLKIPSWKSCHAIGDCDILLVMYTATGFVCYVDGLYLCYSEGIK

SEQ ID NO: 3938 - protein, 97 aa, Homo sapiens
MAQPPQNLKRFSSCRAFARLGYPPYFPCLPSSAARPSVPASAQPSVKGSPASNLHCTASPKTVTSWKAGAQLPLNKRVAKKEKKKKKKKKKKKKKGR

SEQ ID NO: 3939 - protein, 22 aa, Homo sapiens
MTFFVFMEVRTPVMQTGSRSLL

SEQ ID NO: 3940 - protein, 7 aa, Homo sapiens
MKCILEF

SEQ ID NO: 3941 - protein, 30 aa, Homo sapiens
MYLFNNFFFSSWYLILVLLNQYSGTIVGVY

SEQ ID NO: 3942 - protein, 29 aa, Homo sapiens
MGARHCIWPFCRYFFPLSLIVPIDFSPFL

SEQ ID NO: 3943 - protein, 38 aa, Homo sapiens
MKETGLIAIILLLAAFSKSLFLKPPPILFKQIKTKISC

SEQ ID NO: 3944 - protein, 6 aa, Homo sapiens
IYSALD

SEQ ID NO: 3945 - protein, 34 aa, Homo sapiens
MRSFCFLGKVFHFLVWLFAHPRRRKTSLRVTFTW

SEQ ID NO: 3946 - protein, 34 aa, Homo sapiens
MRLCVFLALLHVPFQLMAHSDSQRFMPKLHTIVF

SEQ ID NO: 3947 - protein, 33 aa, Homo sapiens
MRLGAKTSLFFFSFLFLLVFAKLLLLKKGSYCY

SEQ ID NO: 3948 - protein, 71 aa, Homo sapiens [sequence omitted]

SEQ ID NO: 3949 - protein, 20 aa, Homo sapiens
MKLLALVISILICTGQIYNC

SEQ ID NO: 3950 - protein, 35 aa, Homo sapiens
MEAAKSLCPRAPLSCSALLLCSFCIVGEDGYHCVC

SEQ ID NO: 3951 - protein, 33 aa, Homo sapiens
MSEFLLLCIFPSIWYCQFKHKCWERYRATGTLT

SEQ ID NO: 3952 - protein, 49 aa, Homo sapiens
  SITE (8): Xaa equals any of the naturally occurring L-amino acids
  SITE (15): Xaa equals any of the naturally occurring L-amino acids
  SITE (16): Xaa equals any of the naturally occurring L-amino acids
YFTVIYFXFQLSIFXXSLSMGTYLPHFFRSDMTHKKDGFGFLKTLTISN

SEQ ID NO: 3953 - protein, 30 aa, Homo sapiens
MIFLFLFFVFCFLVSQYVSPFYSNTFFGVQ

SEQ ID NO: 3954 - protein, 29 aa, Homo sapiens
MCLPSDVTFPLLLLGMCLVPLSPAHVTVT

SEQ ID NO: 3955 - protein, 12 aa, Homo sapiens
MIVIVFYLINLL

SEQ ID NO: 3956 - protein, 81 aa, Homo sapiens
WGKILVVLMVNLSYWILCMPHSRIHCLSLIMDGMQQHPSILHSLQGKNCAWGLKCSMCSSISLSSVMQNGIFNGRSALLRC

SEQ ID NO: 3957 - protein, 520 aa, Homo sapiens
MVTSSFPISVAVFALITLQVGTQDSFIAAVYEHAVILPNKTETPVSQEDALNLMNENIDILETAIKQAAEQGARIIVTPEDALYGWKFTRETVFPYLEDIPDPQVNWIPCQDPHRFGHTPVQARLSCLAKDNSIYVLANLGDKKPCNSRDSTCPPNGYFQYNTNVVYNTEGKLVARYHKYHLYSEPQFNVPEKPELVTFNTAFGRFGIFTCFDIFFYDPGVTLVKDFHVDTILFPTAWMNVLPLLTAIEFHSAWAMGMGVNLLVANTHHVSLNMTGSGIYAPNGPKVYHYDMKTELGKLLLSEVDSHPLSSLAYPTAVNWNAYATTIKPFPVQKNTFRGFISRDGFNFTELFENAGNLTVCQKELCCHLSYRMLQKEENEVYVLGAFTGLHGRRRREYWQVCTMLKCKTTNLTTCGRPVETASTRFEMFSLSGTFGTEYVFPEVLLTEIHLSPGKFEVLKDGRLVNKNGSSGPILTVSLFGRWYTKDSLYSSCGTSNSAITYLLIFILLMIIALQNIVML

SEQ ID NO: 3958 - protein, 37 aa, Homo sapiens
MGLPVSWAPPALWVLGCCALLLSLWALCTACRRPRTL

SEQ ID NO: 3959 - protein, 35 aa, Homo sapiens
MNVSIFLVGLFLIIELYIAGSLTTSLEFQQEAFAR

SEQ ID NO: 3960 - protein, 47 aa, Homo sapiens
MLFLCNNWLVSLFCSLLIGSCFLCVQNKNKFGQKKKKKKKKKKKKKK

SEQ ID NO: 3961 - protein, 46 aa, Homo sapiens
MPEPLLGLSVVFTLVLGHPSFGRGGKAAGKMETVGGVCLPIGLALV

SEQ ID NO: 3962 - protein, 19 aa, Homo sapiens
MAWVGLASLGVCCPISRVP

SEQ ID NO: 3963 - protein, 34 aa, Homo sapiens
MCILVLVLSVIILILGLIIWLVYKTNDCLRSFSR

SEQ ID NO: 3964 - protein, 67 aa, Homo sapiens
PFLGWNQGAWVGVAAGNMPPCLALCRNPWKIRPSSLPLSASCTRARSRMSALPQPAPSGVFASSDGR

SEQ ID NO: 3965 - protein, 257 aa, Homo sapiens
MDFIQHLGVCCLVALISVGLLSVAACWFLPSIIAAAASWIITCVLLCCSKHARCFILLVFLSCGLREGRNALIAAGTGIVILGHVENIFHNFKGLLDGMTCNLRAKSFSIHFPLLKKYIEAIQWIYGLATPLSVFDDLVSWNQTLAVSLFSPSHVLEAQLNDSKGEVLSVLYQMATTTEVLSSLGQKLLAFAGLSLVLLGTGLFMKRFLGPCGWKYENIYITRQFVQFDERERHQQRPCVLPLNKEERRKFISGFQS

SEQ ID NO: 3966 - protein, 291 aa, Homo sapiens
MDFIQHLGVCCLVALISVGLLSVAACWFLPSIIAAAASWIITCVLLCCSKHARCFILLVFLSCGLREGRNALIAAGTGIVILGHVENIFHNFKGLLDGMTCNLRAKSFSIHFPLLKKYIEAIQWIYGLATPLSVFDDLVSWNQTLAVSLFSPSHVLEAQLNDSKGEVLSVLYQMATTTEVLSSLGQKLLAFAGLSLVLLGTGLFMKRFLGPCGWKYENIYITRQFVQFDERERHQQRPCMLPLNKEERRKNKELKILSMILPLIYLCLNPTVSQNQNSFYLRPGFLSVLFF

SEQ ID NO: 3967 - protein, 23 aa, Homo sapiens
MYIIAFNPLLTPPSTASPTAIGA

SEQ ID NO: 3968 - protein, 64 aa, Homo sapiens
  SITE (38): Xaa equals any of the naturally occurring L-amino acids
MWLLRQPCLAGFLLQVLEGRVPQSQAEADSGGLGAGGXTPAGGRRGLCQQSEQPRGPIPHILQV

SEQ ID NO: 3969 - protein, 64 aa, Homo sapiens
MNGFLPLWGWTLGLSWWERRRGLPPLSELPPTGGQESTLQPRALWGVHAWGLWVGTMDRPWSLS

SEQ ID NO: 3970 - protein, 23 aa, Homo sapiens
MLFLKVCLCLFKSYSMASWEALR

SEQ ID NO: 3971 - protein, 82 aa, Homo sapiens
MGLLLWGCFCTRGLPRCAPCLPPTWLSLLLGRTRPHVLRMLQKCGPWRDPKDTWHRPGRGRPRLVSAPFHGQTGLLSCTINL

SEQ ID NO: 3972 - protein, 31 aa, Homo sapiens
MESILMILILSVPTWRMHLLLLEVSAVAGLL

SEQ ID NO: 3973 - protein, 11 aa, Homo sapiens
QTALRRPHGPR

SEQ ID NO: 3974 - protein, 49 aa, Homo sapiens
RMLLLFIYLLVDGHLGWFHIFAIANCAAINMHVQVSFSNNDFFLLTPCS

SEQ ID NO: 3975 - protein, 26 aa, Homo sapiens
MFTLSLLFKLFRISFSLPFRRSVFTL

SEQ ID NO: 3976 - protein, 86 aa, Homo sapiens
MLSYSSAMFSQKKLITSSLLWLLQLQEVPAMSHVVFDQWSPVPGQRRQLYNVICVVKILPLTQNGTVQSLSVYMEKSHAPGLTQKK

SEQ ID NO: 3977 - protein, 58 aa, Homo sapiens [sequence omitted]

SEQ ID NO: 3978 - protein, 74 aa, Homo sapiens
MTVSLVSRSSVFNTCIYNAQARRPCHQPNVITAGRWKMSLKQSLCALFVLSLIQSNLKPQTDLPPVLFSGGFSP

SEQ ID NO: 3979 - protein, 82 aa, Homo sapiens
  SITE (71): Xaa equals any of the naturally occurring L-amino acids
MKWRCLMCFTLACLTVFYLTVNSAVFYCERKPQCLSSLRNWGERWTTTVVHFLSVLGECHTFPSQSKRNLXEILRETVSPQV

SEQ ID NO: 3980 - protein, 44 aa, Homo sapiens
KFMLCVSMVCFILLLSILLYEYTKICVSVHRLIDIWVITTLKLL

SEQ ID NO: 3981 - protein, 32 aa, Homo sapiens
MVRILSMVVIIIIIINGSPLCVLSYFIFTIFT

SEQ ID NO: 3982 - protein, 28 aa, Homo sapiens
MMGIWGIERSWVGNIAWVISLLTLYCKV

SEQ ID NO: 3983 - protein, 137 aa, Homo sapiens
ITHHAVILFVLVPVAQRLRGDLGDFFVGCIFTAELSTPFVSLGRVLIQLKQQHTLLYKVNGILTLATFLSCRILLFPFMYWSYGRQQGLSLLQVPFSIPFYCNVANAFLVAPQIYWFCLLCRKAVRLFDTPQAKKDG

SEQ ID NO: 3984 - protein, 42 aa, Homo sapiens
LFLFFLSPSDFSAYHLHFSPLTHSELIESCFCHHHTTETGHR

SEQ ID NO: 3985 - protein, 38 aa, Homo sapiens
MVIFCSLLSLIAYSIMAFLKKNLCIFSHPYLFAYFSNH

SEQ ID NO: 3986 - protein, 32 aa, Homo sapiens
MYYISTFLILTWAYALSLIVINLCCSSICNTL

SEQ ID NO: 3987 - protein, 42 aa, Homo sapiens
MNSNRLELLLYITQLALCTCRFCILGFNCGSKIFGGKKAIQQ

SEQ ID NO: 3988 - protein, 36 aa, Homo sapiens
MGSIAGTQGCRPRRLFFLFSLCRLISSLSVIWFPCP

SEQ ID NO: 3989 - protein, 50 aa, Homo sapiens
MWNIFSYVCWLLVCLLLRSVCSCLLPSFKWDLFFACSLVHTFFFFIDSGC

SEQ ID NO: 3990 - protein, 20 aa, Homo sapiens
SGEGAWVPGASLALHQDPVE

SEQ ID NO: 3991 - protein, 11 aa, Homo sapiens
MVLFLLRFLFL

SEQ ID NO: 3992 - protein, 15 aa, Homo sapiens
METHRQQLRKMVCQQ

SEQ ID NO: 3993 - protein, 36 aa, Homo sapiens
MLSDWLIIVLQCYVQVTLILLIVVPRCKSSDADILL

SEQ ID NO: 3994 - protein, 26 aa, Homo sapiens
MTSRWCHLKEPRFLFSVCGFILLVLL

SEQ ID NO: 3995 - protein, 38 aa, Homo sapiens
MISCLNILRVLYLLWGLLALSALTQIIGYITWLMFLYT

SEQ ID NO: 3996 - protein, 58 aa, Homo sapiens
MLRQEICLIRTGSSVLSVTLVALLLQVITLVMYMTLRSKRGLLTMTWRYQKSKRLPCK

SEQ ID NO: 3997 - protein, 52 aa, Homo sapiens
TQSLDPDETSPPPHLCPHQDKELLPVFPLGHGASCPPSSPARDPKAGTTPPA

SEQ ID NO: 3998 - protein, 23 aa, Homo sapiens
MLLLQSLFFSHELGVGWGREREG

SEQ ID NO: 3999 - protein, 21 aa, Homo sapiens
MPCFSLLSLPLWDPLVILVFC

SEQ ID NO: 4000 - protein, 44 aa, Homo sapiens
MPRTSTFQQWLSSPTFWWLVLRWGPRIGSPQTSWGCKRAQPWPG

SEQ ID NO: 4001 - protein, 15 aa, Homo sapiens
MLLRVFLVVVTQCGC

SEQ ID NO: 4002 - protein, 33 aa, Homo sapiens
MSDRWSPFIPFLLLAPVSSGSGHLTFSCPAGSA

SEQ ID NO: 4003 - protein, 52 aa, Homo sapiens
MAMAMARITPPTMGMVWPLHTLGKCLALTQMQTLVPRVAPVPIPFYPELTSA

SEQ ID NO: 4004 - protein, 39 aa, Homo sapiens [sequence omitted]

SEQ ID NO: 4005 - protein, 36 aa, Homo sapiens
MLLLYLSSFTFLESPTTGQRLKGTDLLCRMAWPPLK

SEQ ID NO: 4006 - protein, 35 aa, Homo sapiens
MLSIMLCFLWNMIILLVASSAYSGCDLALPGTSAL

SEQ ID NO: 4007 - protein, 38 aa, Homo sapiens
MGKSVLLGSIYYLLLSSHLCKSAISTKMCDRRSQRILL

SEQ ID NO: 4008 - protein, 41 aa, Homo sapiens
MYMKMMFMLFIILPFIISFFIVLIAMSFSSLIFFPQCLICH

SEQ ID NO: 4009 - protein, 24 aa, Homo sapiens
MAASALLLCVVTLILFLVLHYIVS

SEQ ID NO: 4010 - protein, 8 aa, Homo sapiens
MSNVQLQR

SEQ ID NO: 4011 - protein, 24 aa, Homo sapiens
SFFVFLGDLYFFFGEMSIPILAHF

SEQ ID NO: 4012 - protein, 16 aa, Homo sapiens
GPCDPISWLLRLLSLF

SEQ ID NO: 4013 - protein, 65 aa, Homo sapiens
GSFPSPKHRQRGGEQFLVLFLFLKWCLYLQPPGGLPWPHFSAPPRHRHPSTLLHVTRKMPFAECT

SEQ ID NO: 4014 - protein, 90 aa, Homo sapiens
MCPVSQFPGSSSVCCPFSSSGSIVREPRMEAKCTGHWLFFQCPSDSPCPGGLVPSLSVWCLFYKLVMTSGNGPGFQIAIPGDILILWFKP

SEQ ID NO: 4015 - protein, 33 aa, Homo sapiens
MYYFIFLFFSYVLCFRIFLEASSKSCFVGNKQS

SEQ ID NO: 4016 - protein, 40 aa, Homo sapiens
IDFFLFPTISSASPFSSFKINPESDHCGLNHYYILPELLQ

SEQ ID NO: 4017 - protein, 35 aa, Homo sapiens
MGWVIALCSQLSRLLTLFLLRLFLNRKIRILSFQQ

SEQ ID NO: 4018 - protein, 34 aa, Homo sapiens
MGLLLWLSVGHTSPQKAPAKELRFWLGKNITPLQ

SEQ ID NO: 4019 - protein, 15 aa, Homo sapiens
MPALIDGAERHCIPI

SEQ ID NO: 4020 - protein, 37 aa, Homo sapiens
MLLIFTFSALVLSYPLLILGDWVEMAIEHHTLLTKTI

SEQ ID NO: 4021 - protein, 30 aa, Homo sapiens
MALVGLLSAGVPGVSLCVQIFSYKDTGEIG

SEQ ID NO: 4022 - protein, 2 aa, Homo sapiens
ML

SEQ ID NO: 4023 - protein, 39 aa, Homo sapiens
MFFHFGVNIAWIFFLVPRLAFSSGNLAVKINLFQMKYCI

SEQ ID NO: 4024 - protein, 12 aa, Homo sapiens
VLLLPHVLSGGL

SEQ ID NO: 4025 - protein, 35 aa, Homo sapiens
LIVFHIIFIPWITLLCVFIGVRLLAVSYETTYYIF

SEQ ID NO: 4026 - protein, 19 aa, Homo sapiens
MTSYCSFDLHFSDDNYVEH

SEQ ID NO: 4027 - protein, 34 aa, Homo sapiens
MNFWHSCYLLRNCTVCFLCSIFFFFPGMRMYLSS

SEQ ID NO: 4028 - protein, 34 aa, Homo sapiens
MKLTLGTAGSLFPQALYILLDFIWVNFIDGSHYI

SEQ ID NO: 4029 - protein, 48 aa, Homo sapiens [sequence omitted]

SEQ ID NO: 4030 - protein, 9 aa, Homo sapiens
MNKIKKWLI

SEQ ID NO: 4031 - protein, 35 aa, Homo sapiens
MLGSSPLMLIWATTFVRSSIACSLSALFSPRNTFL

SEQ ID NO: 4032 - protein, 22 aa, Homo sapiens
MVRLSSLQTLLCPDSHLGHFIQ

SEQ ID NO: 4033 - protein, 20 aa, Homo sapiens
MELFFFWLTILLFPTVFNNC

SEQ ID NO: 4034 - protein, 41 aa, Homo sapiens
MGNVMVTFSRLSCLIPSASSLLCLNSCTGCLVHVHITKRWY

SEQ ID NO: 4035 - protein, 37 aa, Homo sapiens
MKSALRLVLLFSFHFFPLIISFRRKREGKKKKKIRDL

SEQ ID NO: 4036 - protein, 44 aa, Homo sapiens
MNHTLRNQCGCPLRVLLFFLLPLSKIRYSVIKYISIKVFKSDLY

SEQ ID NO: 4037 - protein, 40 aa, Homo sapiens
MSKGLRKESHVFFLLFSNLVITKQCYQCITYKHFIIHFHF

SEQ ID NO: 4038 - protein, 50 aa, Homo sapiens
MLTFLVWQAELVLLPTLPFPIVTIYRTSHCCLLCVASASLPGRSRNLRIS

SEQ ID NO: 4039 - protein, 42 aa, Homo sapiens
ALETVVHFILLSLLVFMYDLLIGKNLIMVSLMTNQFVLNTFY

SEQ ID NO: 4040 - protein, 17 aa, Homo sapiens
MVITVATLVSLLIDASG

SEQ ID NO: 4041 - protein, 6 aa, Homo sapiens
STILCF

SEQ ID NO: 4042 - protein, 33 aa, Homo sapiens
MEIIYVTLLINVVVVHACNSWRSLRQMSPKYST

SEQ ID NO: 4043 - protein, 20 aa, Homo sapiens
MTRGTLPPTLLGLSFLSSQL

SEQ ID NO: 4044 - protein, 138 aa, Homo sapiens
MEKINFLVEIQWLTKPSLILSQPAQLRPVRRLPATITRLAVAMTPGQPGVPPNLGTGKAQKAGGPSQRGLEPKETQTLPTTGTLPSATPRPTKDQQLVMMMTGMKTGMGPNPLPTLRIQSQLMQAALSEETVVLVPHP

SEQ ID NO: 4045 - protein, 58 aa, Homo sapiens [sequence omitted]

SEQ ID NO: 4046 - protein, 5 aa, Homo sapiens
MRECS

SEQ ID NO: 4047 - protein, 29 aa, Homo sapiens
MAGLVLVFLGILLFEAQHSQRNPQDAAGR

SEQ ID NO: 4048 - protein, 3 aa, Homo sapiens
PPR

SEQ ID NO: 4049 - protein, 12 aa, Homo sapiens
MKLLIVIFFHFL

SEQ ID NO: 4050 - protein, 62 aa, Homo sapiens
MLFSLLHLGFCAYESNLILFQMAIPIPGQLVKKSFFPSLIWVAGTGPVPVSSGAYPTLFSLQ

SEQ ID NO: 4051 - protein, 4 aa, Homo sapiens
QVWL

SEQ ID NO: 4052 - protein, 46 aa, Homo sapiens
TRQRLKALSLRNCVTLVTLFDFSLLKFSHMGMVRKIPTSQDFLTIL

SEQ ID NO: 4053 - protein, 34 aa, Homo sapiens
MAALLLPLHLCLCAPDVSLCVSKHHLIRTPVGTD

SEQ ID NO: 4054 - protein, 24 aa, Homo sapiens
MSITLLFAVLTLLCNGTPELILPV

SEQ ID NO: 4055 - protein, 35 aa, Homo sapiens
MKHFCNLLCILMFCNQQSVCDPPSQNNAGKINLRY

SEQ ID NO: 4056 - protein, 35 aa, Homo sapiens
MLGSKASLRILLCLFFFLPRHSSSDNCCPSCTAGG

SEQ ID NO: 4057 - protein, 24 aa, Homo sapiens
FWWVCGLAGFRSEATDLHGECCSS

SEQ ID NO: 4058 - protein, 28 aa, Homo sapiens
KKISLSLLFFCSLLKSKQNLLLSPVNTT

SEQ ID NO: 4059 - protein, 21 aa, Homo sapiens
MRREPKAQLSVSCLAAMSFLY

SEQ ID NO: 4060 - protein, 17 aa, Homo sapiens
  SITE (9): Xaa equals any of the naturally occurring L-amino acids
GVVAVVVFXFSSLLFRF

SEQ ID NO: 4061 - protein, 10 aa, Homo sapiens
LVLFVIKGTI

SEQ ID NO: 4062 - protein, 28 aa, Homo sapiens
MFGWCHHLFFCMLFSLWRGHLCVYRRKM

SEQ ID NO: 4063 - protein, 31 aa, Homo sapiens
MRGAWCVCLCVCVYGYNSFIFVASERLCRAL

SEQ ID NO: 4064 - protein, 37 aa, Homo sapiens
HLPSIIPVLVYVLPKRAWKFILAVSLCWADYPIKVPL

SEQ ID NO: 4065 - protein, 177 aa, Homo sapiens
MGLMKANHVFFLLYLLHILLLDGAAWLTLWVFGTSFLPFLLCAVLLSAVQAQAGWLQHDFGHLSVFSTSKWNHLLHHFVIGHLKGAPASWWNHMHFQHHAKPNCFRKDPDINMHPFFFALGKILSVELGKQKKKYMPYNHQHKYFFLIGPPALLPLYFQWYIFYFVIQRKNGWTWPG

SEQ ID NO: 4066 - protein, 93 aa, Homo sapiens
MESQYVSFCVWLLSLSVLFSKSIRAAPYMSALFHPCCTIHERFIPSMLCHTSALYSIHAVPYISALFHPCCTIHERFIPSVLHHTSVLYSFSG

SEQ ID NO: 4067 - protein, 13 aa, Homo sapiens
PSLVSCASLLTVM

SEQ ID NO: 4068 - protein, 24 aa, Homo sapiens
MHYILKYSMTGFCPCLWAFIFLMG

SEQ ID NO: 4069 - protein, 27 aa, Homo sapiens
MCIILLVVVFHKSQFSSLVVGPKSSVS

SEQ ID NO: 4070 - protein, 18 aa, Homo sapiens
MTTWPIRPGIFAVWLYAV

SEQ ID NO: 4071 - protein, 54 aa, Homo sapiens
  SITE (16): Xaa equals any of the naturally occurring L-amino acids
  SITE (25): Xaa equals any of the naturally occurring L-amino acids
  SITE (43): Xaa equals any of the naturally occurring L-amino acids
MHYVCSFLKKILIVFXCSVPCLFSXVCPVTLSILDYKLIKALXMLFSLFLNLNI

SEQ ID NO: 4072 - protein, 78 aa, Homo sapiens
MYLLSTYLLWCSTLVTASYLNFPRVVPYSVFSDMVFQSVCVTYLLFISHCRWLCLLHHHKKFKLCALINCVLLKRLVG

SEQ ID NO: 4073 - protein, 3 aa, Homo sapiens
LNL

SEQ ID NO: 4074 - protein, 33 aa, Homo sapiens
MLGSLMARLNMLVPSSWAGSLASAPMIATAAIK

SEQ ID NO: 4075 - protein, 37 aa, Homo sapiens
MANLPLILIMLVVGMMGVTINTLSTHVQTLFQAVFIY

SEQ ID NO: 4076 - protein, 38 aa, Homo sapiens
MKKPSASKMHTLILPIALLLAGPVQLTHFSGTAADSLL

SEQ ID NO: 4077 - protein, 22 aa, Homo sapiens
MATHLFIYLLVAVFCYSCSVLY

SEQ ID NO: 4078 - protein, 12 aa, Homo sapiens
RLCRSFTFCFCS

SEQ ID NO: 4079 - protein, 53 aa, Homo sapiens
MRIVSDSCFSFPFSPPLSDTYTPRPHHTYAHCGLHHSHSLYFVNLAARKFLSP

SEQ ID NO: 4080 - protein, 64 aa, Homo sapiens [sequence omitted]

SEQ ID NO: 4081 - protein, 38 aa, Homo sapiens
MTSARKACFCFMWSLILQHAHSTCSWLGKVPTDIYKAS

SEQ ID NO: 4082 - protein, 21 aa, Homo sapiens
MILFFCWAPICFFLCNESLKE

SEQ ID NO: 4083 - protein, 26 aa, Homo sapiens
MPPGCLAVTECLFLLAYWSHVIFVTW

SEQ ID NO: 4084 - protein, 10 aa, Homo sapiens
MIHTPHNSPI

SEQ ID NO: 4085 - protein, 69 aa, Homo sapiens
  SITE (52): Xaa equals any of the naturally occurring L-amino acids
MSERHGPSPQSVLLSLWFVLTLTPFLFLTLLSCMEHTAPAPFQSAWQTPGLXRSSSFCVPFRSSLCSVR

SEQ ID NO: 4086 - protein, 30 aa, Homo sapiens
MRAELHGLVCLSAVSTMTAAVSGTEMPNIC

SEQ ID NO: 4087 - protein, 31 aa, Homo sapiens
DTLLSPWLLVWYVRLPAVFPFLNSTAGSSLK

SEQ ID NO: 4088 - protein, 46 aa, Homo sapiens
MASSVTTISLLLLASFTSLSCVWYFMFSCQDCVDLQILSLPDEVIC

SEQ ID NO: 4089 - protein, 34 aa, Homo sapiens
MAIHIWTMYFRLLHLYTLVPSAGGWGVCACIPRQ

SEQ ID NO: 4090 - protein, 32 aa, Homo sapiens
DFLLLIEWFISLKTFEMAHELLGQIMETSTLL

SEQ ID NO: 4091 - protein, 33 aa, Homo sapiens
MPILSHWTYVDWFLLLLCTYKYIYKMNIVHAFR

SEQ ID NO: 4092 - protein, 26 aa, Homo sapiens
  SITE (2): Xaa equals any of the naturally occurring L-amino acids
MXWLKLSFFVWAPVLTVLQCSWQVEW

SEQ ID NO: 4093 - protein, 32 aa, Homo sapiens
MNHLLILLTKHLIHTQMLEFPLYKCSHAIQLF

SEQ ID NO: 4094 - protein, 119 aa, Homo sapiens
MCYRRSLLKVLMSIYLLYKAIYATGSLKIQYCSSSKRSTKPRVSSLISLYSKNDPSMGWLNTDIEGILPQKIHLFVAGNFPLLSCVISFLLLATTHHWGLWKIIFLFGNEWKSKRPYYF

SEQ ID NO: 4095 - protein, 17 aa, Homo sapiens
MTKSVFFSFLSLSLSLG

SEQ ID NO: 4096 - protein, 56 aa, Homo sapiens
MWKENISFSFFIKIQVILLLYEQFFLIGHVAKNTAYSKCVSCCHDVYPYNNSVTKV

SEQ ID NO: 4097 - protein, 89 aa, Homo sapiens
LGLWPIWYASCVCMVCAVSLHLFYTSWGHGPQLLDRTLFSNPALGDQPSLANICMFSYSCLLKGPTQRLDFLLPLCVGTVCDICKKCAN

SEQ ID NO: 4098 - protein, 30 aa, Homo sapiens
MNASILYLCLVSFCLSIQEAFIKGPPCASH

SEQ ID NO: 4099 - protein, 40 aa, Homo sapiens
LRVATLPGVPLPRDYGQGPGAGRAAGADTGAAPESGNSAS

SEQ ID NO: 4100 - protein, 36 aa, Homo sapiens
MMDALVFLPWFVSSTRACAPRICCNLILVKRPSVSS

SEQ ID NO: 4101 - protein, 40 aa, Homo sapiens [sequence omitted]

SEQ ID NO: 4102 - protein, 22 aa, Homo sapiens
MLLSPFIFCFFLITVGLIENWS

SEQ ID NO: 4103 - protein, 65 aa, Homo sapiens
MNLSKAPALRFLWSCSSITGAAGNLNTTSWSTRLWPNGRRKKLSSGWSSWALGHLFTGKGFYLNE

SEQ ID NO: 4104 - protein, 34 aa, Homo sapiens
MVYRIQHADTWWDLLLLGFCYTRVSVVSASIYVC

SEQ ID NO: 4105 - protein, 47 aa, Homo sapiens
MVYRIQHADTWWTYCYWGFVILGFQWSVLVFMYVNPRCALDSGYFKF

SEQ ID NO: 4106 - protein, 2 aa, Homo sapiens
MV

SEQ ID NO: 4107 - protein, 85 aa, Homo sapiens
MPWLNQVLRAASLSPRCLVWVPVLGFLGPGLPPVLQTFPTGNPGYHPCPPEELPPPGLSPVGPGGAGGTTGTCGAWECLSCCIGP

SEQ ID NO: 4108 - protein, 144 aa, Homo sapiens
  SITE (77): Xaa equals any of the naturally occurring L-amino acids
SVLWNAMIHPLCNMTLKGVVWYQGESNINYNTDLYNCTFPALIEDWRETFHRGSQGQTERFFPFGLVQLSSDLSKKXSDDGFPQIRWHQTADFGYVPNPKMPNTFMAVAMDLCDRDSPFGSIHPRDKQNCGLSAAFGGPCSGLW

SEQ ID NO: 4109 - protein, 13 aa, Homo sapiens
MSPTQRCPILSWL

SEQ ID NO: 4110 - protein, 26 aa, Homo sapiens
MMMLTLYYCKINVVYISLCTAIFCFW

SEQ ID NO: 4111 - protein, 40 aa, Homo sapiens
MSAALLSSSLCWLRTLAYRPTNNQEAALVGTHCSKQGKQV

SEQ ID NO: 4112 - protein, 20 aa, Homo sapiens
MHVSVFVLMLLLPWQRKKKE

SEQ ID NO: 4113 - protein, 63 aa, Homo sapiens
MECSLTLAGLTLALPVGLPAAKTESLHCSFSPVTRPVYGPNGHASENLPWPLSKPSPGCNPCF

SEQ ID NO: 4114 - protein, 6 aa, Homo sapiens
ASCLCV

SEQ ID NO: 4115 - protein, 33 aa, Homo sapiens
MLRFCMLLQVLFHMCVCGVDVELLTTAAITYCS

SEQ ID NO: 4116 - protein, 13 aa, Homo sapiens
FFFFFFSQRLTKL

SEQ ID NO: 4117 - protein, 40 aa, Homo sapiens
MRRNMMNPLTFMLLGCACLRWLHLNILTRSAKMLRRSTVA

SEQ ID NO: 4118 - protein, 14 aa, Homo sapiens
  SITE (12): Xaa equals any of the naturally occurring L-amino acids
MSRVQSWCPAWXRW

SEQ ID NO: 4119 - protein, 207 aa, Homo sapiens
  SITE (170): Xaa equals any of the naturally occurring L-amino acids
ARAAVVVPAEWIKNWEKSGRGEFLHLCRILSENKSHDSSTYRDFQQALYELSYHVIKGNLKHEQASNVLSDISEFREDMPSILADVFCILDIETNCLEEKSKRDYFTQLVLACLYLVSDTVLKERLDPETLESLGLIKQSQQFNQKSVKIKTKLFYKQQKFNLLREENEXYAKLIAELGQDLSGSITSDLILENIKSLIGCFNLGSQ

SEQ ID NO: 4120 - protein, 33 aa, Homo sapiens
MLLLTMGFIQILPVFLLVYFFYSRVQSKIPHCI

SEQ ID NO: 4121 - protein, 8 aa, Homo sapiens
MGLVLEWC

SEQ ID NO: 4122 - protein, 36 aa, Homo sapiens
MFLLAILLPVFLVAWGGKTKESGWRAEGCRAVTLLL

SEQ ID NO: 4123 - protein, 29 aa, Homo sapiens
MAFLTMRILFFAYSFSKKHFLMEISEHGH

SEQ ID NO: 4124 - protein, 28 aa, Homo sapiens
MPVTELLQLLLLTQKMKRLLDWQQNKVE

SEQ ID NO: 4125 - protein, 61 aa, Homo sapiens [sequence omitted]

SEQ ID NO: 4126 - protein, 31 aa, Homo sapiens
MGRCVWMHFSCSCCFAFPDSTIPRGRGWSIL

SEQ ID NO: 4127 - protein, 338 aa, Homo sapiens
MANDPLEGFHEVNLASPTSPDLLGVYESGTQEQTTSPSVIYRPHPSALSSVPIQANALDVSELPTQPVYSSPRRLNCAEISSISFHVTDPAPCSTSGVTAGLTKLTTRKDNYNAEREFLQGATITEACDGSDDIFGLSTDSLSRLRSPSVLEVREKGYERLKEELAKAQRELKLKDEECERLSKVRDQLGQELEELTASLFEEAHKMVREANIKQATAEKQLKEAQGKIDVLQAEVAALKTLVLSSSPTSPTQEPLPGGKTPFKKGHTRNKSTSSAMSGSHQDLSVIQPIVKDCKEADLSLYNEFRLWKDEPTMDRTVSFLRQNLPGRYLSMFNILKK

SEQ ID NO: 4128 - protein, 17 aa, Homo sapiens
MMRLLLWLMIPWKASMK

SEQ ID NO: 4129 - protein, 54 aa, Homo sapiens [sequence omitted]

SEQ ID NO: 4130 - protein, 28 aa, Homo sapiens
MWMMLGTVLGPGIMTGLMMMMTAMRARV

SEQ ID NO: 4131 - protein, 188 aa, Homo sapiens
QGSRELLLALSWLLARGPVPEQMLAQARVPLGDEMTVCQCEALASPGPPAPHMEAEGPVDVRHVQWLMGKLRFRWRQLVSSQQEQCALLSKIHLYTRGCHSDQSLSHLSVTEAEMLRGPRGRPAAAAGLWSVRTSAWRLSWRGGALSWSSGGGWTRSWAPVPRRCLLQPHSPPPCPGSPSAGVASWTW

SEQ ID NO: 4132 - protein, 16 aa, Homo sapiens
LTGVGLSSLCSWQCSH

SEQ ID NO: 4133 - protein, 34 aa, Homo sapiens
MHVFHSSPLPVYSGGWCSLLVLLSLAERTMGSST

SEQ ID NO: 4134 - protein, 12 aa, Homo sapiens
HLLFLLLCFTCK

SEQ ID NO: 4135 - protein, 63 aa, Homo sapiens
MSWAPLQPGVCSCGVEVGGAGRDLQGSSCEGDSAATCRTLPLCLLPAWNMDVMAGAGTAVLRA

SEQ ID NO: 4136 - protein, 318 aa, Homo sapiens
MAPWAEAEHSALNPLRAVWLTLTAAFLLTLLLQLLPPGLLPGCAIFQDLIRYGKTKCGEPSRPAACRAFDVPKRYFSHFYIISVLWNGFLLWCLTQSLFLGAPFPSWLHGLLRILGAAQFQGGELALSAFLVLVFLWLHSLRRLFECLYVSVFSNVMIHVVQYCFGLVYYVLVGLTVLSQVPMDGRNAYITGKNLLMQARWFHILGMMMFIWSSAHQYKCHVILGNLRKNKAGVVIHCNHRIPFGDWFEYVSSPNYLAELMIYVSMAVTFGFHNLTWWLVVTNVFFNQALSAFLSHQFYKSKFVSYPKHRKAFLPFLF

SEQ ID NO: 4137 - protein, 36 aa, Homo sapiens
MDLKGRTKCSQYFLLSVVLLLSMGIVGSIIETLGKL

SEQ ID NO: 4138 - protein, 109 aa, Homo sapiens
MELTIFILRLAIYILTFPLYLLNFLGLWSWICKKWFPYFLVRFTVIYNEQMASKKRELFSNLQEFAGPSGKLSLLEVGCGTGANFKTPSQKKKKKKRSRDRETGSHCVA

SEQ ID NO: 4139 - protein, 32 aa, Homo sapiens
MMVIIVKKILLIVLRESTTLCQIPCFFLKPLK

SEQ ID NO: 4140 - protein, 73 aa, Homo sapiens [sequence omitted]

SEQ ID NO: 4141 - protein, 34 aa, Homo sapiens
MIAQLQSPCSFYLIMLALFSMSVWTHIKTPSCTL

SEQ ID NO: 4142 - protein, 69 aa, Homo sapiens
MASLWLVSWDLLLLLSHDCRLARIWLWMAWTQASRSSYVVASKCHVWPVADTIIKLLVLFFFRCFFLLA

SEQ ID NO: 4143 - protein, 98 aa, Homo sapiens
MLAMKLLVLWTVVCPQLVFLQKQLHKTTPNLPQSSQELVSDQRVRQSPRPQKLLFLPAPRQFHRLPSRGRTTAKVSSSTSGTKWSWGLCYGTSLTECQ

SEQ ID NO: 4144 - protein, 38 aa, Homo sapiens
MSVCVLYLQSLVIVPYITCKQILYFILAYLTEHITQKK

SEQ ID NO: 4145 - protein, 46 aa, Homo sapiens
MPGKQDWLFLQKNRTVPYIWPVQLVYLMPMFLLRVMHAYHLFQRRD

SEQ ID NO: 4146 - protein, 38 aa, Homo sapiens
MCHHTQLSSFLLNFFSEFSTLLVLTAISMFCFSLVTYA

SEQ ID NO: 4147 - protein, 23 aa, Homo sapiens
MFVAVFLFCFVFCKFHSAISVFN

SEQ ID NO: 4148 - protein, 217 aa, Homo sapiens
  SITE (156): Xaa equals any of the naturally occurring L-amino acids
  SITE (196): Xaa equals any of the naturally occurring L-amino acids
  SITE (211): Xaa equals any of the naturally occurring L-amino acids
MLPVVWIILCSSAQFPHLWKLHSHLAQMSHSSLLPLENRSLSLCRTRCSDPLSCTLAPFLPPTVSLSTLSSALQSSFCSFFLRRQCRPSCSPVPGVHISNFGSASWTCPCGCLAIHSNPASPKGMILPYFLLTQLCGQSSRTNGSKLPPNTHPRLXAWAPLASPRAAHIKVQLGSELLQEASPALLCRRTLLLHTXSPILWQALLYPQASXQTSLTC

SEQ ID NO: 4149 - protein, 35 aa, Homo sapiens
MMSTSQTAPLWCLWPPSRMTLAVSLSPASRRRGSR

SEQ ID NO: 4150 - protein, 40 aa, Homo sapiens
MKHFLFFSFLAFLSLYLMYTWKLQGLSTGHASLYRSHLCL

SEQ ID NO: 4151 - protein, 35 aa, Homo sapiens
MENMYWGPLGLTSEIVLFILLHLAFQLMEKYKFKF

SEQ ID NO: 4152 - protein, 34 aa, Homo sapiens
QKLLLFYAQSDIESFHLFLSPLLLLSDMLLQFLT

SEQ ID NO: 4153 - protein, 44 aa, Homo sapiens
GLGSGEWFPALQLMWLLRGTQALFHYLPNNGGPVFNCSTTTQNT

SEQ ID NO: 4154 - protein, 31 aa, Homo sapiens
MLLRVRRVGIICHLEFLCLADLSSDLPIYQR

SEQ ID NO: 4155 - protein, 46 aa, Homo sapiens
MSPGGFLLLTSLGPTIGFLAGLRSLREVAISKRKDFYLRLSGKEAE

SEQ ID NO: 4156 - protein, 23 aa, Homo sapiens
MSQSLIINLFLCIYILLVLSGEP

SEQ ID NO: 4157 - protein, 46 aa, Homo sapiens
MMILFCQLLAVSWGCCVYSTTNPKVSAIHCGFIEHLLVCACVGGGI

SEQ ID NO: 4158 - protein, 48 aa, Homo sapiens
MCVQKRQLPIGPRSHFLMVLILFMQPVPFVHISWLVNKATSDLFFKDL

SEQ ID NO: 4159 - protein, 37 aa, Homo sapiens
  SITE (2): Xaa equals any of the naturally occurring L-amino acids
MXFWAAMGLLEHWCVHLHSMCWNPQESGGAHIQGKVS

SEQ ID NO: 4160 - protein, 37 aa, Homo sapiens; identical to SEQ ID NO: 4159
  SITE (2): Xaa equals any of the naturally occurring L-amino acids

SEQ ID NO: 4161 - protein, 59 aa, Homo sapiens
MLARLRQVSTLCCLSLAQTGHFVWLFPSTRPQWEQASLPQASETDHPIPPSPVNLPLFP

SEQ ID NO: 4162 - protein, 24 aa, Homo sapiens
LFHITEWDLCFEETNPTDTLILDF

SEQ ID NO: 4163 - protein, 56 aa, Homo sapiens
MKSHSVWLPTLYCAVVKVYLCVGCSHPLVSTGIGPRSLHRSPAGMPVSHSAPCKTH

SEQ ID NO: 4164 - protein, 52 aa, Homo sapiens
MILMSLLPIFWLVTPLHIISSSPFVLCVLWGVCVCVCVCVVGEGCFRNEREK

SEQ ID NO: 4165 - protein, 477 aa, Homo sapiens
  SITE (19): Xaa equals any of the naturally occurring L-amino acids
  SITE (64): Xaa equals any of the naturally occurring L-amino acids
  SITE (73): Xaa equals any of the naturally occurring L-amino acids
  SITE (76): Xaa equals any of the naturally occurring L-amino acids
  SITE (90): Xaa equals any of the naturally occurring L-amino acids
  SITE (112): Xaa equals any of the naturally occurring L-amino acids
  SITE (141): Xaa equals any of the naturally occurring L-amino acids
  SITE (181): Xaa equals any of the naturally occurring L-amino acids
  SITE (341): Xaa equals any of the naturally occurring L-amino acids
MALRHSACRRFSLAEFAQXQARARHEKLRQRLKEEKLEMLQWKLSAAGVPQAEAGLPPVVDAIXDASVEEDLXVAXAGGRLEEVSFLQPXPARRRRALLRASGVRRIDREEXRELQALRQSREDCGCHCDRICDPETCSCXLAGIKCQMDHTAFPCGCCREGCENPMGRVEFNQARVQTHXIHTLTRLQLEQEAESFRELEAPAQGSPPSPGEEALVPTFPLAKPPMNNELGDNSCSSDMTDSSTASSSASGTSEAPDCPTHPGLPGPGFQPGVDDDSLARILSFSDSDFGGEEEEEEEGSVGNLDNLSCFHPADIFGTSDPGGLASWTHSYSGCSFTSGXLDENANLDASCFLNGGLEGSREGSLPGTSVPPSMDAGRSSSVDLSLSSCDSFELLQALPDYSLGPHYTSQKVSDSLDNIEAPHFPLPGLSPPGDASSCFLESLMGFSEPAAEALDPFIDSQFEDTVPASLMEPVPV

SEQ ID NO: 4166 - protein, 8 aa, Homo sapiens
GGLWLSLR

SEQ ID NO: 4167 - protein, 2 aa, Homo sapiens
SL

SEQ ID NO: 4168 - protein, 17 aa, Homo sapiens
LIFIVFHTSSQSLPGTW

SEQ ID NO: 4169 - protein, 18 aa, Homo sapiens
  SITE (5): Xaa equals any of the naturally occurring L-amino acids
MPGFXWFVFVFVFLSNPA

SEQ ID NO: 4170 - protein, 629 aa, Homo sapiens
MCFIPLVCWIVCTGLKQQMESGKSLAQTSKTTTAVYVFFLSSLLQPRGGSQEHGLCAHLWGLCSLAADGIWNQKILFEESDLRNHGLQKADVSAFLRMNLFQKEVDCEKFYSFIHMTFQEFFAAMYYLLEEEKEGRTNVPGSRLKLPSRDVTVLLENYGKFEKGYLIFVVRFLFGLVNQERTSYLEKKLSCKISQQIRLELLKWIEVKAKAKKLQIQPSQLELFYCLYEMQEEDFVQRAMDYFPKIEINLSTRMDHMVSSFCIENCHRVESLSLGFLHNMPKEEEEEEKEGRHLDMVQCVLPSSSHAACSHGLVNSHLTSSFCRGLFSVLSTSQSLTELDLSDNSLGDPGMRVLCETLQHPGCNIRRLWLGRCGLSHECCFDISLVLSSNQKLVELDLSDNALGDFGIRLLCVGLKHLLCNLKKLWLVSCCLTSACCQDLASVLSTSHSLTRLYVGENALGDSGVAILCEKAKNPQCNLQKLGLVNSGLTSVCCSALSSVLSTNQNLTHLYLRGNTLGDKGIKLLCEGLLHPDCKLQVLELDNCNLTSHCCWDLSTLLTSSQSLRKLSLGNNDLGDLGVMMFCEVLKQQSCLLQNLGLSEMYFNYETKSALETLQEEKPELTVVFEPSW

SEQ ID NO: 4171 - protein, 34 aa, Homo sapiens
MYVCACVFVCAYCVHMCVSRLCVSFWGMCVSVLL

SEQ ID NO: 4172 - protein, 16 aa, Homo sapiens
MTELLLFFSPLYQEVN

SEQ ID NO: 4173 - protein, 2 aa, Homo sapiens
MS

SEQ ID NO: 4174 - protein, 15 aa, Homo sapiens
MSNWWRWGLLLWPPQ

SEQ ID NO: 4175 - protein, 60 aa, Homo sapiens
VITMALAAVVTEVALANLNVVETVAGVTNQMKMIGQNHSHQVNAWNSKFLKCMLLVMKPY

SEQ ID NO: 4176 - protein, 47 aa, Homo sapiens
PTLTAPTLALLLLPKISCLLTSTHPRTQGSRAHFPRAWRTPQTPSSM

SEQ ID NO: 4177 - protein, 27 aa, Homo sapiens
MASTSRWTRWALLLASSSAWPNSTAPS

SEQ ID NO: 4178 - protein, 51 aa, Homo sapiens
MAFLSLFPLSSLFSHFSLFKTCLQSTQNRVDKSLSSPDFSWPRNERLFSKP

SEQ ID NO: 4179 - protein, 30 aa, Homo sapiens
ISMFSLLVKMCVQMTVGRDARCKFTSLPSL

SEQ ID NO: 4180 - protein, 9 aa, Homo sapiens
MGTRLGDFC

SEQ ID NO: 4181 - protein, 31 aa, Homo sapiens
MLCVHFSARESVAFLCLSKGSTVQNSLAPLT

SEQ ID NO: 4182 - protein, 68 aa, Homo sapiens
  SITE (32): Xaa equals any of the naturally occurring L-amino acids
ILATPQPLVVPHAHFAEDEPQVLIRCWNKPPXLSESPTNLEFETHSLARLNGLCSAIKRLLGCYPWQG

SEQ ID NO: 4183 - protein, 75 aa, Homo sapiens
MSALPSPLCPFCSVLLLPSPPARVPGLCLLFLSLPPLTPPSTVGTCKPQGCAPSWSPIHPRNVSCSIYKGHGDFG

SEQ ID NO: 4184 - protein, 41 aa, Homo sapiens
MTYLLFLSELDTLCPGQPCPWAATAHQSWEEAGPGGLGRRQ

SEQ ID NO: 4185 - protein, 12 aa, Homo sapiens
MGSSLAFILFLP

SEQ ID NO: 4186 - protein, 8 aa, Homo sapiens
GLSYFLDH

SEQ ID NO: 4187 - protein, 99 aa, Homo sapiens
MRLGRWGLRMWPWRVLFLAGASPSQLQEMGCRCTSTAQSSAGEGSKTSLHPDPRVCRSFQLLAPWRMGREGERGRWVEDSTGAWPHDGCNAATFSVGHV

SEQ ID NO: 4188 - protein, 19 aa, Homo sapiens
AFINSCIFFPLFLLAYYVY

SEQ ID NO: 4189 - protein, 20 aa, Homo sapiens
DSFIGEWVVALGKVLPYCLF

SEQ ID NO: 4190 - protein, 42 aa, Homo sapiens
  SITE (34): Xaa equals any of the naturally occurring L-amino acids
MKGHYPCAWMSLSWFRTLSAMIYCLLYIDKSSIXFFTNERRI

SEQ ID NO: 4191 - protein, 32 aa, Homo sapiens
MGCELWISAAWISAVWCSNRLHNLVESQSSHL

SEQ ID NO: 4192 - protein, 19 aa, Homo sapiens
DKFLIFSYFCLCLFMPLIP

SEQ ID NO: 4193 - protein, 26 aa, Homo sapiens
MPWYFSPSLLWSLFQWSDSEAGSRLC

SEQ ID NO: 4194 - protein, 35 aa, Homo sapiens
MSLPMSFFILSHLSSFMICTYGKDYSHFTDEGAFT

SEQ ID NO: 4195 - protein, 52 aa, Homo sapiens
MPLAIFALVDLFWVSSFSNINVPKDHLVKCLRFRVLSHPERSGLNRSRNLHF

SEQ ID NO: 4196 - protein, 38 aa, Homo sapiens
MYMQHVLLCLMYISMSFNKFILSCNNHHDQFTERFHLL

SEQ ID NO: 4197 - protein, 20 aa, Homo sapiens
MSWLRIILSMLKTAFEPRSV

SEQ ID NO: 4198 - protein, 55 aa, Homo sapiens
MCTSFMQLWFVLGLADLGWAWLQAICLVHVCSLHLSLFWDQQVTQGMLPSWPWKN

SEQ ID NO: 4199 - protein, 31 aa, Homo sapiens
MLLILFFIQVTGCIREMVWAFKGITEKGISY

SEQ ID NO: 4200 - protein, 6 aa, Homo sapiens
AGAVFG

SEQ ID NO: 4201 - protein, 44 aa, Homo sapiens
MFSLLRAFPSDRCPCPAASTGWQRARASAPKLSCRALRPRVCPQ

SEQ ID NO: 4202 - protein, 34 aa, Homo sapiens
MPSLIFIISFFLLAVDLVCPSFSCSLRCAGNLFL

SEQ ID NO: 4203 - protein, 74 aa, Homo sapiens
MRSSLWSSSSLLSLMANFPAQTSASGLFPSVHTDFFPSPVPSWRVGPSAAALGHSQDKVLVYLGEQITSSSIHT

SEQ ID NO: 4204 - protein, 36 aa, Homo sapiens
  SITE (15): Xaa equals any of the naturally occurring L-amino acids
MCICVFYMIYIYLYXMFTYKVGSQTWKDFPYHTKEI

SEQ ID NO: 4205 - protein, 67 aa, Homo sapiens [sequence omitted]

SEQ ID NO: 4206 - protein, 17 aa, Homo sapiens
ICIWNISYMNMYFFTQQ

SEQ ID NO: 4207 - protein, 42 aa, Homo sapiens
MSPVLHLRRLARCILFHLPQFSSSVKRPHGFGANRMTDKRDK

SEQ ID NO: 4208 - protein, 35 aa, Homo sapiens
MYLLINKLYIFCMFTQTVLVLESPHHLNFVGEFCK

SEQ ID NO: 4209 - protein, 55 aa, Homo sapiens
  SITE (33): Xaa equals any of the naturally occurring L-amino acids
MWLTKKFKLNVRLTFCFYWTAQVEKVSEHKTPXKYIFHWDWGWVLWGKCIGAGQC

SEQ ID NO: 4210 - protein, 92 aa, Homo sapiens
MSDAPLGVWVLLQAVRCSPGCVGTAPDSPMLTCGCGCCSRPSDAHLGVWVLLQVVRCSPWAMGAATCCQMLTSGCGHCSGLSDARLWLWALL

SEQ ID NO: 4211 - protein, 83 aa, Homo sapiens
PLQSSPWRLLFRGHLPVLSGGSVPASAPGSHPCPAHEGAHPWTYLSSPTTSLAFNGSGIRDRGATRQRAPGGLMGGRGKSRHC

SEQ ID NO: 4212 - protein, 38 aa, Homo sapiens
MCVGKDFFWFLLFGFAQILESVGLHLLPNLKSFLSLFL

SEQ ID NO: 4213 - protein, 54 aa, Homo sapiens
MRRCTLEGNRWLLFLCVVWNGWQKVSELCGRQHGAKGTVSPSSPLPLSQTPADI

SEQ ID NO: 4214 - protein, 22 aa, Homo sapiens
TSLILCCLSTYLLSLYCGPCTY

SEQ ID NO: 4215 - protein, 41 aa, Homo sapiens
MDILFFFLFYFLQERLGFSTVSNKSSGVIFFPVVLPQPPES

SEQ ID NO: 4216 - protein, 35 aa, Homo sapiens
MCIAIVHSLSLPYGTPLYEPSIYCIYGCGTNYPKT

SEQ ID NO: 4217 - protein, 71 aa, Homo sapiens
MNWRSCKLGSVYYYRFCTVSPRVLVKQDGGRGTSFPSFTSLRSIFSIFYNFAFGKGLLISWEFRHILKISP

SEQ ID NO: 4218 - protein, 4 aa, Homo sapiens
MVSC

SEQ ID NO: 4219 - protein, 35 aa, Homo sapiens
MPGSCFSWSFSRLLGVFLSLQCSWKTVYGILSREA

SEQ ID NO: 4220 - protein, 31 aa, Homo sapiens
MGHIFWMCALKLILLARRKKGDASVSNILDT

SEQ ID NO: 4221 - protein, 23 aa, Homo sapiens
MLHFYTIKFIFSIVCLLAPIGSR

SEQ ID NO: 4222 - protein, 29 aa, Homo sapiens
MYLIFVYCVVLFFVSALTGVAGGAPSEMH

SEQ ID NO: 4223 - protein, 20 aa, Homo sapiens
MIKLNTSFSIFNAAMLLYLW

SEQ ID NO: 4224 - protein, 35 aa, Homo sapiens
MNNPQSPGLILFTWLSCLFAFRSVLASSLSKRIRA

SEQ ID NO: 4225 - protein, 38 aa, Homo sapiens
MHRRDLSVCVCLCLCPSLSLSLCKTRIHCCRELPQIAP

SEQ ID NO: 4226 - protein, 68 aa, Homo sapiens
  SITE (22): Xaa equals any of the naturally occurring L-amino acids
MWHMMSFTPCSLPCSLALCLPXGPACLPPVPLPLTSNIQLKAKAGLLLRQRLCSIASVHLPALLVSAR

SEQ ID NO: 4227 - protein, 32 aa, Homo sapiens
MYVRLNVTYYLGLFFKLKFALALQPARQGVIT

SEQ ID NO: 4228 - protein, 54 aa, Homo sapiens
MLPNIVLPSWCLVCLVQFSFTFLSPSHSPRIVTTGLYTPGRHEPNLLSCSLLHL

SEQ ID NO: 4229 - protein, 6 aa, Homo sapiens
MRTRLW

SEQ ID NO: 4230 - protein, 9 aa, Homo sapiens
  SITE (6): Xaa equals any of the naturally occurring L-amino acids
MAAIGXNGF

SEQ ID NO: 4231 - protein, 25 aa, Homo sapiens
MALNWLTLLLTWTFESYVVTYFPHL

SEQ ID NO: 4232 - protein, 23 aa, Homo sapiens
  SITE (11): Xaa equals any of the naturally occurring L-amino acids
MCADLPGPVGXADVGPGSYPGIW

SEQ ID NO: 4233 - protein, 64 aa, Homo sapiens
HMHTAVAHTSLSLSLVTVLPCDSHPSDRPCSLAAPSTGRGLAWCPVSVCLHRAGRFHKDWLMSR

SEQ ID NO: 4234 - protein, 5 aa, Homo sapiens
MALPT

SEQ ID NO: 4235 - protein, 32 aa, Homo sapiens
MGSPGALLALLPSLLPFSWGLGPWPLLSSPKT

SEQ ID NO: 4236 - protein, 36 aa, Homo sapiens
MFIWVGVSLCLMFTVAIDARDFRFLSCPNFYLPFDF

SEQ ID NO: 4237 - protein, 18 aa, Homo sapiens
MTIPSLNDFVCRILLLLN

SEQ ID NO: 4238 - protein, 57 aa, Homo sapiens
KSARIRIFLIPLCSTSLPIPKFLPLGRKFLLLLFDLIFNSISMIFCFVFFFLRMTVF

SEQ ID NO: 4239 - protein, 43 aa, Homo sapiens
NCNLLFACIVILVYALFDISCLPYLYLKYSKYLFLYIFGKNIF

SEQ ID NO: 4240 - protein, 56 aa, Homo sapiens
  SITE (16): Xaa equals any of the naturally occurring L-amino acids
  SITE (21): Xaa equals any of the naturally occurring L-amino acids
  SITE (54): Xaa equals any of the naturally occurring L-amino acids
MGRFWAWHIIASLLLXHTIFXRNNSESQEVKENAISTLCRIERHLTNRCGSQIXIF

SEQ ID NO: 4241 - protein, 6 aa, Homo sapiens
WMHTGH

SEQ ID NO: 4242 - protein, 49 aa, Homo sapiens
FFAFLGPFPFTLISLSRGLQFPHNRFDRRKILNWEAHRGKRTAFLRIPV

SEQ ID NO: 4243 - protein, 66 aa, Homo sapiens
MIKIGSQNKQKRKKSRKFLPACSLCMLLCNVILLLAPSRDGSPESELDHVNCFDHWSIHKHGTTEA

SEQ ID NO: 4244 - protein, 30 aa, Homo sapiens
MWCMLDITFLLGLWNFGICQAEGINVTTPQ

SEQ ID NO: 4245 - protein, 67 aa, Homo sapiens
MWRQKTLYFTFLLNVSFSLYFSFSLWYFFTPCPHPHPPTPTLALPNATKIVLIRTPGSPTNRSDTIN

SEQ ID NO: 4246 - protein, 52 aa, Homo sapiens
GATGMWRCRGYWAPGQNAIWWLALKMVLCCSCLGLGEFMRPSMSSLSGAVPL

SEQ ID NO: 4247 - protein, 22 aa, Homo sapiens
MLCSLSLSLLLFANSSTLNPKS

SEQ ID NO: 4248 - protein, 33 aa, Homo sapiens
MPVHSHTPVERLVYLTLFFSLLKKCHLTNSITS

SEQ ID NO: 4249 - protein, 9 aa, Homo sapiens
CCVLKIFGS

SEQ ID NO: 4250 - protein, 159 aa, Homo sapiens
MYTFACVHVCTCVCLCAYLSVCVHICMYMGPVIAARLLPRAFSARWPCLCSFCQPRGAEWPSSQPQWAQWGGPSSEGTRAAASPVFPHAVLRAPVHEPHSQEQSPRHLSHLGHPWPCVRSQSLEGFVHQAWDPGILPQSPPAWGQCGGWRGWRVARVAG

SEQ ID NO: 4251 - protein, 23 aa, Homo sapiens
MRNLEVMHSRSLGICDSHSVRCF

SEQ ID NO: 4252 - protein, 38 aa, Homo sapiens
MTGKMTVMMRIPSSIVTNTAMESEVPGFKTQVYRSLAV

SEQ ID NO: 4253 - protein, 53 aa, Homo sapiens
MRHHVAVLPLGSNVLKLLCLFFERNISREVPKSSLVISFNDAEILVKKLGSLP

SEQ ID NO: 4254 - protein, 21 aa, Homo sapiens
MITAIGIFTCILLSFISPMYI

SEQ ID NO: 4255 - protein, 37 aa, Homo sapiens
MYFPIICFRLFLFTEMIFSKIGTTKKLQMQTYVISLL

SEQ ID NO: 4256 - protein, 160 aa, Homo sapiens
ATRGGWLFRAIPASVEHGRVYVGNVAWMHVLAARELEQRAALMGGQVYFCYDGSPYRSYEDFNMEFLGPCGLRLVGARPLLPYWLLVFLAALNALLQWLLRPLVLYAPLLNPYTLAVANTTFTVSTDKAQRHFGYEPLFSWEDSRTRTILWVQAATGSAQ

SEQ ID NO: 4257 - protein, 14 aa, Homo sapiens
MAWTLLGRVVGHHP

SEQ ID NO: 4258 - protein, 1 aa, Homo sapiens
S

SEQ ID NO: 4259 - protein, 36 aa, Homo sapiens
MLIVYLKFQFNCASVFCLGILLWGTSRSLASSWSMS

SEQ ID NO: 4260 - protein, 12 aa, Homo sapiens
MILALIKMMTFA

SEQ ID NO: 4261 - protein, 41 aa, Homo sapiens
MHLCWAGALSFVFWANLILIYLFGTSESPQNILSSYFELGV

SEQ ID NO: 4262 - protein, 31 aa, Homo sapiens
MKAILCFLLLLMNPFPPFSFPSPIDQKCEGG

SEQ ID NO: 4263 - protein, 187 aa, Homo sapiens
  SITE (140): Xaa equals any of the naturally occurring L-amino acids
  SITE (141): Xaa equals any of the naturally occurring L-amino acids
  SITE (152): Xaa equals any of the naturally occurring L-amino acids
  SITE (175): Xaa equals any of the naturally occurring L-amino acids
  SITE (178): Xaa equals any of the naturally occurring L-amino acids
MHPLPRAWGLVVGSLAFTQGACLSHGGQPKVGRSPLGDWDKMPSFQRNVEASRKKKAVRPEESGVLHQRPVPSGQPLRWALGGCGVPGFHQGCVCLPRGASKRGKKSTGGWGQDVRLSGGHCGSPRKKVTRLKRKLGSSXXGQCLPGSLCAXSRGARTQFALKGADYNLIGRRFXNVXTWKNPWGYP

SEQ ID NO: 4264 - protein, 85 aa, Homo sapiens
MASYCGWIKTKTLAWLIRSAGFGSANLSSLLALSISLLFPSFVTQVSFLKMHHGLFPPPGTFFPPFPLTCQFLLSFISLLKCHCF

SEQ ID NO: 4265 - protein, 19 aa, Homo sapiens
  SITE (8): Xaa equals any of the naturally occurring L-amino acids
MIRQQYNXHFMSVAVSTFS

SEQ ID NO: 4266 - protein, 33 aa, Homo sapiens
MFSLSLILYFVSQIFPQFSWLNHFNCKGKIYIS

SEQ ID NO: 4267 - protein, 91 aa, Homo sapiens [sequence omitted]

SEQ ID NO: 4268 - protein, 148 aa, Homo sapiens
MASVVLALRTRTAVTSLLSPTPATALAVRYASKKSGGSSKNLGGKSSGRRQGIKKMEGHYVHAGNIIATQRHFRWHPGAHVGVGKNKCLYALEEGIVRYTKEVYVPHPRNTEAVDLITRLPKGAVLYKTFVHVVPAKPEGTFKLVAML

SEQ ID NO: 4269 - protein, 53 aa, Homo sapiens
MPARQCHVYTCMCVCTWVCVPVCVCGILVTFAIFSWLEVRGPSHTQRQELMQV

SEQ ID NO: 4270 - protein, 28 aa, Homo sapiens
MCLLNGCVCKIKMLTVATLLLSLPLGLL

SEQ ID NO: 4271 - protein, 31 aa, Homo sapiens
MTIPKDSLILFRLLAFIVYVLWFSTNIHYPQ

SEQ ID NO: 4272 - protein, 30 aa, Homo sapiens
MLCFLIWRLVMWVCSTCKKMHRAQDKCAFP

SEQ ID NO: 4273 - protein, 32 aa, Homo sapiens
MKPRVISTTIFFLLLFKSVCQSFKFFLSDCCH

SEQ ID NO: 4274 - protein, 36 aa, Homo sapiens
MLLMALLVTLLTSIQVGLPDAILSHPEITAVYIDLV

SEQ ID NO: 4275 - protein, 34 aa, Homo sapiens
MREGQLKAKRKPCMGRLCFWSYFFFFFFFTIHGI

SEQ ID NO: 4276 - protein, 30 aa, Homo sapiens
MLFPLFFILSIFSVHIVNSTLEMEKQSQRV

SEQ ID NO: 4277 - protein, 62 aa, Homo sapiens
MLQTHPLLSQLPAPGPRLVVSLAFLLYCIARYCPTCTMLRSLSTTCDSATGLIRVLRCVLPS

SEQ ID NO: 4278 - protein, 37 aa, Homo sapiens
ILGFPGCWGGSLALPVGLRLVGGGGGGSRCHGSRRPN

SEQ ID NO: 4279 - protein, 55 aa, Homo sapiens
MCVCVQACVHMCLCVHVCASVHVCECAYVHCVRECACGPCTHLSIHVSLHAHVSM

SEQ ID NO: 4280 - protein, 27 aa, Homo sapiens
MGRCTFVCRIEIFFSPYLIPPEFGDYL

SEQ ID NO: 4281 - protein, 132 aa, Homo sapiens [sequence omitted]

SEQ ID NO: 4282 - protein, 51 aa, Homo sapiens
IISLTPLWCLPSAIACSHILSFGFPPEIPNFPTRSYKAIQFSSASIRKLSF

SEQ ID NO: 4283 - protein, 17 aa, Homo sapiens
MLMPWGLGLGIWLCSLT

SEQ ID NO: 4284 - protein, 54 aa, Homo sapiens
  SITE (31): Xaa equals any of the naturally occurring L-amino acids
  SITE (40): Xaa equals any of the naturally occurring L-amino acids
  SITE (48): Xaa equals any of the naturally occurring L-amino acids
MCARKCRMLLVLQTVVCGTPKPLSFHDAFCXVITFPWRRXQPWWRALXWLCPSA

SEQ ID NO: 4285 - protein, 34 aa, Homo sapiens
MIVINKIKTIYLFLVMLQFTRKIQKILKKKICWN

SEQ ID NO: 4286 - protein, 34 aa, Homo sapiens
MLMNQVLTAPIGLVLLLLFALLTFPPSSSIRERN

SEQ ID NO: 4287 - protein, 27 aa, Homo sapiens
MTSYCPAGSVPRLSLPSTVRPLLGWLY

SEQ ID NO: 4288 - protein, 41 aa, Homo sapiens
MHWQIQLINWSSFLSLFSFLQISAQSPKYCLSGPIMCPCIL

SEQ ID NO: 4289 - protein, 1 aa, Homo sapiens
M

SEQ ID NO: 4290 - protein, 7 aa, Homo sapiens
MPLASAF

SEQ ID NO: 4291 - protein, 37 aa, Homo sapiens
MLFGSLCDLHSAFFLISSTACPTLSFLHSTPDVFQNL

SEQ ID NO: 4292 - protein, 5 aa, Homo sapiens
WLLKT

SEQ ID NO: 4293 - protein, 12 aa, Homo sapiens
MILFTMFILAGW

SEQ ID NO: 4294 - protein, 30 aa, Homo sapiens
  SITE (2): Xaa equals any of the naturally occurring L-amino acids
MXHGLLLISLQLLGPIITYTTISDPTTFLL

SEQ ID NO: 4295 - protein, 36 aa, Homo sapiens
LPSLLLFLNPFIFTILLLFPCGGFNTSIFFLNQLDS

SEQ ID NO: 4296 - protein, 4 aa, Homo sapiens
MLPL

SEQ ID NO: 4297 - protein, 37 aa, Homo sapiens
MGLLVPLTLLLQLSAGELSVVLQDSTDCMSELGLAWL

SEQ ID NO: 4298 - protein, 44 aa, Homo sapiens
TLLGPLEMFGRVWRRGTKVCTTRCLQSDWVSPSFKEAISVYPQN

SEQ ID NO: 4299 - protein, 152 aa, Homo sapiens
ISEHGLKPTTKAVPASDSSPSKPSSSSFLIPSFSSLALVEHFAQHGAWLIIKLPERTHIIITSSMKASTTSQAKLLCVSTQCSHILFCLWLAPFKENLFTYPSSTTLHSQHTNTVSHQQPSLSLCLHAVESKKELVGLIHLSPRAHKGATEN

SEQ ID NO: 4300 - protein, 2 aa, Homo sapiens
FT

SEQ ID NO: 4301 - protein, 47 aa, Homo sapiens [sequence omitted]

SEQ ID NO: 4302 - protein, 75 aa, Homo sapiens
MSLRPVTQTTFGDCGSVSSHRGKKPMNKQAQPLPPRSDDFMPQTANPHLPTDASVTAGEKPRNRGPDVETEPFRA

SEQ ID NO: 4303 - protein, 22 aa, Homo sapiens
GITFFFIYFGFCFSHEGLFSNI

SEQ ID NO: 4304 - protein, 50 aa, Homo sapiens
LLVDFDSDKRTQPIWVFFALIVWGFEVLARSWRGVCVQVCECMCNVCVQV

SEQ ID NO: 4305 - protein, 30 aa, Homo sapiens
MISDPLLLPLTFFLFISLSINFPVVEAQRW

SEQ ID NO: 4306 - protein, 12 aa, Homo sapiens
MPFTFFLFVNLL

SEQ ID NO: 4307 - protein, 39 aa, Homo sapiens
MSEAGWWAWLFVILHPFGMPDTFHNNFKKDKTTAEKCIE

SEQ ID NO: 4308 - protein, 38 aa, Homo sapiens
MFIALCSKVCVCVNAYVCVHTYVVFMPGMYTIWVHICN

SEQ ID NO: 4309 - protein, 31 aa, Homo sapiens
MRSLGLRCAFYLLCLLNPSALPDPAGRSPPL

SEQ ID NO: 4310 - protein, 30 aa, Homo sapiens
MLAGYFADLFMWLPHSVTCLCTSVCFCCGW

SEQ ID NO: 4311 - protein, 14 aa, Homo sapiens
MVIRLSNWAPTCVS

SEQ ID NO: 4312 - protein, 104 aa, Homo sapiens
MAPLPSSLLLLLTIYHGSSHLPSTMIVSFLRPHQEQVPAPCFLHSCSLLFFRMATANIVQMSKLPTPLCAPPTLNLLTLCSRCKLTCPFCHRGCLSPPSAVTLL

SEQ ID NO: 4313 - protein, 9 aa, Homo sapiens
QAQLIFSWG

SEQ ID NO: 4314 - protein, 30 aa, Homo sapiens
MGVLAVLLPVTGTWAWVRGGHVAPDTALRI

SEQ ID NO: 4315 - protein, 59 aa, Homo sapiens [sequence omitted]

SEQ ID NO: 4316 - protein, 32 aa, Homo sapiens
MGAGAFGYLALPCLVCLTYLLPTLSRNHSQMG

SEQ ID NO: 4317 - protein, 34 aa, Homo sapiens
MALEAGALYIGWILGQAFFFFFFSEVSLPKCGKV

SEQ ID NO: 4318 - protein, 15 aa, Homo sapiens
MHRSLSPCKIWLLFF

SEQ ID NO: 4319 - protein, 33 aa, Homo sapiens
MSLPHLLFSAFMSQAAWGLLFLGLLHSTNLRWA

SEQ ID NO: 4320 - protein, 50 aa, Homo sapiens
MWSLLHFCLLLASFLSCFELLASVCSLGRRFEEYSWFFPGSRGSGCAGVS

SEQ ID NO: 4321 - protein, 22 aa, Homo sapiens
MASLLMFLVPLNRIGRIPHLCR

SEQ ID NO: 4322 - protein, 1 aa, Homo sapiens
M

SEQ ID NO: 4323 - protein, 16 aa, Homo sapiens
SWCDGGCWCRLMYSFV

SEQ ID NO: 4324 - protein, 20 aa, Homo sapiens
MGSLLVFPRSSYALLHLIGV

SEQ ID NO: 4325 - protein, 34 aa, Homo sapiens
MIMPLCVVCIVLNPVLCIEEILQSIVLHKYWGLA

SEQ ID NO: 4326 - protein, 50 aa, Homo sapiens
MVTAVCQPVLTAPVFALLLPAVARSPSVGAALEPGKRNRRVKRGCGVPFM

SEQ ID NO: 4327 - protein, 34 aa, Homo sapiens
MDSTSDTPFPRWSLRLRSLVLVLIQGLSPVLSRV

SEQ ID NO: 4328 - protein, 39 aa, Homo sapiens
MFILLIMYLIWEGKAVSCYLLPPIKASVATVLTFNPWKF

SEQ ID NO: 4329 - protein, 181 aa, Homo sapiens
MNRRVCVLMLLVAWIGGFLHSLVQFLFIYQLPFCGPNVIDNFLCDLYPLLKLACTNTYVTGLSMIANGGAICTVTFFPLLLSYGVILPSLKTQSLEGKCKAFYTCASHITVITLFFVPCIFLFARPNSTFPIDKSMTVVLTCITPMLKPLIYALRNAEMKSAMRKLWSEKVSLAGKGLYPS

SEQ ID NO: 4330 - protein, 31 aa, Homo sapiens
MGWGLLCTFLYLAPQKTEGAAADLASTSPAP

SEQ ID NO: 4331 - protein, 30 aa, Homo sapiens
MLNLCITLLFLSVTLTNIHSNHSSYSNYLL

SEQ ID NO: 4332 - protein, 39 aa, Homo sapiens
MHPLLFYLVKLFLEARDTTCIIMSCPTPGIQEALKITCS

SEQ ID NO: 4333 - protein, 26 aa, Homo sapiens
MATMFTKITTSIVFGLSLALPISTRA

SEQ ID NO: 4334 - protein, 78 aa, Homo sapiens
MDSDFPTTKIMMLLASIPALLQGVVNILYRHRLGLSNFLPQCSLNSLKGSNVGPNLHTEKLRQKKSKQFVPCHQITYK

SEQ ID NO: 4335 - protein, 6 aa, Homo sapiens
MFIFFF

SEQ ID NO: 4336 - protein, 39 aa, Homo sapiens
MKSLLLAIAFQKLLGSPHPILQPHLFASLHPSPLIVQGS

SEQ ID NO: 4337 - protein, 32 aa, Homo sapiens
  SITE (6): Xaa equals any of the naturally occurring L-amino acids
PPPAVXSLPPLLLPSLLPPQGSGAASPSPTPW

SEQ ID NO: 4338 - protein, 28 aa, Homo sapiens
MSPNCHLLETRPSASLLLLGIPLLRGAS

SEQ ID NO: 4339 - protein, 33 aa, Homo sapiens
MLNVFAVPVYVLLIIFWERRAKKYTAENRQFML

SEQ ID NO: 4340 - protein, 38 aa, Homo sapiens
MNLKILTCFLVSYTFPSSRSAEPIMLKIIIIKKSGWRS

SEQ ID NO: 4341 - protein, 39 aa, Homo sapiens; identical to SEQ ID NO: 4307

SEQ ID NO: 4342 - protein, 62 aa, Homo sapiens
MFLQVSYLWTDVSAGQLLMWLCRWPTTVAGYFSQGTCLLEMYPLSSPFSSFCQRIAGVVEES

SEQ ID NO: 4343 - protein, 33 aa, Homo sapiens
MTAYLLVLQALTRLTAQTHHTGEHERVNESFII

SEQ ID NO: 4344 - protein, 29 aa, Homo sapiens
MPRPGSHLSWWRLWLAPRPPALLLRDSRT

SEQ ID NO: 4345 - protein, 9 aa, Homo sapiens
MVIIIVFNQ

SEQ ID NO: 4346 - protein, 37 aa, Homo sapiens
MCCYEALASWVMHFLVFALPRSLSHVSFSLGFYPTLK

SEQ ID NO: 4347 - protein, 13 aa, Homo sapiens
MLIFYILLCMVKG

SEQ ID NO: 4348 - protein, 17 aa, Homo sapiens
LFCPLLVIFQNFCSGDN

SEQ ID NO: 4349 - protein, 10 aa, Homo sapiens
MGVGLLNRII

SEQ ID NO: 4350 - protein, 66 aa, Homo sapiens
  SITE (36): Xaa equals any of the naturally occurring L-amino acids
  SITE (58): Xaa equals any of the naturally occurring L-amino acids
  SITE (63): Xaa equals any of the naturally occurring L-amino acids
MQLSSAVIAFSCCPVFMWSLVNSTRILSLLAKVLPXAERESPSKLTSVTPPSLTPHLXRATNXLFD

SEQ ID NO: 4351 - protein, 62 aa, Homo sapiens
MSGSQVVALFLLCVRISKVISVYCLESGLFCFTPTFTEKNFFSQATKHLVSGVKEDFIILEL

SEQ ID NO: 4352 - protein, 39 aa, Homo sapiens
MLAVFCFLSPNSLLFFIFWSRVYRFPPNRRSRPGIFLRG

SEQ ID NO: 4353 - protein, 34 aa, Homo sapiens
MLIIMAQLLQWFSCWSFLPLAALNCEWYRVTELT

SEQ ID NO: 4354 - protein, 63 aa, Homo sapiens
MRLPLRHSASLEASVSRVLHTPSGRDGPGTPCNPSGQMCHCPMKIKGHHSSSRRQNLNSNLSQ

SEQ ID NO: 4355 - protein, 36 aa, Homo sapiens
MLSCLRHWTWNLLVLRPLASMVTPAPHLVRRPSVSD

SEQ ID NO: 4356 - protein, 55 aa, Homo sapiens
MRENFTAKVWLAIPFLALGFLCVSEPRYTDFRSKESSSLPLGKTGRGMVLYQSHT

SEQ ID NO: 4357 - protein, 33 aa, Homo sapiens
MRVWRLAWFAWAWVGHGTSCTGVQSTLHIVTPS

SEQ ID NO: 4358 - protein, 46 aa, Homo sapiens
MKISFTFFILLLKNVLAARKFKMIDVAHIMFLCDRLLWIKSRQTMA

SEQ ID NO: 4359 - protein, 31 aa, Homo sapiens
MRLRDRRAGEGQRQLLLLRLLLRTSFWGVVF

SEQ ID NO: 4360 - protein, 66 aa, Homo sapiens
MLGVSASGSLQLLQSQRGLERGPAPRQPADTSSSMCESLVFTPTAPFSGGHCPKARHGRLTSPFYG

SEQ ID NO: 4361 - protein, 47 aa, Homo sapiens
MCGRQPMRLWVSFAVHCTRPVKAAPRNPTLLLCRLPWPESCHPTCRQ

SEQ ID NO: 4362 - protein, 49 aa, Homo sapiens
MTWPFFYSTFRVWALAPSVSALLTQCVKMKTEPSFPSSSVPQTFSPTQL

SEQ ID NO: 4363 - protein, 358 aa, Homo sapiens
MGSAYAIITALLTKFTKLCEFPMLETGLFFLLSWSAFLSAEAAGLTGIVAVLFCGVTQAHYTYNNLSSDSKIRTKQLFEFMNFLAENVIFCYMGLALFTFQNHIFNALFILGAFLAIFVARACNIYPLSFLLNLGRKQKIPWNFQHMMMFSGLRGAIAFALAIRNTESQPKQMMFTTTLLLVFFTVWVFGGGTTPMLTWLQIRVGVDLDENLKEDPSSQHQEANNLDKNMTKAESARLFRMWYSFDHKYLKPILTHSGPPLTTTLPEWCGPISRLLTSPQAYGEQLKEDDVECIVNQDELAINYQEQASSPCSPPARLGLDQKASPQTPGKENIYEGDLGLGGYELKLEQTLGQSQLN

SEQ ID NO: 4364 - protein, 37 aa, Homo sapiens; identical to SEQ ID NO: 3958

SEQ ID NO: 4365 - protein, 97 aa, Homo sapiens
MSISRLKIAKRFLQDIPQDQFLYIHLVLGGTSMGFHVLWLLVEFTQWRTLARGRKRGGSSLTGLNFTFCSPWMRAVIITIPGNSQRKRKGKRFGQDS

SEQ ID NO: 4366 - protein, 91 aa, Homo sapiens
MGTWIEMSSLWPCTWCTEPWRRSPCPPPCPRPSSHPPRERRLCSLAPSPSCLPAPHQKTASAPRRPTAASAASTAQGACPPSTASSKHSQQ

SEQ ID NO: 4367 - protein, 38 aa, Homo sapiens
MRVVLPSWLGSSGCWDILSLLCFNIFTALFLNGPVTRD

SEQ ID NO: 4368 - protein, 58 aa, Homo sapiens
MRLPIRTQNYLQTCLGLGLASFLSSSGGVWQHSFFILILPGCGQHWSSVSPDGPPLCP

SEQ ID NO: 4369 - protein, 16 aa, Homo sapiens
MGDPPRASLDNALLAP

SEQ ID NO: 4370 - protein, 37 aa, Homo sapiens
MCVSFLKRIKALIWFFSFKKLLKAAQIGNTKKYGHES

SEQ ID NO: 4371 - protein, 80 aa, Homo sapiens
MNYYFFFKVTTLDFAIFQVLLVICQKAIMLITQSTLPPDGIGPQNSYLGELPSQNRMTFPHLLILLSFALSSSMENKNFS

SEQ ID NO: 4372 - protein, 26 aa, Homo sapiens
  SITE (16): Xaa equals any of the naturally occurring L-amino acids
MRSQDLTGFAVCWGQXIILLILDSQP

SEQ ID NO: 4373 - protein, 29 aa, Homo sapiens
MSGVPLRTGGWPAGLRGVSFHAGLPAAGQ

SEQ ID NO: 4374 - protein, 71 aa, Homo sapiens
MTEERGVWAVLLLRSLAPSLSCLTVCCSSWLLWCPLNSCVTCPGLSLSLLRQGAAGCFLTCTGMPQSTWPG

SEQ ID NO: 4375 - protein, 37 aa, Homo sapiens
MFYLMWWQFIQGVMFSQHLDTQGNFLFWGDSAPSGWR

SEQ ID NO: 4376 - protein, 67 aa, Homo sapiens
EQVEESLQDEDDNDVYILTKVSDILHSIFSSYKEKVLPWFEQLLPLIVNLICPHRPWARQTMGVMHL

SEQ ID NO: 4377 - protein, 30 aa, Homo sapiens
MHPHFFCLKIFTKVILLQVFYTGFICGQCR

SEQ ID NO: 4378 - protein, 124 aa, Homo sapiens
MHPAAFPLPVVVAAVLWGAAPTRGLIRATSDHNASMDFADLPALFGATLSQEGLQGFLVEAHPDNACSPIAPPPPAPVNGSVFIALLRRFDCNFDLKVLNAQKAGYGAAVVHNVNSNELLNMVL

SEQ ID NO: 4379 - protein, 6 aa, Homo sapiens
FTTGDF

SEQ ID NO: 4380 - protein, 33 aa, Homo sapiens
  SITE (13): Xaa equals any of the naturally occurring L-amino acids
  SITE (16): Xaa equals any of the naturally occurring L-amino acids
  SITE (30): Xaa equals any of the naturally occurring L-amino acids
SLGGWGGGQEGKXGGXKLGDSLRDFCFKPXVFL

SEQ ID NO: 4381 - protein, 15 aa, Homo sapiens
MPWWSRWVLWESCAS

SEQ ID NO: 4382 - protein, 42 aa, Homo sapiens
MCSLVVALYLIPPFHTDQLLPGSSPLLSVVKSVTNFWRSFNL

SEQ ID NO: 4383 - protein, 34 aa, Homo sapiens
MNIECFLILFLFSHQIVICHSSPLLFVLHFLLIV

SEQ ID NO: 4384 - protein, 92 aa, Homo sapiens [sequence omitted]

SEQ ID NO: 4385 - protein, 3 aa, Homo sapiens
MSI

SEQ ID NO: 4386 - protein, 13 aa, Homo sapiens
MKQKKIILLFNMA

SEQ ID NO: 4387 - protein, 33 aa, Homo sapiens
CVLSQFFHFPACFLMSAFGPIIVSQHHQHVDKK

SEQ ID NO: 4388 - protein, 14 aa, Homo sapiens
MEAIFTFTVLNGKI

SEQ ID NO: 4389 - protein, 5 aa, Homo sapiens
MWLAC

SEQ ID NO: 4390 - protein, 11 aa, Homo sapiens
MHVLPPHFCSA

SEQ ID NO: 4391 - protein, 10 aa, Homo sapiens
DRYFVLIQMQ

SEQ ID NO: 4392 - protein, 36 aa, Homo sapiens
MCHPLTGESGGVVGVNVLKIYVSCILFESAVFSQQL

SEQ ID NO: 4393 - protein, 47 aa, Homo sapiens
MFWMSLWVSFIIMLHNLYTGYHFRVLKGDTSYKEKDACFHFLKKKKK

SEQ ID NO: 4394 - protein, 33 aa, Homo sapiens
MCFCLKSINIWFHLHSNTWIGFILFLLAFWIQN

SEQ ID NO: 4395 - protein, 57 aa, Homo sapiens
MDSSAAVLGVLLKTLLLLWSCLLFPSQLVKPPSGATVFCNLQWAWRERASPALHACS

SEQ ID NO: 4396 - protein, 17 aa, Homo sapiens
MSYILDTFSLLLFLLYF

SEQ ID NO: 4397 - protein, 39 aa, Homo sapiens
EGLGASWLWHLTSWASTSCSQDPCGDERGAWKGLRPSTA

SEQ ID NO: 4398 - protein, 35 aa, Homo sapiens
MAQVLSWCAKETWLLLGIALRSSLSCPQPNWWAPC

SEQ ID NO: 4399 - protein, 28 aa, Homo sapiens
GNPKKLWRRMVLLLTRQTYLPLALLCGK

SEQ ID NO: 4400 - protein, 19 aa, Homo sapiens
MVTVVQTLLLLTQNRSGAM

SEQ ID NO: 4401 - protein, 72 aa, Homo sapiens
MPLGRLLPRLLFFLIVTYRLGVLGTESSQLLQYEETVHLFCHLDLFATHLLYFLYWKIFLLVLSYEFLFCFN

SEQ ID NO: 4402 - protein, 26 aa, Homo sapiens
LWWLYIVSVAIIQLCCSSANADIDNM

SEQ ID NO: 4403 - protein, 24 aa, Homo sapiens
VMEVLMTMVAIIITAMGMMALMTE

SEQ ID NO: 4404 - protein, 44 aa, Homo sapiens
MSCRCSGFLRRHLHSFLAFFAGEGFGPLSLREHRQRKPGRSRLQ

SEQ ID NO: 4405 - protein, 23 aa, Homo sapiens
MESGHCRLGKWSSLWWCCSCGLL

SEQ ID NO: 4406 - protein, 37 aa, Homo sapiens [sequence omitted]

SEQ ID NO: 4407 - protein, 33 aa, Homo sapiens
  SITE (3): Xaa equals any of the naturally occurring L-amino acids
  SITE (5): Xaa equals any of the naturally occurring L-amino acids
  SITE (10): Xaa equals any of the naturally occurring L-amino acids
MSXSXGTSVXFLRTRFSLCICGRNTPEVMLCYS

SEQ ID NO: 4408 - protein, 30 aa, Homo sapiens
MFWCEFTASFLLFLNAISGLHINSITHPWE

SEQ ID NO: 4409 - protein, 17 aa, Homo sapiens
MSSLLLIIILALSLAYE

SEQ ID NO: 4410 - protein, 6 aa, Homo sapiens
LPGPCL

SEQ ID NO: 4411 - protein, 66 aa, Homo sapiens
MTLVGKTRLSRPGQGAFGCFCCPWLCSALWEAPGRPNVQDHRGESELDRKRTTACVGPLPTIKIAP

SEQ ID NO: 4412 - protein, 180 aa, Homo sapiens
MCYGRCARCIGHSLVWLAILCIVANILLYFPNGETKYASENHLSRFVWFFSGIVGGGLLVFLPAFVFIGLEKDDCCGCCGHEDCGKRCAMFSSVLPAAIGVAGSGYCVSWQPWAWRKDHYVLILRASGTTPLPTPMDSTFWIPPHGPSALNPHMLLNGISLCFLSFWPSVELNSSCVSFK

SEQ ID NO: 4413 - protein, 41 aa, Homo sapiens
MCLIQGMYLITHFCTCTLVWFCNLQFSNQSFIVTFSLPVSL

SEQ ID NO: 4414 - protein, 34 aa, Homo sapiens
MSGLCESRREVFQIMHMDVELLRLLELWMAVLFR

SEQ ID NO: 4415 - protein, 152 aa, Homo sapiens
MEFLGPCGLRLVESRLLVPYWLLVLLAALNALLQWLLRPLFLYAPLLNPYTLAVASTTFTVSTDKAHATSATYPCSLGRTAGPAPSAGCRPWRAQPGDVELGPGARCVARPSIQVQGPLALGAEGLVLHQLACLAAPRASKPRAASLHPHAS

SEQ ID NO: 4416 - protein, 67 aa, Homo sapiens
MTFLITIFRQYLQWSCAPLLLPVLPQKGTSSGDSTQNLFILSEESIIGICVYPDVESYLKCTREIPI

SEQ ID NO: 4417 - protein, 46 aa, Homo sapiens
MKGHQSVFWDFFFFFVFGGREKETRQKRNCRMRKERGEKSSRRNLK

SEQ ID NO: 4418 - protein, 29 aa, Homo sapiens
  SITE (17): Xaa equals any of the naturally occurring L-amino acids
MMNTLSGSGGCWSHCAXHHWHCHPHEWQV

SEQ ID NO: 4419 - protein, 51 aa, Homo sapiens
  SITE (7): Xaa equals any of the naturally occurring L-amino acids
  SITE (9): Xaa equals any of the naturally occurring L-amino acids
  SITE (13): Xaa equals any of the naturally occurring L-amino acids
MIIYYCXLXSSSXFYATVKLMNRVVFGNGNTFVTDLYTVYSIGKMGGGFLI

SEQ ID NO: 4420 - protein, 114 aa, Homo sapiens
LGRLLLRGPRCLLSPATPTLVPPVRGMKKGFRAAFRFQKELERWRLLRCPPPPVRRSEKPNWDYHAEIQAFGHRLQETFSLDLLKTAFVNTCYIKSEEANAKPWNRERSCSSES

SEQ ID NO: 4421 - protein, 37 aa, Homo sapiens
MPLRSFQQVILIAVGVFLSLAALAGGCYFLVLRYKGW

SEQ ID NO: 4422 - protein, 37 aa, Homo sapiens
MGLSAQQGACFLLSLCLPLCLLVISLCQINKFFKNKN

SEQ ID NO: 4423 - protein, 206 aa, Homo sapiens
MTAGWLVIAVGLVRAYLAKGSYHSLYYSIEKPLKFFQTGALLEILHCAIGIVPSSVVLTSFQVMSRVFLIWAVTHSVKEVQSEDSVLLFVIAWTITEIIRYSFYTFSLLNHLPYLIKWARYTLFIVLYPMGVSGELLTIYAALPFVRQAGLYSISLPNKYNFSFDYYAFLILIMISYIPIFPQLYFHMIHQRRKILSHTEEHKKFE

SEQ ID NO: 4424 - protein, 35 aa, Homo sapiens
MSGTTSGLQLCLVIMMNCVCVTLKDSVCQVKKNDV

SEQ ID NO: 4425 - protein, 25 aa, Homo sapiens
MELSRLWHVGFVFLFSFDYVRAISL

SEQ ID NO: 4426 - protein, 37 aa, Homo sapiens
MFCVSLCVCVCVCVRVLTWCSDAQHHNRPPFSSTVGE

SEQ ID NO: 4427 - protein, 26 aa, Homo sapiens
MLPECLLCCVVVGMLLHLSVPQFPQL

SEQ ID NO: 4428 - protein, 211 aa, Homo sapiens
MANSGLQLLGFSMALLGWVGLVACTAIPQWQMSSYAGDNIITAQAMYKGLWMDCVTQSTGMMSCKMYDSVLALSAALQATRALMVVSLVLGFLAMFVATMGMKCTRCGGDDKVKKARIAMGGGIIFIVAGLAALVACSWYGHQIVTDFYNPLIPTNIKYEFGPAIFIGWAGSALVILGGALLSCSCPGNESKAGYRAPRSYPKSNSSKEYV

SEQ ID NO: 4429 - protein, 19 aa, Homo sapiens
MSFTAHSGWWVSLLFWVLD

SEQ ID NO: 4430 - protein, 63 aa, Homo sapiens [sequence omitted]

SEQ ID NO: 4431 - protein, 27 aa, Homo sapiens
GPGQRPPGDAAAVQSRPRPGDAGGAGE

SEQ ID NO: 4432 - protein, 216 aa, Homo sapiens
MRLSALLALASKVTLPPHYRYGMSPPGSVADKRKNPPWIRRRPVVVEPISDEDWYLFCGDTVEILEGKDAGKQGKVVQVIRQRNWVVVGGLNTHYRYIGKTMDYRGTMIPSEAPLLHRQVKLVDPMDRKPTEIEWRFTEAGERVRVSTRSGRIIPKPEFPRADGIVPETWIDGPKDTSVEDALERTYVPCLKTLQEEVMEAMGIKETRKYKKVYWY

SEQ ID NO: 4433 - protein, 14 aa, Homo sapiens
MCAAFLSFGLIHLI

SEQ ID NO: 4434 - protein, 51 aa, Homo sapiens
MRLGPNRMRGRVLHAWLPLLLLLLLLQCTHHSSQLLLLLLAYSLRNLSLVL

SEQ ID NO: 4435 - protein, 21 aa, Homo sapiens
MKPKFPAFAGFPIYFFVDFAS

SEQ ID NO: 4436 - protein, 52 aa, Homo sapiens
MCACVCMHVCACAHVCVRRGCFPMAQSLWGSPKLQGQPWGAPSLESEDHSCL

SEQ ID NO: 4437 - protein, 38 aa, Homo sapiens
MFSKKLFYIQSSLFSLLYFYFVEAFSPQIIYYIIFGLI

SEQ ID NO: 4438 - protein, 23 aa, Homo sapiens
MSLGPSPMCILWLLDPLQKSNTK

SEQ ID NO: 4439 - protein, 33 aa, Homo sapiens
MFLAMLAIISCAVCFSCAEAKTYWAYVPKPPAV

SEQ ID NO: 4440 - protein, 31 aa, Homo sapiens
MALFRIFLVAWFVAFLSVRKLNPILRALEEL

SEQ ID NO: 4441 - protein, 43 aa, Homo sapiens
SCHLMSGMYPPTPSLQATRNTATHNLMSPGEHHCLVSSGIPRH

SEQ ID NO: 4442 - protein, 76 aa, Homo sapiens [sequence omitted]

SEQ ID NO: 4443 - protein, 44 aa, Homo sapiens
MTSACLAWTAVSLPPAVTHRAPLCLPPVPCRLVRRPGCAASDLP

SEQ ID NO: 4444 - protein, 64 aa, Homo sapiens
PCFGPVLEWLAAGPGCPPSARGRRLWHRSPASEATPRLLPTVGAPRGPALRGAAAKKPQSGGAG

SEQ ID NO: 4445 - protein, 59 aa, Homo sapiens
MLTQPLLLSLLLYCACRLVLLPVSLKTQPEVGWLCVHNFNFTCGAESLCCISLCKSTIC

SEQ ID NO: 4446 - protein, 50 aa, Homo sapiens [sequence omitted]

SEQ ID NO: 4447 - protein, 66 aa, Homo sapiens
FLLKHGHPPLMATAEPLGKEPFGIQNSQVAAQCGIWSMTTKAFSQHLLKESGVFYTLLMGTVHEHI

SEQ ID NO: 4448 - protein, 67 aa, Homo sapiens
MSSVTVEIFVWSACCISSTSFHPFLAFIRLKFIIIWMSFRIGTVGVRSYCHLLTKDFAGGIMCGCYL

SEQ ID NO: 4449 - protein, 85 aa, Homo sapiens
MEKLVLVLANLFGRKYIPAKFQNANLSFSQSKVILAELPEDFKAALYEYNLAVMKDFASFLLIASKSVNMKKEHQLPLVKNQIHR

SEQ ID NO: 4450 - protein, 15 aa, Homo sapiens
MKLEVAPVFCWSCCA

SEQ ID NO: 4451 - protein, 8 aa, Homo sapiens
YPAFIGNF

SEQ ID NO: 4452 - protein, 26 aa, Homo sapiens
MIRYLLMCPLYIQLLFLTLLFVLSLP

SEQ ID NO: 4453 - protein, 42 aa, Homo sapiens
ITGVSHRTWPSVVFLIIWKKIKKKKKKKKKKKKKKKKKKKKK

SEQ ID NO: 4454 - protein, 23 aa, Homo sapiens
LVHMAYVTFGKSLAFSESRFPRL

SEQ ID NO: 4455 - protein, 12 aa, Homo sapiens
YLVFLFQYSNIL

SEQ ID NO: 4456 - protein, 32 aa, Homo sapiens
MYSAFHNCLCLALHVLTFLYDVGSSVNLQRKI

SEQ ID NO: 4457 - protein, 14 aa, Homo sapiens
MLLMFFTFWTRERL

SEQ ID NO: 4458 - protein, 70 aa, Homo sapiens
MVQKWRLLLNLLTLPHRSKLLFKMCLTPYFVFRVLDSYLKLGSFGSCLIFCSALRLSLPSTYSGFVCQFF

SEQ ID NO: 4459 - protein, 53 aa, Homo sapiens
MELTIGTFRIMMINWLVFSQHCQLFLRSLLLPLLLCTHHVCMECARRGRGSGR

SEQ ID NO: 4460 - protein, 18 aa, Homo sapiens
  SITE (9): Xaa equals any of the naturally occurring L-amino acids
MILLLLRLXCILKQLAFF

SEQ ID NO: 4461 - protein, 61 aa, Homo sapiens
MLCAMLACGGLCNALTCMEEARLRAEMWPEPSLYRSFNLELSRCHFLPLCLLVVSDIYSKQ

SEQ ID NO: 4462 - protein, 28 aa, Homo sapiens
MLLDAPAIIFLLVAFPNYFHKNYFSYYM

SEQ ID NO: 4463 - protein, 26 aa, Homo sapiens
MAYFYLLGVLQVLPSLHHYMSSEVLF

SEQ ID NO: 4464 - protein, 12 aa, Homo sapiens
MLCLFLLASITI

SEQ ID NO: 4465 - protein, 37 aa, Homo sapiens
MKILLLCLCLILLRVRSCRRKAARAALGMEAADAVTD

SEQ ID NO: 4466 - protein, 28 aa, Homo sapiens
MILMMVIRFLLVPLLIPTTDLHATANSS

SEQ ID NO: 4467 - protein, 16 aa, Homo sapiens
MYFFCFCGFACSGYFL

SEQ ID NO: 4468 - protein, 32 aa, Homo sapiens
MRSCRLARGQLELCWLLIIILKGSEICDGIRF

SEQ ID NO: 4469 - protein, 29 aa, Homo sapiens
MHMEYLLVLLNLTSHPECIDRKSMSYLKL

SEQ ID NO: 4470 - protein, 32 aa, Homo sapiens
MHLIWLCVTGLFISATEIHAVCTYNRYIVSAY

SEQ ID NO: 4471 - protein, 91 aa, Homo sapiens
MVQTALAWWPSSHQPTSGNVSVYCWPYSVTNPAAPCISWLPTPTSPWTSPVEPGSDPDSVPAFQEKLSHFLQASHRSLPRMWAACSSNSTS

SEQ ID NO: 4472 - protein, 40 aa, Homo sapiens
MFVTGKIVTWVNFISSNSFLVLILSMLPKSSLISMNHCFM

SEQ ID NO: 4473 - protein, 44 aa, Homo sapiens
MFLTVFLFVILFMYAFIFVITFFFTLDLLLSFLSPSFLGGRQGH

SEQ ID NO: 4474 - protein, 21 aa, Homo sapiens
MNVRYWDRDPNLKQQPVPVVT

SEQ ID NO: 4475 - protein, 46 aa, Homo sapiens
NLFVSVYDSFFSLVQSSASPALSSTLQSPFRESISRNETRQSCSAP

SEQ ID NO: 4476 - protein, 36 aa, Homo sapiens
MNFYVTLYRVFPLAFSLSLTLSLNFLRLHNSIMKFT

SEQ ID NO: 4477 - protein, 47 aa, Homo sapiens
MKYQSEWKDVILLLHVPSPSFHGGTALPILSFVYAWPILRSSGDKPE

SEQ ID NO: 4478 - protein, 37 aa, Homo sapiens
LGLWALLAGLTLPVRAEPGWQEGRTVYLLLRAPKALL

SEQ ID NO: 4479 - protein, 31 aa, Homo sapiens
MPACFVSFSVFFCATVPCAGSMPASWHHLQC

SEQ ID NO: 4480 - protein, 38 aa, Homo sapiens
MIGTLHLSLSVILASVLFAYQNAVCFCQRITIKPLRPN

SEQ ID NO: 4481 - protein, 310 aa, Homo sapiens
  SITE (38): Xaa equals any of the naturally occurring L-amino acids
  SITE (40): Xaa equals any of the naturally occurring L-amino acids
  SITE (127): Xaa equals any of the naturally occurring L-amino acids
MVYKTLFALCILTAGWRVQSLPTSAPLSVSLPTNIVPXTXIWTSSPQNTDADTASPSNGTHNNSVLPVTASAPTSLLPKNISIESREEEITSPGSNWEGTNTDPSPSGFSSTSGGVHLTTTLEEHSXGTPEAGVAATLSQSAAEPPTLISPQAPASSPSSLSTSPPEVFSASVTTNHSSTVTSTQPTGAPTAPESPTEESSSDHTPTSHATAEPVPQEKTPPTTVSGKVMCELIDMETTTTFPRVIMQEVEHALSSGSIAAITVTVIAVVLLVFGVAAYLKIRHSSYGRLLDDHDYGSWGNYNNPLYDDS

SEQ ID NO: 4482 - protein, 25 aa, Homo sapiens
MVVFVFLPLLWLLQLPLSGTRRTIL

SEQ ID NO: 4483 - protein, 29 aa, Homo sapiens
MLCVLSSFLLIFLFLICVQFCAALLALLL

SEQ ID NO: 4484 - protein, 31 aa, Homo sapiens
EWTLRYFRCVLFSIAAVFVTVLVMVHVHILL

SEQ ID NO: 4485 - protein, 31 aa, Homo sapiens; identical to SEQ ID NO: 4484

SEQ ID NO: 4486 - protein, 36 aa, Homo sapiens
MQLSLPKIFFYLCFCLQLLPLEVSLSFKFREPCLWH

SEQ ID NO: 4487 - protein, 31 aa, Homo sapiens
MVHPLVALWPWASFFNFLIYTVNSTYIIGLV

SEQ ID NO: 4488 - protein, 72 aa, Homo sapiens
MLLSIAIWVAWITLLMLPDFDRSGMTPSSAPPWLPMAGCSCWLMLVPSFGCSQSNETPWIILLRMLSVNLNS

SEQ ID NO: 4489 - protein, 58 aa, Homo sapiens
MSHRAQPTFTSKVYVMVVIFSLLEYIKWLIWGGKLILNINGGEKGTVFTLKCKSEHTK

SEQ ID NO: 4490 - protein, 49 aa, Homo sapiens
MTTCKELCPWNFVWFFFVFDLLGRMSNIYKSRLNSEMNIQISIIQRLLL

SEQ ID NO: 4491 - protein, 35 aa, Homo sapiens
MITCSHGQIFFSPCSSWPETRETRVKSYLPLPVMP

SEQ ID NO: 4492 - protein, 36 aa, Homo sapiens
MALTLPSQWVFLVFILDDLYAHLSLSRNFCWKHLLF

SEQ ID NO: 4493 - protein, 34 aa, Homo sapiens
MIWNRSLLLAIYFLCGLRQVTYFSESPFLNLFVN

SEQ ID NO: 4494 - protein, 18 aa, Homo sapiens
MFNPLSPHPDLFLLSHLI

SEQ ID NO: 4495 - protein, 10 aa, Homo sapiens
LEFFFFFFVL

SEQ ID NO: 4496 - protein, 31 aa, Homo sapiens
MFLDFCWQACSSICMAPSPHLHFSAQMLPSP

SEQ ID NO: 4497 - protein, 9 aa, Homo sapiens
NLQFSMTQL

SEQ ID NO: 4498 - protein, 3 aa, Homo sapiens
MSV

SEQ ID NO: 4499 - protein, 26 aa, Homo sapiens
MLAIITFLKAHLGTHNMGQDQRVETS

SEQ ID NO: 4500 - protein, 6 aa, Homo sapiens
MCFLCV

SEQ ID NO: 4501 - protein, 25 aa, Homo sapiens
MAISLVTLLFPLLSSQFNLPTEYQA

SEQ ID NO: 4502 - protein, 67 aa, Homo sapiens
PPNLCLTFLLPFVLLRLSVLGNTVFLRVCGGSYPSSFRTRDLLDWSGPQTDPCSLTTGYPGTCVPSL

SEQ ID NO: 4503 - protein, 38 aa, Homo sapiens
MLVSPRRVYFLDLTCFVAFLLLVQCSVLTVCPQVTEEE

SEQ ID NO: 4504 - protein, 34 aa, Homo sapiens
MNITSHQPPHHNFMLLLDIIFVLAWILMLLTNIS

SEQ ID NO: 4505 - protein, 61 aa, Homo sapiens [sequence omitted]

SEQ ID NO: 4506 - protein, 24 aa, Homo sapiens
MWLWTSPWRSGLCWILLRGTSTEM

SEQ ID NO: 4507 - protein, 87 aa, Homo sapiens
MYIAHHLLTLGHQFRLRLAPILCDGTATFVDLVPGFRRLGTECFLAQMRAQKVNFWKDYQVLGTFQIWTMKRIILQQVKQSGRYCTN

SEQ ID NO: 4508 - protein, 31 aa, Homo sapiens
MFRPWHGLLPGSRLVPWGLVRLVGAPNPCAH

SEQ ID NO: 4509 - protein, 12 aa, Homo sapiens
MFIACLLQSLCI

SEQ ID NO: 4510 - protein, 28 aa, Homo sapiens
MVFQTFYCISLVLFAHEVSLLCVCVYVY

SEQ ID NO: 4511 - protein, 18 aa, Homo sapiens
MLCFSFLCLSLLLVSAQG

SEQ ID NO: 4512 - protein, 18 aa, Homo sapiens
MLCFSFLCLSLLLVSAQG

SEQ ID NO: 4513 - protein, 23 aa, Homo sapiens
MSSICPIFVLLQMISFMTLIALE

SEQ ID NO: 4514 - protein, 67 aa, Homo sapiens
MHTYILVCICIHIYLCVYAYIYTCMCMYICIHIYLYVYVHMHTYIYTHTYTHAYFFSQLGKGRICRL

SEQ ID NO: 4515 - protein, 112 aa, Homo sapiens
MALGVPISVYLLFNAMTALTEEAAVTVTPPITAQQGNWTVNKTEADNIEGPIALKFSHLCLEDHNSYCINGACAFHHELEKAICRCFTGYTGERCLKLKSPYNVCSGERRPL

SEQ ID NO: 4516 - protein, 34 aa, Homo sapiens
VAFFTMPTVVLVSMFDFFFSGISSSFVNIRLQFF

SEQ ID NO: 4517 - protein, 36 aa, Homo sapiens [sequence omitted]

SEQ ID NO: 4518 - protein, 34 aa, Homo sapiens
MNAVTLPILFTFVSPVPIVVHGAEWPFNKYLLNK

SEQ ID NO: 4519 - protein, 45 aa, Homo sapiens
MQEILPPGSHTGFSGLHLPFIGFTFTTERYVWIYHSPGRHFPCGR

SEQ ID NO: 4520 - protein, 65 aa, Homo sapiens
MIWLSVCLLLVYKNACDFCTLILYPETLLKLLISLRRFWAETMGFSRYTIMSSANRDNLTSSFPN

SEQ ID NO: 4521 - protein, 37 aa, Homo sapiens
MKSCQDSDSPFPVILLMISPNTLQATVTTKNTVSAGL

SEQ ID NO: 4522 - protein, 43 aa, Homo sapiens
MYLFRWFFVVTYFIVLISCFCITVPIANKSLGQFAFLKKKKKK

SEQ ID NO: 4523 - protein, 11 aa, Homo sapiens
MGLLDWLLGNS

SEQ ID NO: 4524 - protein, 32 aa, Homo sapiens
MGNLLLLQLMLLKLLTVIPFPWLFFGEKIICS

SEQ ID NO: 4525 - protein, 3 aa, Homo sapiens
MFP

SEQ ID NO: 4526 - protein, 25 aa, Homo sapiens
GRHTWSLLLAALACLVPLLHWNIRR

SEQ ID NO: 4527 - protein, 10 aa, Homo sapiens
MQAGWLGQVG

SEQ ID NO: 4528 - protein, 49 aa, Homo sapiens
MLTLCVCVCVCVCTRACACLLHGILFCEIPLQSCQNLPPCPSHTVGSAL

SEQ ID NO: 4529 - protein, 54 aa, Homo sapiens
MLQYKALSMSGKSLLQKRLQITLTCAWLCWMVYSVSFFFMGETAHRAHQQVLQN

SEQ ID NO: 4530 - protein, 39 aa, Homo sapiens
MLGDSSLALVWLGLCLPPWGKPGTPLLPALPRPLSLGGW

SEQ ID NO: 4531 - protein, 31 aa, Homo sapiens
DAWGWGELLLIVKNSLGASDLMPSILSGFSL

SEQ ID NO: 4532 - protein, 31 aa, Homo sapiens
MYNLLYFPLCILLWVFCGSQDSSLRFISHES

SEQ ID NO: 4533 - protein, 38 aa, Homo sapiens
MPSARHCIAIISFNLLLILWVGIFILISETRKLRVREN

SEQ ID NO: 4534 - protein, 40 aa, Homo sapiens
MSHFHSQNQMYLFSAFLWELLLSAGILKPNIHFQFFQLLS

SEQ ID NO: 4535 - protein, 18 aa, Homo sapiens
MQKVTTLRHIENCLAGKC

SEQ ID NO: 4536 - protein, 88 aa, Homo sapiens [sequence omitted]

SEQ ID NO: 4537 - protein, 12 aa, Homo sapiens
HTFLWFLYVCSN

SEQ ID NO: 4538 - protein, 55 aa, Homo sapiens
MSGWQAWYLARALAVGVLMGCTDHTAYVLAIPSCSPARSLKHTSLAFLFFCSFFN

SEQ ID NO: 4539 - protein, 80 aa, Homo sapiens
MGRMAILACSLPTTWSSLSEAEGTSCPSPLRHGFLIAGRGGLGVDIQHSSRNRTPSEDEASGLPPAWQTQPVTPNAAMAW

SEQ ID NO: 4540 - protein, 24 aa, Homo sapiens
MVVLLEIFLLLAYVLWNYTCITND

SEQ ID NO: 4541 - protein, 31 aa, Homo sapiens
MLATQHTLEHWLFTLLMVWLPSIKSYHTANR

SEQ ID NO: 4542 - protein, 39 aa, Homo sapiens
MHLLFLFVPMYQCRVALFSSTVFIAAFLSINLSHCIFYK

SEQ ID NO: 4543 - protein, 40 aa, Homo sapiens
RIRARCLAVAACSRGRVGLSRGWCCRCSRCRQSGRRHGFW

SEQ ID NO: 4544 - protein, 44 aa, Homo sapiens
MAGLSLPTLFFFNMILDCLGPWENSIYILKSVFTFLQIKRPLGF

SEQ ID NO: 4545 - protein, 2 aa, Homo sapiens
ML

SEQ ID NO: 4546 - protein, 31 aa, Homo sapiens
MFLYVSVVFLILLLNSSQLCKYTAIYLYTYF

SEQ ID NO: 4547 - protein, 31 aa, Homo sapiens
MSIPHLWCHFFTFLLPCIKRQKIHIKLCHVF

SEQ ID NO: 4548 - protein, 36 aa, Homo sapiens
MACLELLILVSFLTSVIQTQPPRELDPSLFSVFSLA

SEQ ID NO: 4549 - protein, 36 aa, Homo sapiens; identical to SEQ ID NO: 4548

SEQ ID NO: 4550 - protein, 4 aa, Homo sapiens
MHAL

SEQ ID NO: 4551 - protein, 12 aa, Homo sapiens
MIHRLQKLYELR

SEQ ID NO: 4552 - protein, 28 aa, Homo sapiens
MYFICNLLLLLGHIYVYIWMSVYIYMYK

SEQ ID NO: 4553 - protein, 74 aa, Homo sapiens
MKDFVVTGKRNPDCVFSLQGCPQRSYSLWLLLWVIGDNVLKKVLFFCLLKNRILKVISQKKWPSVKGLFPMCSA

SEQ ID NO: 4554 - protein, 36 aa, Homo sapiens
MVFPFLSFASSCTLSMVFSDSIFLNSLFIFLGNFLL

SEQ ID NO: 4555 - protein, 73 aa, Homo sapiens
MLHILFMGLRVNLNHETFLIICCEIYQAWMISVFLVVCCFFKEVIQVPLLSCQHTKLLKKLTISFRSNSQPVE

SEQ ID NO: 4556 - protein, 9 aa, Homo sapiens
SCSIRYDLF

SEQ ID NO: 4557 - protein, 34 aa, Homo sapiens
MFITPLSWSLLIWVLLGFLLLFLNYSRLLYILDF

SEQ ID NO: 4558 - protein, 51 aa, Homo sapiens
HFSKFTLSLLASGRYIYSHMVFTFFSIVLEALIMLVEQLTSRVFFPACHTC

SEQ ID NO: 4559 - protein, 30 aa, Homo sapiens
MFSIFFFMKTLFFPLIKHILLWCLFFLLAV

SEQ ID NO: 4560 - protein, 108 aa, Homo sapiens
ITYQDVGCPGVLPDSSLLVPIPNVLLSFFAFHNIKETTTLLPNSILCLLFHIKWELCLLRSAPPINYMCPRIIQARDTRWENISKKKSPLKASNLSEKVFYHTLTPYI

SEQ ID NO: 4561 - protein, 10 aa, Homo sapiens
MLLFLVSHLA

SEQ ID NO: 4562 - protein, 11 aa, Homo sapiens
VVIMLVIPLIV

SEQ ID NO: 4563 - protein, 26 aa, Homo sapiens
MSCKTLLKMVWFFFCFCLVFFFHENK

SEQ ID NO: 4564 - protein, 187 aa, Homo sapiens
NGVVHDVVLVLILGACIVVHAVTVTSLGNLFGGAGQTQQSWVEVLDVAGHGFNVVPLGVHSDEDRLHWRQTRLCFQLPHHLHQLLQLVWADVRAVSEAKVHQHPLAPEVSLAASPASVIQQVEVALAHSCLAQGFCSLLLLQPLLLSPQGQPGPTESSPEQACDQQPGSKPRALGLALPTCLCRALP

SEQ ID NO: 4565 - protein, 71 aa, Homo sapiens
GRLIWGALWPVPDCGCTAPEGQDQPPSLVCCHGCRPGSHAEVWQGCSRGQDYAGFSVGSGAGAPSLEEPRS

SEQ ID NO: 4566 - protein, 37 aa, Homo sapiens
MPSRTPPSSLLWLGWTWATTWMWLPCPSPCWSACAGG

SEQ ID NO: 4567 - protein, 33 aa, Homo sapiens
MPVVSVHRPVTVSTCVPSPGHPVKRAHFLQSGI

SEQ ID NO: 4568 - protein, 20 aa, Homo sapiens
MFFRLLTYLLFLLPTSADNS

SEQ ID NO: 4569 - protein, 38 aa, Homo sapiens
MWLILLAIPGVAAHAWLVWVHRGSHGWAQQRGPSGEGF

SEQ ID NO: 4570 - protein, 63 aa, Homo sapiens
MCFYHHRETAFKSTYLYGTAVTRHIHPSRTDACDPEARRSFVLGDVHIGIYLTAKEPFIYIYI

SEQ ID NO: 4571 - protein, 35 aa, Homo sapiens
MRLLTSGWLLWARTGPSWGARSRISLIWRCMACCV

SEQ ID NO: 4572 - protein, 44 aa, Homo sapiens
VLAAFVLGAALAAGLGLVCAHSAPHAPGPPARASPSGPQPRRSQ

SEQ ID NO: 4573 - protein, 65 aa, Homo sapiens
LPAGTWQPGRGAGAVGAAGGVDSSSEGRTRLAGGEDGVPAAQSPQGSPLRATKQDRAALVPGPSG

SEQ ID NO: 4574 - protein, 6 aa, Homo sapiens
MNTYLR

SEQ ID NO: 4575 - protein, 24 aa, Homo sapiens
MVLAKAQLLIFWLVILNQLQARYF

SEQ ID NO: 4576 - protein, 36 aa, Homo sapiens
MFLNLKFLLLLHFCESHLKFFREGILSFVQRCLYFY

SEQ ID NO: 4577 - protein, 13 aa, Homo sapiens
MDFQPFFPICSCF

SEQ ID NO: 4578 - protein, 39 aa, Homo sapiens
MSTPSVLLFYSSFLLIFILWDERLGSIEKNINHQFVTYP

SEQ ID NO: 4579 - protein, 39 aa, Homo sapiens
MLHPGLCCQAHFFLHLPPLTSAAPSCMPQFFLKSLDAFS

SEQ ID NO: 4580 - protein, 41 aa, Homo sapiens
QPLVSFLWLILSLSSTLRRQNGETKKATLKVFILSGYLAFF

SEQ ID NO: 4581 - protein, 34 aa, Homo sapiens
FLKALQVIFFLLFKNYNFYFLYCSFKTSCYSICR

SEQ ID NO: 4582 - protein, 59 aa, Homo sapiens
  SITE (24): Xaa equals any of the naturally occurring L-amino acids
MLSIDLLLFSLLFLLLCGYFLLIXRILLVNMLHIHIIWCPVFPFTYYTFHISTLSDISA

SEQ ID NO: 4583 - protein, 12 aa, Homo sapiens
MFSHPPPQPLLN

SEQ ID NO: 4584 - protein, 24 aa, Homo sapiens
MFIMAFILLISFYMLILISSSMSK

SEQ ID NO: 4585 - protein, 130 aa, Homo sapiens
MYQTPMEVAVYQLHNFSISFFSSLLGGDVVSVKLDNSASGASVVAIDNKIEQAMDLVKNHLMYAVREEVEILKEQIRELVEKNSQLERENTLLKTLASPEQLEKFQSCLSPEEPAPESPQVPEAPGGSAV

SEQ ID NO: 4586 - protein, 130 aa, Homo sapiens; identical to SEQ ID NO: 4585

SEQ ID NO: 4587 - protein, 97 aa, Homo sapiens
EFGFFFSLFLVISLFVWKESYFSLDITPEFPSDALLRVRAVADSLKFSSALPYLPFILGIGKCCKGPDGKYFRLYGLVSVANIQLCQCTLKAAIDNM

SEQ ID NO: 4588 - protein, 30 aa, Homo sapiens
MVCCVVFFFFWKESLLFIRFLKDSKTKKGL

SEQ ID NO: 4589 - protein, 36 aa, Homo sapiens
MRLKLLEYRTILLIVFLHSFSAWQRDGRGPDTDYLG

SEQ ID NO: 4590 - protein, 25 aa, Homo sapiens
MIHLKSVTSLMLLAINLGNMKQSCS

SEQ ID NO: 4591 - protein, 59 aa, Homo sapiens
EILLLSFLFIYLRFSLSFSSDLSPSICLSSFIFLSSPFLPASATSLVSWLLTFLRHRLL

SEQ ID NO: 4592 - protein, 49 aa, Homo sapiens
MLLRDIEVYFLGQVGIFYPCSFFILATHICSLAHPTAPPTRPRWILPQC

SEQ ID NO: 4593 - protein, 31 aa, Homo sapiens
MPTSQKQMPLFLCQNLMVLWLLLNPVNLEPI

SEQ ID NO: 4594 - protein, 36 aa, Homo sapiens
MHHQAGHFKLSSRNEFLCFLALLFAWGWERVVSSNC

SEQ ID NO: 4595 - protein, 39 aa, Homo sapiens
MPSLLHIIVRPFLLLWSPTISFVLYPGERGRVNGTGWFL

SEQ ID NO: 4596 - protein, 4 aa, Homo sapiens
MWRW

SEQ ID NO: 4597 - protein, 35 aa, Homo sapiens
MILSLVLSYNLFLVQLILCTITAEMSNWDRLASKA

SEQ ID NO: 4598 - protein, 51 aa, Homo sapiens [sequence omitted]

SEQ ID NO: 4599 - protein, 48 aa, Homo sapiens
  SITE (36): Xaa equals any of the naturally occurring L-amino acids
MFLLSLLLKMIHFIANSFLSSISSFLSVCHSDLCYXSYLVAILKVFKM

SEQ ID NO: 4600 - protein, 21 aa, Homo sapiens
MLRTDLIKLSWYLRHFLKGCI

SEQ ID NO: 4601 - protein, 30 aa, Homo sapiens
MIKAVLTFLKIHCLGWAGNSFEVTLIRLQC

SEQ ID NO: 4602 - protein, 46 aa, Homo sapiens
MSIIPCRPQPRAGRCYSLCFMLLLWPLFLPSSELCRVYCRQSEVSF

SEQ ID NO: 4603 - protein, 24 aa, Homo sapiens
CTTVVLFLLIELKQLYGAKVTGYS

SEQ ID NO: 4604 - protein, 45 aa, Homo sapiens
FNFDVILLLVIFAFVSCTFVSYPIMCIIYIYMHIHTHIYIYNRYI

SEQ ID NO: 4605 - protein, 45 aa, Homo sapiens; identical to SEQ ID NO: 4604

SEQ ID NO: 4606 - protein, 38 aa, Homo sapiens; identical to SEQ ID NO: 3687

SEQ ID NO: 4607 - protein, 17 aa, Homo sapiens [sequence omitted]

SEQ ID NO: 4608 - protein, 44 aa, Homo sapiens
MVLVSIFCLFACFQNSLAWYCMESSSFSSCPLRAGLFPVSSQRP

SEQ ID NO: 4609 - protein, 27 aa, Homo sapiens
ELGFLYCFLCNMIAETHFKNSEACHSC

SEQ ID NO: 4610 - protein, 19 aa, Homo sapiens
MQALQTACFFFLLLAQPFQ

SEQ ID NO: 4611 - protein, 41 aa, Homo sapiens
  SITE (31): Xaa equals any of the naturally occurring L-amino acids
MILLSVSLGRHWAFTYKFFLTPVVFVFFFFXFFHRKEYINL

SEQ ID NO: 4612 - protein, 34 aa, Homo sapiens
MSGPLHGHHSLLRLLAACTLILPHSLAASVNVKN

SEQ ID NO: 4613 - protein, 26 aa, Homo sapiens
MCVSVLSIFVPQLHCLNYSSFVSLSI

SEQ ID NO: 4614 - protein, 137 aa, Homo sapiens
MVHLTTLLCKAHRGGHLTIRLALGGCTNRPFYRIVAAHNKCPRDGRFVEQLGSYDPLPNSHGEKLVALNLDRIRHWIGCGAHLSKPMEKLLGLAGFFPLHPMMITNAERLRRKRAREVLLASQKTDAEATDTEATET

SEQ ID NO: 4615 - protein, 106 aa, Homo sapiens
MAVTALAARTWLGVWGVRTMQARGFGSDQSENVDRGAGSIREAGGAFGKREQAEEERYFRAQSREQLAALKKHHEEEIVHHKKEIERLQKEIERHKQKIKMLKHDD

SEQ ID NO: 4616 - protein, 21 aa, Homo sapiens
MCHGGLVHLSTHHLSFKLCMQ

SEQ ID NO: 4617 - protein, 37 aa, Homo sapiens
  SITE (37): Xaa equals any of the naturally occurring L-amino acids
MVLLSPAMSLLIFCLPALSISKNKKKKKKKEFKKLLX

SEQ ID NO: 4618 - protein, 25 aa, Homo sapiens
MWLTVSWLHTFHALDFCAFCRNDSR

SEQ ID NO: 4619 - protein, 35 aa, Homo sapiens
MGTQLLFLLCSILIPLCVELDYIFLKQSSLNNLVV

SEQ ID NO: 4620 - protein, 31 aa, Homo sapiens
MVEWTLAVLVCHLFLILYLFLFCENCLVVSC

SEQ ID NO: 4621 - protein, 31 aa, Homo sapiens
MHFFLPKQVSFPLSLITLLWPSLILQKISRL

SEQ ID NO: 4622 - protein, 57 aa, Homo sapiens
MTCSRSSIFLTLLLLGHRAIFSNMPEKLRSLITDNLQLFTSKSFGQIMPVKECKFYK

SEQ ID NO: 4623 - protein, 44 aa, Homo sapiens
MLLAPAVGQLLYIYWTLYFSRSFLRWVGFVSTLQVRKVKLRELK

SEQ ID NO: 4624 - protein, 14 aa, Homo sapiens
VLYYPYLAIYNMKV

SEQ ID NO: 4625 - protein, 31 aa, Homo sapiens
MVMHTRLLFRMSLWPVNCGQETYCKKKKKKK

SEQ ID NO: 4626 - protein, 31 aa, Homo sapiens
MRLLLIWQAFLCPKLTKSSQSFLFLAYPISL

SEQ ID NO: 4627 - protein, 42 aa, Homo sapiens
MNCGTRGCENLRWNLSFFLSFFLNFVFSIQQQCVERILCRCR

SEQ ID NO: 4628 - protein, 57 aa, Homo sapiens
LPSSVRHGLAQVLALVTFQHVTLGTCDLHLSGFVSSLLRCRQCTYNICYFRAMRCTS

SEQ ID NO: 4629 - protein, 66 aa, Homo sapiens
MGPRLCPVLGSACPASTLCWLLLASYWVLPCRDKHTGPEKLGRHEQVAGPSWTSFVSDPTIIQGPI

SEQ ID NO: 4630 - protein, 38 aa, Homo sapiens
MIWSLATLLSSLLLNMSRAFPSQWAFVLTISSAWMFLL

SEQ ID NO: 4631 - protein, 22 aa, Homo sapiens
MVTNYRSQLSFLQSLPQFYTFC

SEQ ID NO: 4632 - protein, 43 aa, Homo sapiens
MSIKCLHKTLQVLYFMRFLLLIKATKMNGKFILIKSTTWEEVR

SEQ ID NO: 4633 - protein, 42 aa, Homo sapiens
MAETPSLSHEGLIGIKLGFLWLWVLFFCCCFWFSVCFLVYGG

SEQ ID NO: 4634 - protein, 17 aa, Homo sapiens
MSENPLLAKSPESKFCF

SEQ ID NO: 4635 - protein, 32 aa, Homo sapiens
AFLAAALAQGLCEVLLVVTKEVEEKGSWLRTD

SEQ ID NO: 4636 - protein, 20 aa, Homo sapiens
GKCLINLVIGWVKYMGEFYM

SEQ ID NO: 4637 - protein, 67 aa, Homo sapiens
DTWFVSTFWLLLTVLLCTFLSKSLFGNLFSNSLKYLGMELLSFMIIQSLPSRGTPATVLFYILISSV

SEQ ID NO: 4638 - protein, 34 aa, Homo sapiens
MQFTDSRQCCLLFTLILFTVLSQFYFLEEWYSVL

SEQ ID NO: 4639 - protein, 29 aa, Homo sapiens
MVTIIILQPSSFPLPLRLNCYNADYLYSS

SEQ ID NO: 4640 - protein, 3 aa, Homo sapiens
TVW

SEQ ID NO: 4641 - protein, 32 aa, Homo sapiens
MSQCYRDFVYGQFWGQFMARFWGACSQHQEMC

SEQ ID NO: 4642 - protein, 3 aa, Homo sapiens
MFS

SEQ ID NO: 4643 - protein, 38 aa, Homo sapiens
MTYRLIVIFSFLLLLFRLDLGKSPGWLEGLRFMWSFVF

SEQ ID NO: 4644 - protein, 36 aa, Homo sapiens
MSSVDFHVLSSPFDIRGLKTPPLDHANTAIFCAWVP

SEQ ID NO: 4645 - protein, 39 aa, Homo sapiens
MCILIPFASVLLRIFASGILVCSFLVSLSGFGVREMQAS

SEQ ID NO: 4646 - protein, 16 aa, Homo sapiens
MIIIAKVVLFFNSSAS

SEQ ID NO: 4647 - protein, 35 aa, Homo sapiens
  SITE (17): Xaa equals any of the naturally occurring L-amino acids
MYLRIKYVSKLPGLLLXFFFVLFLRLWYSWEMQIG

SEQ ID NO: 4648 - protein, 7 aa, Homo sapiens
NFLFFLC

SEQ ID NO: 4649 - protein, 22 aa, Homo sapiens
MLTYTIMFSLIVEVISGGLSFI

SEQ ID NO: 4650 - protein, 31 aa, Homo sapiens
MQKSKQPRILCLILLVIPTLLQQYSCTCHIK

SEQ ID NO: 4651 - protein, 25 aa, Homo sapiens
FLFVPNVFSSFKNGSHPTRLPPYQD

SEQ ID NO: 4652 - protein, 22 aa, Homo sapiens
  SITE (8): Xaa equals any of the naturally occurring L-amino acids
MKLVIMYXILLAVSSLTVIKVI

SEQ ID NO: 4653 - protein, 38 aa, Homo sapiens
MRILHFQLTCCYIPTIIRPWRPVAWFPLSLLCFFLWHG

SEQ ID NO: 4654 - protein, 32 aa, Homo sapiens
MCMHTSSLLFLLVLLSDTYEKDHFPSLFPFVG

SEQ ID NO: 4655 - protein, 3 aa, Homo sapiens
GVT

SEQ ID NO: 4656 - protein, 8 aa, Homo sapiens
MTKEDSKL

SEQ ID NO: 4657 - protein, 13 aa, Homo sapiens
MAVGTFGVWLWGN

SEQ ID NO: 4658 - protein, 49 aa, Homo sapiens
  SITE (26): Xaa equals any of the naturally occurring L-amino acids
  SITE (30): Xaa equals any of the naturally occurring L-amino acids
MAFFHLLKGTGLFPPSLSSSVLCFVXDLFXWTIHRSALLFLLPLSVFSC

SEQ ID NO: 4659 - protein, 29 aa, Homo sapiens
IKIVLLFSCLFLFLLFVFLTSLYWEVTPV

SEQ ID NO: 4660 - protein, 28 aa, Homo sapiens
MCLYQFIFLFYWLVVFYLECTTVYPFTS

SEQ ID NO: 4661 - protein, 6 aa, Homo sapiens
FLSSLS

SEQ ID NO: 4662 - protein, 57 aa, Homo sapiens
MEFLHDVGVDAIAFSLLVFLLTVRPLCCRSAGVCCGSTPDPVSLSITSGGCRTAKTD

SEQ ID NO: 4663 - protein, 31 aa, Homo sapiens
MGFYLRVLRLVYVFQELLGHCGSAAPGTSCA

SEQ ID NO: 4664 - protein, 69 aa, Homo sapiens
MGRWPGTAGSLTLTWLRVEIWLVPWSGTCHSPNPKQSRVWAQDCPLPFETPSLVPASKTNREATLVAGS

SEQ ID NO: 4665 - protein, 9 aa, Homo sapiens
MQINDYFLS

SEQ ID NO: 4666 - protein, 40 aa, Homo sapiens
GGIYKFTLTVCAAHIRFLVLGLFLYSLHGDWQHQHHMSTT

SEQ ID NO: 4667 - protein, 20 aa, Homo sapiens
MIENPGRLFLSSVLFCFFAL

SEQ ID NO: 4668 - protein, 34 aa, Homo sapiens
MLLLLFLFWSKGAAEGEPGPVPAPAGFSETQRWR

SEQ ID NO: 4669 - protein, 36 aa, Homo sapiens
MGQMLLSVLLLLQWLCSHSASNLSSFSSVFTHLGRW

SEQ ID NO: 4670 - protein, 35 aa, Homo sapiens
MVCLLLRTLCPLCSRGKTGLEVNLSLFLYIEGRDQ

SEQ ID NO: 4671 - protein, 62 aa, Homo sapiens
MFEVFHFLAFVSNMVWICGAIQISHQIVSLNVVGGAWWEVTGLYGWILMNHLIPLPLVLSLP

SEQ ID NO: 4672 - protein, 41 aa, Homo sapiens
MIFLLFCSTFPLFKTSALATQDLRGAFLESCLKQEQITQKH

SEQ ID NO: 4673 - protein, 23 aa, Homo sapiens
QHCCLSSASCLGSPLVWEDCCAP

SEQ ID NO: 4674 - protein, 48 aa, Homo sapiens
MIQTPPTRPHLLTLGWSTCFLVWSHEIRTGAHIQTMSHTIQRIIAMCK

SEQ ID NO: 4675 - protein, 37 aa, Homo sapiens
MEWLVSPSHFLFLTYFSLLVSLDGEVLFMIRKEGISY

SEQ ID NO: 4676 - protein, 14 aa, Homo sapiens
MRGVEFCLVFWPCW

SEQ ID NO: 4677 - protein, 32 aa, Homo sapiens
MVGIWVCVCHLSVSQALKNISYSWHSSVHFGK

SEQ ID NO: 4678 - protein, 43 aa, Homo sapiens
MPFLLLLHAIEHSLSSHRIQFSHLRKAFPDSNRQVMHLFPVLT

SEQ ID NO: 4679 - protein, 35 aa, Homo sapiens
MLSYKTSIFCLFLFFPPFLTRGEKKTEGKKGGNES

SEQ ID NO: 4680 - protein, 22 aa, Homo sapiens
MCVCVCMYMHVFMCFLGLISLK

SEQ ID NO: 4681 - protein, 31 aa, Homo sapiens
MLALKLVLTAFSLVGCLLESPIGTARAITSL

SEQ ID NO: 4682 - protein, 24 aa, Homo sapiens
MVYMPACAVVVSGILELALSASLL

SEQ ID NO: 4683 - protein, 31 aa, Homo sapiens
MYCLCPFLLPSSNPLYSYCGLCSTVVYPSTR

SEQ ID NO: 4684 - protein, 16 aa, Homo sapiens
MNSMNYLFIFLVSLEA

SEQ ID NO: 4685 - protein, 35 aa, Homo sapiens
MVLHLHLQLCLVSVCKSKSLVQPFQATWPKLTKHP

SEQ ID NO: 4686 - protein, 625 aa, Homo sapiens
MELLPTHAFSTLFPVLQDNLEVYLGLQQFIVTSGSGHRLNITAENDCRRLHCSLRDLSSLLQAVGRLAEYFIGDVFAARFNDALTVVERLVKVTLYGSQIKLYNIETAVPSVLKPDLIDVHAQSLAALQAYSHWLAQYCSEVHRQNTQQFVTLISTTMDAITPLISTKVQDKLLLSACHLLVSLATTVRPVFLISIPAVQKVFNRITDASALRLVDKAQVLVCRALSNILLLPWPNLPENEQQWPVRSINHASLISALSRDYRNLKPSAVAPQRKMPLDDTKLIIHQTLSVLEDIVENISGESTKSRQICYQSLQESVQVSLALFPAFIHQSDVTDEMLSFFLTLFRGLRVQMGVPFTEQIIQTFLNMFTREQLAESILHEGSTGCRVVEKFLKILQVVVQEPGQVFKPFLPSIIALCMEQVYPIIAERPSPDVKAELFELLFRTLHHNWRYFFKSTVLASVQRGIAEEQMENEPQFSAIMQAFGQSFLQPDIHLFKQNLFYLETLNTKQKLYHKKIFRTAMLFQFVNVLLQVLVHKSHDLLQEEIGIAIYNMASVDFDGFFAAFLPEFLTSCDGVDANQKSVLGRNFKMDRDLPSFTQNVHRLVNDLRYYRLCNDSLPPGTVKL

SEQ ID NO: 4687 - protein, 35 aa, Homo sapiens
MPFVAWFCFCVFSTIHFSILASRKENQPSRLARLK

SEQ ID NO: 4688 - protein, 12 aa, Homo sapiens
WYSFCLVLRVSK

SEQ ID NO: 4689 - protein, 767 aa, Homo sapiens
MKGCLSCSYIEKFTDFLRLFVSVHLRRIESYSQFPVVEFLTLLFKYTFHQPTHEGYFSCLDIWTLFLDYLTSKIKSRLGDKEAVLNRYEDALVLLLTEVLNRIQFRYNQAQLEELDDETLDDDQQTEWQRYLRQSLEVVAKVMELLPTHAFSTLFPVLQDNLEVYLGLQQFIVTSGSGHRLNITAENDCRRLHCSLRDLSSLLQAVGRLAEYFIGDVFAARFNDALTVVERLVKVTLYGSQIKLYNIETAVPSVLKPDLIDVHAQSLAALQAYSHWLAQYCSEVHRQNTQQFVTLISTTMDAITPLISTKVQDKLLLSACHLLVSLATTVRPVFLISIPAVQKVFNRITDASALRLVDKAQVLVCRALSNILLLPWPNLPENEQQWPVRSINHASLISALSRDYRNLKPSAVAPQRKMPLDDTKLIIHQTLSVLEDIVENISGESTKSRQICYQSLQESVQVSLALFPAFIHQSDVTDEMLSFFLTLFRGLRVQMGVPFTEQIIQTFLNMFTREQLAESILHEGSTGCRVVEKFLKILQVVVQEPGQVFKPFLPSIIALCMEQVYPIIAERPSPDVKAELFELLFRTLHHNWRYFFKSTVLASVQRGIAEEQMENEPQFSAIMQAFGQSFLQPDIHLFKQNLFYLETLNTKQKLYHKKIFRTAMLFQFVNVLLQVLVHKSHDLLQEEIGIAIYNMASVDFDGFFAAFLPEFLTSCDGVDANQKSVLGRNFKMDRDLPSFTQNVHRLVNDLRYYRLCNDSLPPGTVKL

SEQ ID NO: 4690 - protein, 35 aa, Homo sapiens; identical to SEQ ID NO: 4687

SEQ ID NO: 4691 - protein, 35 aa, Homo sapiens; identical to SEQ ID NO: 4687

SEQ ID NO: 4692 - protein, 62 aa, Homo sapiens
MPLLQLFLFYYFLPSYLPSLPPETHTFLFFPLTIPGIFSRTTFLEVLLLLILKFAVPWLFSF

SEQ ID NO: 4693 - protein, 28 aa, Homo sapiens
MSRLREYLIFLLFFSSLAFNVETPFTSH

SEQ ID NO: 4694 - protein, 48 aa, Homo sapiens
MLPLATAKQCGIAGLECLLIFLLGFHIQFPLRGITWIIIGTLELMASM

SEQ ID NO: 4695 - protein, 30 aa, Homo sapiens
MSCFYILKVILHFLVLNYSIPIKICKILKT

SEQ ID NO: 4696 - protein, 47 aa, Homo sapiens
MIFKLCKFDSILLLGFYLILVVCFSFAEVSNCSSPTAPKFSILGAQL

SEQ ID NO: 4697 - protein, 32 aa, Homo sapiens
MPCMHCLLSSCILSACFSPCISIPWAPPVVPV

SEQ ID NO: 4698 - protein, 116 aa, Homo sapiens
SKNIFHAARTPATLFVVIFITYVIAGVTGFIGLDIIASLCNMIMGLTLITLCTWAYIRYSGEYRELGAVIDQVAAALWDQALYKLYSAAATHRHLYHQAFPTPKSESTEQSEKKKM

SEQ ID NO: 4699 - protein, 45 aa, Homo sapiens
RHSLFWILIQMILISTVSGSSQSALTPSACQGHPVQSLIEGEFPQ

SEQ ID NO: 4700 - protein, 23 aa, Homo sapiens
MLSIFCFIWFIYFLGFFMHILWH

SEQ ID NO: 4701 - protein, 36 aa, Homo sapiens
MPELFLLVPLPGTLLLSLSHGWPLSHSPSSYSETTF

SEQ ID NO: 4702 - protein, 33 aa, Homo sapiens
MLPIFVTLFFVCFVLFCLFCPTKTDLSSCDTTM

SEQ ID NO: 4703 - protein, 496 aa, Homo sapiens
RACNLPGRLRYAHRLSGFLHSHLRRIWLRRKWRCHWPRPLPQSCVGTEGGLQVRDTSSRIAKGGVDHTKMSLHGASGGHERSRDRRRSSDRSRDSSHERTESQLTPCIRNVTSPTRQHHVEREKDHSSSRPSSPRPQKASPNGSISSAGNSSRNSSQSSSDGSCKTAGEMVFVYENAKEGARNIRTSERVTLIVDNTRFVVDPSIFTAQPNTMLGRMFGSGREHNFTRPNEKGEYEVAEGIGSTVFRAILDYYKTGIIRCPDGISIPELREACDYLCISFEYSTIKCRDLSALMHELSNDGARRQFEFYLEEMILPLMVASAQSGERECHIVVLTDDDVVDWDEEYPPQMGEEYSQIIYSTKLYRFFKYIENRDVAKSVLKERGLKKIRLGIEGYPTYKEKVKKRPGGRPEVIYNYVQRPFIRMSWEKEEGKSRHVDFQCVKSKSITNLAAAAADIPQDQLVVMHPTPQVDELDILPIHPPSGNSDLDPDAQNPML

SEQ ID NO: 4704 - protein, 63 aa, Homo sapiens
MKLSSLSRLTKSTSTAGALWNVPTGRTWLLVLASTSISFSISSPTTSWNCSAASTGPMSLTPS

SEQ ID NO: 4705 - protein, 55 aa, Homo sapiens [sequence omitted]

SEQ ID NO: 4706 - protein, 96 aa, Homo sapiens
MVCQSLLLLDQLSCPSVSFLGLLCGLLVCKHLSVSKPAVRSSLTITEYTWYTKTHVEEKKITEVPKNTYNWTKNWLIFFFKERAASVYYLQRSSFH

SEQ ID NO: 4707 - protein, 25 aa, Homo sapiens
MYQVVPLKKCLSLLGTLMTQPITLA

SEQ ID NO: 4708 - protein, 169 aa, Homo sapiens
MAEPEKAPALSILLYVQAFQVGMPPPGCCRGPLRPKTLLLTSSEIFLLDEDCVHYPLPEFAKEPPQRDRYRLDDGRRVRDLDRVLMGYQTYPQALTLVFDDVQGHDLMGSVTLDHFGEVPGGPARASQGREVQWQVFVPSAESREKLISLLARQWEALCGRELPVELTG

SEQ ID NO: 4709 - protein, 13 aa, Homo sapiens
MSPCPLLCFSVGF

SEQ ID NO: 4710 - protein, 14 aa, Homo sapiens
MLPCVLDGFLQACL

SEQ ID NO: 4711 - protein, 48 aa, Homo sapiens
MELLCWSCWCVCLGWLHTGWPASGTALGTMRSLTRTPRQSATTAGCTN

SEQ ID NO: 4712 - protein, 38 aa, Homo sapiens
EPLCLSRLVLSTVHFSLSVPWALMKKQNAPNFIHLPSL

SEQ ID NO: 4713 - protein, 72 aa, Homo sapiens
MSSKTASTNNIAQARRTVQQLRLEASIERIKVSKASADLMSYCEEHARSDPLLIGIPTSENPFKDKKTCIIL

SEQ ID NO: 4714 - protein, 57 aa, Homo sapiens
WVDWQRKWTTKFFMLRSFLLETSQIFRFLWIMKQKSTEDLLLLNLSWQRMLQQLSTT

SEQ ID NO: 4715 - protein, 93 aa, Homo sapiens
GKGSQPPSPPSPAPSSFSSTSVSSLEAEAYAAFPGLGQVPKQLAQLSEAKDLQARKAFNCKYCNKEYLSLGALKMHIRSHTLPCVCGTCGKLL

SEQ ID NO: 4716 - protein, 36 aa, Homo sapiens
MGSCTWSIWLWMVSGVACRSQGLSDCSPKAFLWSFA

SEQ ID NO: 4717 - protein, 21 aa, Homo sapiens
MYQTAWIDSLPLLSFLVTSVT

SEQ ID NO: 4718 - protein, 37 aa, Homo sapiens
MGLVSNFVIFLVFVSDFLFKNKVLSECFDFPVTTKFL

SEQ ID NO: 4719 - protein, 26 aa, Homo sapiens
MAHSTARWLWWLPRMWTPVPSWRYSL

SEQ ID NO: 4720 - protein, 4 aa, Homo sapiens
YSLT

SEQ ID NO: 4721 - protein, 57 aa, Homo sapiens
EPPSLELWEKLLLLEVPVAEKFPNRTDSFIPPEFRERSMWTHVPLHQRLLSRHSSST

SEQ ID NO: 4722 - protein, 111 aa, Homo sapiens
FLLFLLFLLQGKYKISLEWASRFIQPPPGHRFREREEEGRFGASTTTSFPHALLSPFPSFSTSSFPSLPSMICPCPSVSSSFPSFLPFLLPSLAGSNEQVALNLDSTITGG

SEQ ID NO: 4723 - protein, 32 aa, Homo sapiens
MSPPALFLFIHVLFLYQYCFGYVESLAFLYKF

SEQ ID NO: 4724 - protein, 15 aa, Homo sapiens
MWSVRSILFVLLSLM

SEQ ID NO: 4725 - protein, 613 aa, Homo sapiens
MFRCGGLAAGALKQKLVPLVRTVCVRSPRQRNRLPGNLFQRWHVPLELQMTRQMASSGASGGKIDNSVLVLIVGLSTVGAGAYAYKTMKEDEKRYNERISGLGLTPEQKQKKAALSASEGEEVPQDKAPSHVPFLLIGGGTAAFAAARSIRARDPGARVLIVSEDPELPYMRPPLSKELWFSDDPNVTKTLRFKQWNGKERSIYFQPPSFYVSAQDLPHIENGGVAVLTGKKVVQLDVRDNMVKLNDGSQITYEKCLIATGGTPRSLSAIDRAGAEVKSRTTLFRKIGDFRSLEKISREVKSITIIGGGFLGSELACALGRKARALGTEVIQLFPEKGNMGKILPEYLSNWTMEKVRREGVKVMPNAIVQSVGVSSGKLLIKLKDGRKVETDHIVAAVGLEPNVELAKTGGLEIDSDFGGFRVNAELQARSNIWVAGDAACFYDIKLGRRRVEHHDHAVVSGRLAGENMTGAAKPYWHQSMFWSDLGPDVGYEAIGLVDSSLPTVGVFAKATAQDNPKSATEQSGTGIRSESETESEASEITIPPSTPAVPQAPVQGEDYGKGVIFYLRDKVVVGIVLWNIFNRMPIARKIIKDGEQHEDLNEVAKLFNIHED

SEQ ID NO: 4726 - protein, 36 aa, Homo sapiens
MEKREAYISSHLLSMSLLRTCLILRMVVWLSSLGRR

SEQ ID NO: 4727 - protein, 14 aa, Homo sapiens
MPFIPSFPFLWPLL

SEQ ID NO: 4728 - protein, 1 aa, Homo sapiens
M

SEQ ID NO: 4729 - protein, 30 aa, Homo sapiens
MLVALLCLIRILGEMESFPQGAAGGRIGSI

SEQ ID NO: 4730 - protein, 12 aa, Homo sapiens
EQSLLYFILCCF

SEQ ID NO: 4731 - protein, 44 aa, Homo sapiens [sequence omitted]

SEQ ID NO: 4732 - protein, 31 aa, Homo sapiens
MLPLLIWFLASPCVLRASQTIHLWVALLFVI

SEQ ID NO: 4733 - protein, 181 aa, Homo sapiens
QLAAPAFPSPSLSYRFMLVLASNLPEQFDCAINSRIDVMVHFDLPQQEERERLVRLHFDNCVLKPATEGKRRLKLAQFDYGRKCSEVARLTEGMSGREIAQLAVSWQATAYASKDGVLTEAMMDACVQDAVQQYRQKMRWLKAEGPGRGVDTPYPESKARPHLMEPGHGPLLPLPCRPLHI

SEQ ID NO: 4734 - protein, 4 aa, Homo sapiens
MIIL

SEQ ID NO: 4735 - protein, 4 aa, Homo sapiens
MIIL

SEQ ID NO: 4736 - protein, 4 aa, Homo sapiens
MIIL

SEQ ID NO: 4737 - protein, 4 aa, Homo sapiens
MIIL

SEQ ID NO: 4738 - protein, 39 aa, Homo sapiens
MYSLASIMQIKKYFSLSVFLALVSSCCFCLDLERLQLSN

SEQ ID NO: 4739 - protein, 20 aa, Homo sapiens
MSATVSGRSHLWPLFACEKV

SEQ ID NO: 4740 - protein, 97 aa, Homo sapiens
LMLSLCLPPILSGTGDGGSPCEPFSCCSGRASSTLSQPGPMENDGLGFLRPYLMPLQFMSPTRPRGSGWERAPGCPVTPLTLPSPVPNMPCNKIRED

SEQ ID NO: 4741 - protein, 19 aa, Homo sapiens
MVVCHTHLWDSAWLFGCHL

SEQ ID NO: 4742 - protein, 17 aa, Homo sapiens
CVFTVDWSLKAPLGENM

SEQ ID NO: 4743 - protein, 36 aa, Homo sapiens
MSIFRCFKLPFVFEAFLIFLAISYFLFCDKKIRQTC

SEQ ID NO: 4744 - protein, 38 aa, Homo sapiens
MVDPLAISCGVLLLLCHFSMPEDTKMISRQSYHIAASL

SEQ ID NO: 4745 - protein, 81 aa, Homo sapiens
MRTNQSLCSFLLWSVPFHQAACPQAKDHPLEPSMHPEGTQLQSCSTMLGPRQLSSEKQPLLPPRSHLKSSPMLRACKGLTS

SEQ ID NO: 4746 - protein, 50 aa, Homo sapiens
MAILRTWIKISMMTVLMTVTPTNQMEKVTGMNLCTVIMVRETTMKKRSQV

SEQ ID NO: 4747 - protein, 16 aa, Homo sapiens
MLTGVLLSHILCAVIC

SEQ ID NO: 4748 - protein, 46 aa, Homo sapiens
MSLLSNVTWSFYTLHFFFIIMKNGIPPGSSKILLTETNVGVRKITI

SEQ ID NO: 4749 - protein, 26 aa, Homo sapiens
MFTVLLLELFSHPTYAGFSIAFEFCV

SEQ ID NO: 4750 - protein, 51 aa, Homo sapiens
MLPHLPLSGSLLCLSCSVRSFSCSTDWLPPSDSGTWLSKLTNFTSCNIHHQ

SEQ ID NO: 4751 - protein, 61 aa, Homo sapiens
WRRGVGSCCWPSQPCWWPTSARLRTRTVPSSVCSCRWTTWSPVWPWSARKLLQSCRRTSMS

SEQ ID NO: 4752 - protein, 115 aa, Homo sapiens
MKPVSLISLSILSLWGILVAFLVTECACRTLSSPWPLAAVLCSPCLCRAWPPQQACWLWASPVLRLHAHSLGSLSHLGSGPTSKLVNLGLHPVARCLLPDAFACLSHTGSSSKAP

SEQ ID NO: 4753 - protein, 13 aa, Homo sapiens
MIIYLYLFVVIVA

SEQ ID NO: 4754 - protein, 345 aa, Homo sapiens
MAAAFRPSNRVLLQALQILVYPGVGGSGSVSCRCPLGAKRYLLTDNVVKLKEFQQKKVAVACNLSGTKETYFRNLKKKLTQNKLILKGELITLLHLCESRDHVELAKNVIYRYHAENKNFTLGEYKFGPLFVRLCYELDLEESAVELMKDQHLRGFFSDSTSFNILMDMLFIKGKYKSALQVLIEMKNQDVKFTKDTYVLAFAICYKLNSPESFKICTTLREEALLKGEILSRRASCFAVALALNQNEMAKAVSIFSQIMNPESIACINLNLAKVREKVKDVPALVAKFDEIYGTLHITGQVTTDSLDAVLCHTPRDRKSHTLLLNKRMVSRRTFQPLSQSLLAE

SEQ ID NO: 4755 - protein, 107 aa, Homo sapiens
MGSSLGLCLGKAPSSSQLFLFFAMGSDVQPGTEMEIVVEETISVRDCLKLMLKKSGLQGDAWHLRKMDWCYEAGEPLCEEDATLKELLICSGDTLLLIEGQLPPLGS

SEQ ID NO: 4756 - protein, 42 aa, Homo sapiens
MFAASIWSALPVCLFLFSVFSIFSSLVHAFCFALVPGAYLPN

SEQ ID NO: 4757 - protein, 69 aa, Homo sapiens
MFYSVAFSIFAMLCNHRHYPFLELFRHPRQTLCIHKKITSYLSLPLVFGNLCYTGKLCWLCVCVEFGLF

SEQ ID NO: 4758 - protein, 350 aa, Homo sapiens
MRFNLKEVLQVMPSDSFFFSIVRDPAALARSAFSYYKSTSSAFRKSPSLAAFLANPRGFYRPGARGDHYARNLLWFDFGLPFPPEKRAKRGNIHPPRDPNPPQLQVLPSGAGPRAQTLNPNALIHPVSTVTDHRSQISSPASFDLGSSSFIQWGLAWLDSVFDLVMVAEYFDESLVLLADALCWGLDDVVGFMHNAQAGHKQGLSTVSNSGLTAEDRQLTARARAWNNLDWALYVHFNRSLWARIEKYGQGRLQTAVAELRARREALAKHCLVGGEASDPKYITDRRFRPFQFGSAKVLGYILRSGLSPQDQEECERLATPELQYKDKLDAKQFPPTVSLPLKTSRPLSP

SEQ ID NO: 4759 - protein, 36 aa, Homo sapiens
MVSCFTGVDSTWLLYIVFFVFFIDIVVHIFRIHMVF

SEQ ID NO: 4760 - protein, 58 aa, Homo sapiens [sequence omitted]

SEQ ID NO: 4761 - protein, 5 aa, Homo sapiens
PGNLL

SEQ ID NO: 4762 - protein, 10 aa, Homo sapiens
MCFLLLPCLL

SEQ ID NO: 4763 - protein, 30 aa, Homo sapiens
MALLYFTSLLLIPRTMSSTLYVLNKYLVGG

SEQ ID NO: 4764 - protein, 26 aa, Homo sapiens
MQCQLLCLVVYLFLFVLVMLTYVFSV

SEQ ID NO: 4765 - protein, 15 aa, Homo sapiens
MHNSNFAYHLLLNLQ

SEQ ID NO: 4766 - protein, 45 aa, Homo sapiens
MKAPPSHWSLWLSFCHPPPWLFALNKLAQRALEKHFIPSSYANSV

SEQ ID NO: 4767 - protein, 53 aa, Homo sapiens
MLFLLCSYFICVSHSFVSTYYSVYFCFLTCLHSVVPTYMLRSQMDYDIRKKAE

SEQ ID NO: 4768 - protein, 4 aa, Homo sapiens
METD

SEQ ID NO: 4769 - protein, 9 aa, Homo sapiens
LVTVSSHKI

SEQ ID NO: 4770 - protein, 46 aa, Homo sapiens
MPVTPFSSFFCASMIVTPFLFFFFFETAWATERDSISKKKKKYIYI

SEQ ID NO: 4771 - protein, 12 aa, Homo sapiens
KILIVLLWLVLQ

SEQ ID NO: 4772 - protein, 28 aa, Homo sapiens
PRLACLLSSLLLRIVFLPHTPLAPCSLL

SEQ ID NO: 4773 - protein, 34 aa, Homo sapiens
MPRPSLTLGLLLPSQHLCANHTLLQHFFNPKIIA

SEQ ID NO: 4774 - protein, 16 aa, Homo sapiens
MCVTAIYKPIWCNSYP

SEQ ID NO: 4775 - protein, 29 aa, Homo sapiens
MKLLFFLMRDVNSISLLYLITCLPCFCVT

SEQ ID NO: 4776 - protein, 14 aa, Homo sapiens
MASHGGFDLHFPGV

SEQ ID NO: 4777 - protein, 8 aa, Homo sapiens
MVNLCLEV

SEQ ID NO: 4778 - protein, 55 aa, Homo sapiens
MKEAFRWALFSMQATGHVLLGTSCYLQQLLDATEEGQPPKGKASSLIPTCLKILQ

SEQ ID NO: 4779 - protein, 55 aa, Homo sapiens
IPLTMRLTKTFTFVQKVKKKKTWLRKRRHVTSSYTPITVALQKIKITTFKKINLI

SEQ ID NO: 4780 - protein, 12 aa, Homo sapiens
MFSLEVLFLFAG

SEQ ID NO: 4781 - protein, 43 aa, Homo sapiens
LCLITWLLFPTCTMTKMPSTYLIQPFQYNSYTCHLSKPKGTSS

SEQ ID NO: 4782 - protein, 18 aa, Homo sapiens
MSSLQIFSPILWLVSSLC

SEQ ID NO: 4783 - protein, 55 aa, Homo sapiens
  SITE (18): Xaa equals any of the naturally occurring L-amino acids
  SITE (31): Xaa equals any of the naturally occurring L-amino acids
MIAAPLWSACFLVRVPSXVSLGAPSSLSSSXSPLAVAVVAAHAPGIPLQHSLLSS

SEQ ID NO: 4784 - protein, 37 aa, Homo sapiens
MKQICTGTIALLWLEMPLFWGQTFKMPLCLPVRSPKH

SEQ ID NO: 4785 - protein, 37 aa, Homo sapiens
MIIWGCLLIVSVCVEGTESFRLGNSNLLFMIKYKSRM

SEQ ID NO: 4786 - protein, 44 aa, Homo sapiens
MFVISHVLVICCLWVWTEFVGKTIFCIGYSSQQCPPQKAFSQNI

SEQ ID NO: 4787 - protein, 33 aa, Homo sapiens
  SITE (26): Xaa equals any of the naturally occurring L-amino acids
  SITE (32): Xaa equals any of the naturally occurring L-amino acids
MTFLTSFPIILHLAPCSSCSSFFFFXLFQICXF

SEQ ID NO: 4788 - protein, 49 aa, Homo sapiens
MASGFLFCWAKALWGWRGWCWCCTGLTAALTQRFPPSLLPVCCVDLFLV

SEQ ID NO: 4789 - protein, 33 aa, Homo sapiens
CMFILVNMIVVSAPVAHGVLPRICDSVNDMYLN

SEQ ID NO: 4790 - protein, 45 aa, Homo sapiens
  SITE (31): Xaa equals any of the naturally occurring L-amino acids
MHVLLFSFLIPFLLLSPVGVTCNSHMLERQXSWLKKRSTQASQHV

SEQ ID NO: 4791 - protein, 13 aa, Homo sapiens
HVLFDAFSLLHCF

SEQ ID NO: 4792 - protein, 81 aa, Homo sapiens
  SITE (22): Xaa equals any of the naturally occurring L-amino acids
MECLLYRTICLFYFLVRFLFSXLLLMKLFLPIINPNSWTLWLGNSLNFQPYGIIVSLSLSLLLSLFSSSPYFLSNKYCLLI

SEQ ID NO: 4793 - protein, 218 aa, Homo sapiens
MAMFEQMRANVGKLLKGIDRYNPENLATLERYVETQAKENAYDLEANLAVLKLYQFNPAFFQTTVTAQILLKALTNLPHTDFTLCKCMIDQAHQEERPIRQILYLGDLLETCHFQAFWQALDENMDLLEGITGFEDSVRKFICHVVGITYQHIDRWLLAEMLGDLSDSQLKVWMSKYGWSADESGQIFICSQEESIKPKNIVEKIDFDSVSSIMASSQ

SEQ ID NO: 4794 - protein, 30 aa, Homo sapiens
MASSLLAQIVLGGWLFVGAFNIQRGEYCSD

SEQ ID NO: 4795 - protein, 12 aa, Homo sapiens
MTKILWLFLFLL

SEQ ID NO: 4796 - protein, 27 aa, Homo sapiens
MFGVLLVYLLFYTFATISLVNGMVWGF

SEQ ID NO: 4797 - protein, 22 aa, Homo sapiens
EWNIFLLFSCICLYFSLMNDWS

SEQ ID NO: 4798 - protein, 12 aa, Homo sapiens
RPLWGLGKRSLH

SEQ ID NO: 4799 - protein, 27 aa, Homo sapiens
  SITE (11): Xaa equals any of the naturally occurring L-amino acids
  SITE (27): Xaa equals any of the naturally occurring L-amino acids
MKSDLGPELQXSLILQNTIISAYEKDX

SEQ ID NO: 4800 - protein, 31 aa, Homo sapiens
MWPCMTLLLLYFLFPFQMGIRTVGQQQSQSQ

SEQ ID NO: 4801 - protein, 30 aa, Homo sapiens
TLITCFANFKCLNISETSSKYVGQLKNFDC

SEQ ID NO: 4802 - protein, 43 aa, Homo sapiens
MPLLFFSVSTLFSGSVTLQQRGMFLPWTGTGNRCLPCYGHGLN

SEQ ID NO: 4803 - protein, 20 aa, Homo sapiens
KQLYLESYCLGFLIRHSSPD

SEQ ID NO: 4804 - protein, 14 aa, Homo sapiens
LRPRSPGLAGRGCL

SEQ ID NO: 4805 - protein, 73 aa, Homo sapiens
MGCFVVVVVFVVGHLSIFSHQFCSLLAMDKIGSFWLIKKDNFIKWHFKQAIVSFIICNAHGKAKTFVMKELLI

SEQ ID NO: 4806 - protein, 117 aa, Homo sapiens
VAVHLFALMISTCILPNIEAVSNVHNLNSVKESPHERMHRHIELAWAFSTVIGTLLFLAEVVLLCWVKFLPLKKQPGQPRPTSKPPASGAQPTSAPAASPRARQLPSPRPPSWCPSA

SEQ ID NO: 4807 - protein, 34 aa, Homo sapiens
MSNERFRFRSLTFHLPLFPVVAMFPRLPSQKPCE

SEQ ID NO: 4808 - protein, 27 aa, Homo sapiens
MARHSTSTCFRRSWWRTWCLAAGWAPP

SEQ ID NO: 4809 - protein, 28 aa, Homo sapiens
MVKTVFAHCFLLFHLVTNDQDDLIFFPS

SEQ ID NO: 4810 - protein, 14 aa, Homo sapiens
MCPRLLFSWAFLSR

SEQ ID NO: 4811 - protein, 56 aa, Homo sapiens [sequence omitted]

SEQ ID NO: 4812 - protein, 39 aa, Homo sapiens
MRMLREIVGCLEFHYIFCFYFLIPRCFLKYSDKYLSYID

SEQ ID NO: 4813 - protein, 36 aa, Homo sapiens
MQLFSLFFSFPPSLHPSPIPPSLPYSSRLPPSLPPS

SEQ ID NO: 4814 - protein, 36 aa, Homo sapiens
MDNRTALSVGMVVLLEDCIIGGLVSSSLPGQSSEVL

SEQ ID NO: 4815 - protein, 92 aa, Homo sapiens
MACILFSLLCLILFDFPLQHSVSVKGFYAFTSHVLNTLRTTHLVFTLLPVNVWNLESHRVALKQCVFSLRSSAHFATTREEFSAKANPCSLT

SEQ ID NO: 4816 - protein, 22 aa, Homo sapiens
ERCLLILCVVTQRSSTFPSLCR

SEQ ID NO: 4817 - protein, 70 aa, Homo sapiens
MWLLINLTASRCSSPPCQALCLLIALWGHSLIYSPALGNRSCHYPSLSAQGKINALRIVIIFPRLPSWWC

SEQ ID NO: 4818 - protein, 27 aa, Homo sapiens
ARVCSKVTLLLFWTLLSGKKGCRLPAM

SEQ ID NO: 4819 - protein, 350 aa, Homo sapiens [sequence omitted]

SEQ ID NO: 4820 - protein, 55 aa, Homo sapiens
MYCLWLLLLYNSWVEYLEQRPNVWQKSNIFTILYRKKMSTYIYTYYNFSKNTEFK

SEQ ID NO: 4821 - protein, 27 aa, Homo sapiens
MTVMVTLLFLLRYVTALRLTRATWSCW

SEQ ID NO: 4822 - protein, 71 aa, Homo sapiens
MIMSSSNSSIWPAMPCMLLSVYSYLFSCISHGSPRLSALQPPKPCSSFSNSSAPYLRAFASARCTSFPYFT

SEQ ID NO: 4823 - protein, 57 aa, Homo sapiens
MDFLCFLLLSGATPALTSSGTSCQHSPHSLMPQSCHTRLIPCLPVCLQPDAARPRLP

SEQ ID NO: 4824 - protein, 2 aa, Homo sapiens
FP

SEQ ID NO: 4825 - protein, 24 aa, Homo sapiens
IRRVLWAPGQPSCLSSPAVSRGRW

SEQ ID NO: 4826 - protein, 24 aa, Homo sapiens
IRRVLWAPGQPSCLSSPAVSRGRW

SEQ ID NO: 4827 - protein, 24 aa, Homo sapiens
IRRVLWAPGQPSCLSSPAVSRGRW

SEQ ID NO: 4828 - protein, 54 aa, Homo sapiens
MCQTWARCLRLMFHPTCLTCPALPTTSCTLPTWAPALPPLPLAPFQNCPPSTLR

SEQ ID NO: 4829 - protein, 13 aa, Homo sapiens
MLPGVLWYLARCR

SEQ ID NO: 4830 - protein, 31 aa, Homo sapiens
MVGPRLPMGLLFVASFLFLFIQCVHMPRSYL

SEQ ID NO: 4831 - protein, 89 aa, Homo sapiens
  SITE (67): Xaa equals any of the naturally occurring L-amino acids
  SITE (70): Xaa equals any of the naturally occurring L-amino acids
  SITE (79): Xaa equals any of the naturally occurring L-amino acids
MRSPHVRVHLVYFQRLARGSDERTCSAPAFSSFREFSRGLQRFPHAASHSSCTIVHSNSNGQGLQSXRIXANIYYFMWXFFLFFFFFFF

SEQ ID NO: 4832 - protein, 11 aa, Homo sapiens
VKTSHVFESEN

SEQ ID NO: 4833 - protein, 91 aa, Homo sapiens
MNKSTFLFLIIMWPNVYISLSVAHHIVLTKTISSFTPAQIFKYSLLFPTSVSGIAILFKTYLKNVQASHLCVKLFSLFQCDEKNWTEHTFL

SEQ ID NO: 4834 - protein, 37 aa, Homo sapiens
MYMLVCICVFILNSYICCIYLVLSMLYDSTTSKMDQV

SEQ ID NO: 4835 - protein, 40 aa, Homo sapiens
LCLMCWWLPGGLASDSEEDTKKLIVSLNWLFYLLRLCLSY

SEQ ID NO: 4836 - protein, 36 aa, Homo sapiens
MHLCCNLCWYALDLVFPWFFAAVSQVARFDISLSLI

SEQ ID NO: 4837 - protein, 2 aa, Homo sapiens
SL

SEQ ID NO: 4838 - protein, 31 aa, Homo sapiens
MGMSSPAFQKQKEGQSDLLVPAFCFCFCFCF

SEQ ID NO: 4839 - protein, 15 aa, Homo sapiens
MCIFLVSTSTLLALP

SEQ ID NO: 4840 - protein, 6 aa, Homo sapiens
MISVHL

SEQ ID NO: 4841 - protein, 44 aa, Homo sapiens
  SITE (14): Xaa equals any of the naturally occurring L-amino acids
  SITE (26): Xaa equals any of the naturally occurring L-amino acids
  SITE (27): Xaa equals any of the naturally occurring L-amino acids
MCLLIVTPGIGFLXFIVRIGGSGDTXXVEWRRKDLLIIREEHVG

SEQ ID NO: 4842 - protein, 28 aa, Homo sapiens
KELLISLVASLFMGFGVLFLLLWVGIYV

SEQ ID NO: 4843 - protein, 25 aa, Homo sapiens
MKSCLWFLTSLSRVSASLGELHISS

SEQ ID NO: 4844 - protein, 23 aa, Homo sapiens
MFQWFFLFVVFVFVLPFSFTGLF

SEQ ID NO: 4845 - protein, 18 aa, Homo sapiens
MCLCVCVCVCARACALVA

SEQ ID NO: 4846 - protein, 21 aa, Homo sapiens
MFSCFFLLPMFCILTPLLSGI

SEQ ID NO: 4847 - protein, 26 aa, Homo sapiens
MQCVYHSIWYTAMVIPFLFSFQIIAP

SEQ ID NO: 4848 - protein, 5 aa, Homo sapiens
MNNDC

SEQ ID NO: 4849 - protein, 92 aa, Homo sapiens
VGSPTRQIATLLCLALWILPLLFLPSLCLWLYPSPPSISLSLVSLLSLDHVFFISMYLPLVMCASYLKVCPSFISFVNLGNYMSIPGLFWIE

SEQ ID NO: 4850 - protein, 9 aa, Homo sapiens
FCTHAFTSE

SEQ ID NO: 4851 - protein, 100 aa, Homo sapiens
  SITE (14): Xaa equals any of the naturally occurring L-amino acids
  SITE (22): Xaa equals any of the naturally occurring L-amino acids
  SITE (30): Xaa equals any of the naturally occurring L-amino acids
  SITE (45): Xaa equals any of the naturally occurring L-amino acids
  SITE (50): Xaa equals any of the naturally occurring L-amino acids
MCPSALHTFTPAMXSCAAYLGXPTQCSTSXPAPLKTQSHMNLAFXFSNIXTSVLLVPTSPSPAWRKGYFQGTTVVQLSQVFLLSINHPAALGCPASQPSG

SEQ ID NO: 4852 - protein, 16 aa, Homo sapiens
MAKKVPVYLMPSFPCC

SEQ ID NO: 4853 - protein, 16 aa, Homo sapiens
VATVSGEQNRTTVILG

SEQ ID NO: 4854 - protein, 36 aa, Homo sapiens
QQRLPWKSTTFPFFMGLSSLWESLEIPLLFTATSSL

SEQ ID NO: 4855 - protein, 1 aa, Homo sapiens
G

SEQ ID NO: 4856 - protein, 34 aa, Homo sapiens
  SITE (8): Xaa equals any of the naturally occurring L-amino acids
  SITE (9): Xaa equals any of the naturally occurring L-amino acids
  SITE (10): Xaa equals any of the naturally occurring L-amino acids
LFSCCLFXXXVLKPCLGHPTGELGHHLALWWQWG

SEQ ID NO: 4857 - protein, 52 aa, Homo sapiens
LLLLLAVVGTRWLLPAAAAAYPPPDWSRWPWASSPPPPWLCPPAAPGSHRGR

SEQ ID NO: 4858 - protein, 57 aa, Homo sapiens
MIPMRKVNTSLWFSLCLLQLTLQIWKQYGRRQNRKTLWIQNLDVCLNCQQRMINHMM

SEQ ID NO: 4859 - protein, 47 aa, Homo sapiens [sequence omitted]

SEQ ID NO: 4860 - protein, 79 aa, Homo sapiens
MGLRPPQAQMPPPMPALGSSGPHPPVPPTHPNMEGLCLPRACLSGACRTLPETLRTAPRKSSLMPTKASRTVRRSSPRR

SEQ ID NO: 4861 - protein, 63 aa, Homo sapiens
MAFILLFYCLMTFLSLEQNSATVEPSSHEILHLLQNCFELLRTSTSQCTEGIPCQRYQNGLHI

SEQ ID NO: 4862 - protein, 168 aa, Homo sapiens
MSGLSGPPARRGPFPLALPAQHLKITDSAGHILYSKEDATKGKFAFTTEDYDMFEVCFESKGTGRIPDQLVILDMKHGVEAKNYEEIAKVEKLKPLEVELRRLEDLSESIVNDFAYMKKREEEMRDTNESTNTRVLYFSIFSMFCLIGLATWQVFYLRRFFKAKKLIE

SEQ ID NO: 4863 - protein, 35 aa, Homo sapiens
MYVCVWLIFTSKFLRFMLLCVSEVSFYLLLSSIHL

SEQ ID NO: 4864 - protein, 35 aa, Homo sapiens
MWCALGFWGRAWGSRGPWAAQPGEPQPRGWSCSGN

SEQ ID NO: 4865 - protein, 35 aa, Homo sapiens; identical to SEQ ID NO: 4864

SEQ ID NO: 4866 - protein, 35 aa, Homo sapiens; identical to SEQ ID NO: 4864

SEQ ID NO: 4867 - protein, 52 aa, Homo sapiens
MYRAVSLPGAMGWACPAVMAPCFLLLGAGSRTLPTIHAVAPRAEPLLVLWQP

SEQ ID NO: 4868 - protein, 15 aa, Homo sapiens
MPANVQMQLVDTKAG

SEQ ID NO: 4869 - protein, 18 aa, Homo sapiens
MSVTSAWCGVWIIYRIIK

SEQ ID NO: 4870 - protein, 215 aa, Homo sapiens
DAVLAWWLCLEWQHLHVQLAPSAYGCWHGGILWRCVTGVPPAPVVGGAQTALETPPCSAAPDGLRPHCCGAGCCLYVSQPWKDCQPLLPSQLAGHHHCLPLRLPVVPGLCCLPPALGVHVAAQLLKPIHVFFGAAILSLSIASVISGINEKLFFSLKNTTRPYHSLPSEAVFANSTGMLVVAFGLLVLYILLASSWKRPEPGILTDRQPLLHDGE

SEQ ID NO: 4871 - protein, 39 aa, Homo sapiens
MPARVCFCAAAQGGAAAAHCAAGTQEWGVAPAGRRVPRD

SEQ ID NO: 4872 - protein, 24 aa, Homo sapiens
MSQYCFLLAGVLSSLLTPATKADF

SEQ ID NO: 4873 - protein, 21 aa, Homo sapiens
ISRRCILFDNSFSYRLPLQTT

SEQ ID NO: 4874 - protein, 200 aa, Homo sapiens
MHSLVLLCPLCSDPCGVCVAPKHSHSQGQQPDSELHPPCLPHTLLSLFLALHRPPQPCHLPPLTDHLCSCVHSGCVFCRAFQAIRPESRIRKWMGPQKTNSVVFLCSFTQVTLCGIWLGTEPPFVNKDPQFMPGYIIIQCNEGSVTAFYSVLGYLGFLVLGSLAVAFLARNLPDAFNEAKFLTFSMLVSCSVWVAFLPSY

SEQ ID NO: 4875 - protein, 51 aa, Homo sapiens
MLCNLHFLYFWHFFANGTCNSTLQIARVVSSLTPSQNTAFIVVSLSRELGY

SEQ ID NO: 4876 - protein, 54 aa, Homo sapiens
DLHFTLACSVLFVWAYSSRRNLPEVPSVTNSALSMESCYCQTGGLRDMLFSATS

SEQ ID NO: 4877 - protein, 35 aa, Homo sapiens
MFVTPPRLTFNLFTLRSWFYVCDCLLSLLLSPSGR

SEQ ID NO: 4878 - protein, 54 aa, Homo sapiens
MSFYRLVHSNQDLNSLRGLLMEFVFLFHLFQSKAVFPSFSFPCCCLVEIQSSIQ

SEQ ID NO: 4879 - protein, 76 aa, Homo sapiens
  SITE (51): Xaa equals any of the naturally occurring L-amino acids
MPIPFPGEQVHLPFLSLLAHWHQTQLPSKGPLASRAQIQPFSQEPLGHLAXTQLTSQGPLACRVQVQLPSQGLLAH

SEQ ID NO: 4880 - protein, 38 aa, Homo sapiens
MIHSLLLLLLLLLLLLILLRISISRLTGTNTLVFNLIL

SEQ ID NO: 4881 - protein, 37 aa, Homo sapiens
MQEARQQITTVVLPTLAVVVLLIVVFVYVATRPTITE

SEQ ID NO: 4882 - protein, 21 aa, Homo sapiens
MTHYVFLLLFMVGRGDEGKSG

SEQ ID NO: 4883 - protein, 41 aa, Homo sapiens [sequence omitted]

SEQ ID NO: 4884 - protein, 53 aa, Homo sapiens
MSNLSLRYSSSKGSWGSLFPNIRIMQIFLLMVDAHCVYISQPFKHESEKSFSK

SEQ ID NO: 4885 - protein, 17 aa, Homo sapiens
MWLSREVLVLISISASG

SEQ ID NO: 4886 - protein, 20 aa, Homo sapiens
MNPCFFSVLVLLPELALQWK

SEQ ID NO: 4887 - protein, 30 aa, Homo sapiens
MLLCFMRIKIPALLCLWYLPLHILVMAWEV

SEQ ID NO: 4888 - protein, 33 aa, Homo sapiens
MPLLLRWVSWLQVWKPRPPLSRRRKTSQLKPRS

SEQ ID NO: 4889 - protein, 233 aa, Homo sapiens
EILERPAQLANARETPHSPGVEDAPIAKVGVLAASMEAKASSQQEKEDKPAETKKLRIAWPPPTELGSSGSALEEGIKMSKPKWPPEDEISKPEVPEDVDLDLKKLRRSSSLKERSRPFTVAASFQSTSVKSPKTVSPPIRKGWSMSEQSEESVGGRVAERKQVENAKASKKNGNVGKTTWQNKESKGETGKRSKEGHSLEMENENLVENGADSDEDDNSFLKQQSPPRNPSL

SEQ ID NO: 4890 - protein, 49 aa, Homo sapiens
MHLFICTLWNIFCNKPVSWSSVSCSNKFIKPKEGVVGIPIYRRLVRSTS

SEQ ID NO: 4891 - protein, 20 aa, Homo sapiens
MILSTNLFTDLFILFLVLHS

SEQ ID NO: 4892 - protein, 12 aa, Homo sapiens
MAHPNRILLVPW

SEQ ID NO: 4893 - protein, 35 aa, Homo sapiens
MTKIVNTSLFLASVTIIVSATSGVEQPSTQRSLAF

SEQ ID NO: 4894 - protein, 66 aa, Homo sapiens [sequence omitted]

SEQ ID NO: 4895 - protein, 30 aa, Homo sapiens
MLSSVMLLSVLQVHLHLRAELHLLPLPLQR

SEQ ID NO: 4896 - protein, 29 aa, Homo sapiens
VNLDHLVKVVFARFLHYKVNIFPFPYYFL

SEQ ID NO: 4897 - protein, 38 aa, Homo sapiens
MCEARQLLVLQLLCGKQKPFCSVPQPAFVSRIEELFHK

SEQ ID NO: 4898 - protein, 17 aa, Homo sapiens
MKIRKRRNWASWRISVV

SEQ ID NO: 4899 - protein, 24 aa, Homo sapiens
  SITE (21): Xaa equals any of the naturally occurring L-amino acids
MVIIFILYILCIPVIKCRVLXSII

SEQ ID NO: 4900 - protein, 6 aa, Homo sapiens
IVLWLQ

SEQ ID NO: 4901 - protein, 41 aa, Homo sapiens
MEISAVTLGLLIRSVWGGAQESAFLIRSPAPLPHYSSAKRS

SEQ ID NO: 4902 - protein, 29 aa, Homo sapiens
MAVGLVVFFTTFLTPAAYVLGNLKQFRRN

SEQ ID NO: 4903 - protein, 11 aa, Homo sapiens
MGKRHRGKRMV

SEQ ID NO: 4904 - protein, 24 aa, Homo sapiens
MKEELWSVFRWVIILLQCRILMLP

SEQ ID NO: 4905 - protein, 40 aa, Homo sapiens
MIVLGWMFFVGLVCYMGTFPELMEPCGRDINIPQEGLQWK

SEQ ID NO: 4906 - protein, 17 aa, Homo sapiens
  SITE (12): Xaa equals any of the naturally occurring L-amino acids
MLSGWLFWLLWXSCISR

SEQ ID NO: 4907 - protein, 37 aa, Homo sapiens
MFLAVLLLILMLFLILVYHQVYISHGEKKIGLMYQGP

SEQ ID NO: 4908 - protein, 33 aa, Homo sapiens [sequence omitted]

SEQ ID NO: 4909 - protein, 44 aa, Homo sapiens
MFFGLLLMILFTLCQILSCRLFYNSTFKKNVYANLLSIFMSIFI

SEQ ID NO: 4910 - protein, 31 aa, Homo sapiens
MFCVVVLSLEATGYGRFTFTGGPLMTTAPST

SEQ ID NO: 4911 - protein, 35 aa, Homo sapiens
MSWCLDLRTTQRTLTIPALVHTTQRRSHRQKLPGQ

SEQ ID NO: 4912 - protein, 322 aa, Homo sapiens
MEASAAAVFSHFIMKFPWQWAFLLGFVLGAVSPAVVVPYMMVLQENGYGVEEGIPTLLMAASSMDDILAITGFNTCLSIVFSSGGILNNAIASIRNVCISLLAGIVLGFFVRYFPSEDQKKLTLKRGFLVLTMCVSAVLGSQRIGLHGSGGLCTLVLSFIAGTKWSQEKMKVQKIITTVWDIFQPLLFGLVGAEVSVSSLESNIVGISVATLSLALCVRILTTYLLMCFAGFSFKEKIFIALAWMPKATVQAVLGPLALETARVSAPHLEPYAKDVMTVAFLAILITAPNGALLMGILGPKMLTRHYDPSKIKLQLSTLEHH

SEQ ID NO: 4913 - protein, 32 aa, Homo sapiens
MNFKFPCATTVFILTTLKPVVSSFCYCEVDTQ

SEQ ID NO: 4914 - protein, 21 aa, Homo sapiens
CDIAFFLFLLLFSAAADLEMK

SEQ ID NO: 4915 - protein, 142 aa, Homo sapiens
  SITE (111): Xaa equals any of the naturally occurring L-amino acids
MHQLLQLQRQEPCRLLSPSPQPGLHHLCFQQIELLLLLLHLQWGLGLLRQLHHKRLAQLLLHRRRDHPIPPIQDILGIAKCPCPWAIILMRMASIICHIHQCITRVLDRLXTRDPSSLHTPSLSPHSSLTIHSSNMSAQQLS

SEQ ID NO: 4916 - protein, 10 aa, Homo sapiens
MRFFCVIFVF

SEQ ID NO: 4917 - protein, 23 aa, Homo sapiens
HLHVSLLSFPPLFIHSANLSANQ

SEQ ID NO: 4918 - protein, 23 aa, Homo sapiens
MHVFLTFIGLSGTFCELPVTFLC

SEQ ID NO: 4919 - protein, 52 aa, Homo sapiens
MLREFWLLFLFCLGREHMSKCDKCEQIIWRGEEIQERGGPVFSLFWKNNHFS

SEQ ID NO: 4920 - protein, 34 aa, Homo sapiens
MKNLTHFFLSLSSLSSFLFLVSSSFSRRAGPGQG

SEQ ID NO: 4921 - protein, 42 aa, Homo sapiens
MMTITFCVYLPILSLWHWLVMRNGHTTIQMEVQLGFPKSPLM

SEQ ID NO: 4922 - protein, 16 aa, Homo sapiens
MNGLCILTHLILSTIL

SEQ ID NO: 4923 - protein, 34 aa, Homo sapiens
MRDLVLKIVFFYNFLGITCFTVAGTNLINPVFEQ

SEQ ID NO: 4924 - protein, 73 aa, Homo sapiens
  SITE (13): Xaa equals any of the naturally occurring L-amino acids
  SITE (36): Xaa equals any of the naturally occurring L-amino acids
  SITE (40): Xaa equals any of the naturally occurring L-amino acids
  SITE (51): Xaa equals any of the naturally occurring L-amino acids
  SITE (62): Xaa equals any of the naturally occurring L-amino acids
MISFIRYQLFLHXIKIILHWLILIFCWSSHFPGSHXPHSXPAKVKVGNLWXWKQSQVTWPTXEMEPMALPMHL

SEQ ID NO: 4925 - protein, 16 aa, Homo sapiens
MRGKHVCLLLLLLGRF

SEQ ID NO: 4926 - protein, 28 aa, Homo sapiens
MMELVLMASEVSGQSAQILASFLALVSL

SEQ ID NO: 4927 - protein, 15 aa, Homo sapiens
MHRAFLVTNRRWALR

SEQ ID NO: 4928 - protein, 22 aa, Homo sapiens
MSLILFLLINIRWDLSLVLSQR

SEQ ID NO: 4929 - protein, 39 aa, Homo sapiens
MKKIVFPFPGSFNSLFLRLFFSSLLSYSIQTSPCLILKR

SEQ ID NO: 4930 - protein, 44 aa, Homo sapiens
MRRQPLALRSLLCTLPLVPGVAIYLVGPRPLSSRKASVLSSALC

SEQ ID NO: 4931 - protein, 38 aa, Homo sapiens
MPAATWHPLSCLLSFLVCAVVGCISPFLHCNKGIPEIG

SEQ ID NO: 4932 - protein, 27 aa, Homo sapiens
MFPMLFCVLGHLMHFSRASCFPSVRIP

SEQ ID NO: 4933 - protein, 20 aa, Homo sapiens
GTYPLFLECLSLSCLLSGPQ

SEQ ID NO: 4934 - protein, 32 aa, Homo sapiens
MFLLFLRSLPYILCIVKPFLKSNDLGKPTLVC

SEQ ID NO: 4935 - protein, 14 aa, Homo sapiens
MFEGPGRAVACLCL

SEQ ID NO: 4936 - protein, 20 aa, Homo sapiens
MCWLAAKNLLECKYASLHHL

SEQ ID NO: 4937 - protein, 39 aa, Homo sapiens
MWLKIGFLSIFSLVLFYKTSLSTYHVPYSLVGPEDKEMY

SEQ ID NO: 4938 - protein, 12 aa, Homo sapiens
MAASMHQCFPLT

SEQ ID NO: 4939 - protein, 37 aa, Homo sapiens
MMCFLGAGCIEFKTWTMAWIAWVQILPLLYHFRQAGP

SEQ ID NO: 4940 - protein, 23 aa, Homo sapiens
MEVGVSLLCRIWDWANVCVASLN

SEQ ID NO: 4941 - protein, 7 aa, Homo sapiens
SFKLLIT

SEQ ID NO: 4942 - protein, 72 aa, Homo sapiens
  SITE (43): Xaa equals any of the naturally occurring L-amino acids
MPACGSLPPRAHQPWCPAGLLQSLVLEQLLEFSAASSPQPSRXSELLPGQHLLGPVLRPHGAGLMWELILAG

SEQ ID NO: 4943 - protein, 21 aa, Homo sapiens
MAFLKGWLPFCWSQRSIHSYL

SEQ ID NO: 4944 - protein, 80 aa, Homo sapiens
IGHIMLLVFPKCLVIFYCSFNYRLHFFVCLFLLSSQMLPNMAASNPEFNPGTILQTAQFSSEWAICIPTHQSYYLKNYIF

SEQ ID NO: 4945 - protein, 67 aa, Homo sapiens
PFNTILLFCLYFLLTVHIINYVIYFFIAGSFNPVLCLGDAPIQLHVTVACSFPVSCSVPSCEFITVY

SEQ ID NO: 4946 - protein, 43 aa, Homo sapiens
MCVCVYIYIYVYIYVYICIYVYINQNEKPFWILRATKFREVIS

SEQ ID NO: 4947 - protein, 45 aa, Homo sapiens
MFYNFLLIFIFLVCQSSPLTSHIYLCCILAWCLAWRRHWNIGKNE

SEQ ID NO: 4948 - protein, 23 aa, Homo sapiens
  SITE (4): Xaa equals any of the naturally occurring L-amino acids
  SITE (15): Xaa equals any of the naturally occurring L-amino acids
GPGXEVIESWEPSLXLCCSGGGE

SEQ ID NO: 4949 - protein, 92 aa, Homo sapiens
MPFQFPKKARLVPLLGLCLEYSQTLSRAPAWMSVSRGPPHSTWIKAGLPGALHHTPFPPSACLARPARSFHDGRAWPLLHAMQAWPLPTTGP

SEQ ID NO: 4950 - protein, 27 aa, Homo sapiens
MFYWQRLGLALLASVLGFFLCTADWLS

SEQ ID NO: 4951 - protein, 33 aa, Homo sapiens
MLTTYWVLCSLPIGYCAHYLLGTLVTASYNIPM

SEQ ID NO: 4952 - protein, 190 aa, Homo sapiens
IALRLTLLPASSAALHLRRSPVCLQLLPRQLIKQPVRLMFTKVKLEQVLKGPEEALVTCRQVLRLWQTLYSFSQLGGLEKDGSFGEGLTMKKQSGMHLTLPDAHDADSGSRRASSIAASRLEEAMSELTMPSSVLKQGPMQLWTTLEQIWLQAAELFMEQQHLKEAGFCTGGGGPLPHFSLSTLYAGPAG

SEQ ID NO: 4953 - protein, 194 aa, Homo sapiens
MCGSCWAFSVTGNVEGQWFLNQGTLLSLSEQELLDCDKMDKACMGGLPSNAYSAIKNLGGLETEDDYSYQGHMQSCNFSAEKAKVYINDSVELSQNEQKLAAWLAKRGPISVAINAFGMQFYRHGISRPLRPLCSPWLIDHAVLLVGYGNRSDVPFWAIKNSWGTDWGEKGYYYLHRGSGACGVNTMASSAVVD

SEQ ID NO: 4954 - protein, 232 aa, Homo sapiens [sequence omitted]

SEQ ID NO: 4955 - protein, 75 aa, Homo sapiens
WVSLCTLASVLLGAGAVSHARACEGTTGVNESPMMTWGEVENTPLRVEGSETPYVDRTPGPAFKILEPGRRNGWV

SEQ ID NO: 4956 - protein, 49 aa, Homo sapiens
MSMFWLKKLLESGLFCAMCSPRASTKKGFWCRPKTTIIIIDYSSPRQCL

SEQ ID NO: 4957 - protein, 93 aa, Homo sapiens
MLCAAAIATVASSCREGLVPCAAQQLLEVKLEQVLLLPQPHVPGKGAASSPSGSSGPTCGSCCRPPLPRAPPVGPSYTRCSPGRCTSRPRSRS

SEQ ID NO: 4958 - protein, 176 aa, Homo sapiens
MAWSSPAGLLRFLFRQLLLATQGGPKGKEQSVLAPQPGPGPPFTLKPRVFLHLYISNTPKGAARDIYLPPTSEGGLPHSPPMRLQAHVLGQLKPVCYVAPSLCDTHVGCLSASDKLARWAVLGLGGALLAHLVSPLYSTSLILVPPWGLPPVSARPPFSGPFTRRPGLWGSPTSWP

SEQ ID NO: 4959 - protein, 8 aa, Homo sapiens
MSEGLLCL

SEQ ID NO: 4960 - protein, 170 aa, Homo sapiens
MILTMLLMLKLCTEVRVANELNARRRSFTDFDPHHFWQWSSFSDYVQCVLAFTGVAGYITYLSIDSALFVETLGFLAVLTEAMLGVPQLYRNHRHQSTEGMSIKMVLMWTSGDAFKTAYFLLKGAPLQFSVCGLLQVLVDLAILGQAYAFARHPQKPAPHAVHPTGTKAL

SEQ ID NO: 4961 - protein, 13 aa, Homo sapiens
MASLCSCLTALMC

SEQ ID NO: 4962 - protein, 13 aa, Homo sapiens
MASLCSCLTALMC

SEQ ID NO: 4963 - protein, 152 aa, Homo sapiens
MQGTPGGGTRPGPSPVDRRTLLVFSFILAAALGQMNFTGDQVLRVLAKDEKQLSLLGDLEGLKPQKVDFWRGPARPSLPVDMRVPFSELKDIKAYLESHGLAYSIMIKDIQVLLDEERQAMAKSRRLERSTNSFSYSSYHTLERYIAGLTTL

SEQ ID NO: 4964 - protein, 75 aa, Homo sapiens [sequence omitted]

SEQ ID NO: 4965 - protein, 35 aa, Homo sapiens [sequence omitted]

SEQ ID NO: 4966 - protein, 314 aa, Homo sapiens
MVKLLVAKILCMVGVFFFMLLGSLLPVKIIETDFEKAHRSKKILSLCNTFGGGVFLATCFNALLPAVREKLQKVLSLGHISTDYPLAETILLLGFFMTVFLEQLILTFRKEKPSFIDLETFNAGSDVGSDSEYESPFMGGARGHALYVEPHGHGPSLSVQGLSRASPVRLLSLAFALSAHSVFEGLALGLQEEGEKVVSLFVGVAVHETLVAVALGISMARSAMPLRDAAKLAVTVSAMIPLGIGLGLGIESAQGVPGSVASVLLQGLAGGTFLFITFLEILAKELEEKSDRLLKVLFLVLGYTVLAGMVFLKW

SEQ ID NO: 4967 - protein, 174 aa, Homo sapiens
MTFLLMLLLIFFYIFAVTGVYVFSEYTRSPRQDLEYHVFFSDLPNSLVTVFILFTLDHWYALLQDVWKVPEVSRIFSSIYFILWLLLGSIIFRSIIVAMMVTNFQNIRKELNEEMARREVQLKADMFKRQIIQRRKNMSHEALTSSHSKIEDRSFGLGDSCARKSARANGNGSG

SEQ ID NO: 4968 - protein, 170 aa, Homo sapiens
MPIPASPLHPPLPSLLLYLLLELAGVTHVFHVQQTEMSQTVSTGESIILSCSVPNTLPNGPVLWFKGTGPNRKLIYNFKQGNFPRVKEIGDTTKPGNTDFSTRIREISLADAGTYYCVKFIKGRAIKEYQSGRGTQVFVTVSYSSRSQKSEICISGLKSRHQQNCSFWRF

SEQ ID NO: 4969 - protein, 85 aa, Homo sapiens
  SITE (35): Xaa equals any of the naturally occurring L-amino acids
  SITE (74): Xaa equals any of the naturally occurring L-amino acids
  SITE (76): Xaa equals any of the naturally occurring L-amino acids
  SITE (77): Xaa equals any of the naturally occurring L-amino acids
  SITE (83): Xaa equals any of the naturally occurring L-amino acids
MLWTTLTGVSLALFPVAQAPTALVALAVAYGFTSXALAPLAFSVLPELIGTRRIYCGLGLLQMIESIGGLLGPXLXXKWNGVXRG

SEQ ID NO: 4970 - protein, 303 aa, Homo sapiens
MAWCGRLLLSPSPTASPAARLLRTLAETPPADTFLLGNWCWMCQRLWPWPANQPLPGGLLPRPLSLAPSSSSSCCSPPCSQDGRMAAQGAPRFLLTFDFDETIVDENSDDSIVRAAPGQRLPESLRATYREGFYNEYMQRVFKYLGEQGVRPRDLSAIYEAIPLSPGMSDLLQFVAKQGACFEVILISDANTFGVESSLRAAGHHSLFRRILSNPSGPDARGLPAPRLPHAPLSFRRPRRPSPARSAPAWCPGKRCRCAPPPATGAEVVLSLAACRGVPGPTAEGAGKGDSAKTALLKKKKKK

SEQ ID NO: 4971 - protein, 187 aa, Homo sapiens [sequence omitted]

SEQ ID NO: 4972 - protein, 187 aa, Homo sapiens [sequence omitted]

SEQ ID NO: 4973 - protein, 187 aa, Homo sapiens [sequence omitted]

SEQ ID NO: 4974 - protein, 187 aa, Homo sapiens [sequence omitted]

SEQ ID NO: 4975 - protein, 314 aa, Homo sapiens
MGARGALLLALLLARAGLRKPESQEAAPLSGPCGRRVITSRIVGGEDAELGRWPWQGSLRLWDSHVCGVSLLSHRWALTAAHCFETYSDLSDPSGWMVQFGQLTSMPSFWSLQAYYTRYFVSNIYLSPRYLGNSPYDIALVKLSAPVTYTKHIQPICLQASTFEFENRTDCWVTGWGYIKEDEALPSPHTLQEVQVAIINNSMCNHLFLKYSFRKDIFGDMVCAGNAQGGKDACFGDSGGPLACNKNGLWYQIGVVSWGVGCGRPNRPGVYTNISHHFEWIQKLMAQSGMSQPDPSWPLLFFPLLWALPLLGPV

SEQ ID NO: 4976 - protein, 240 aa, Homo sapiens
MGNCQAGHNLHLCLAHHPPLVCATLILLLLGLSGLGLGSFLLTHRTGLRSPDIPQDWVSFLRSFGQLTLCPRNGTVTGKWRGSHVVGLLTTLNFGDGPDRNKTRTFQATVLGSQMGLKGSSAGQLVLITARVTTERTAGTCLYFSAVPGILPSSQPPISCSEEGAGNATLSPRMGEECVSVWSHEGLVLTKLLTSEELALCGSRLLVLGSFLLLFCGLLCCVTAMCFHPRRESHWSRTRL

SEQ ID NO: 4977 - protein, 31 aa, Homo sapiens
MCICVLILICIFTDFIISYVLNFYLWRKHTT

SEQ ID NO: 4978 - protein, 23 aa, Homo sapiens
MHLIIFFIILCTNSACNNQFTWK

SEQ ID NO: 4979 - protein, 51 aa, Homo sapiens
MTLLLWKFNLFIVFWALWVVRAGLWVLGNSSGSQHSKAKLTSSSHTLQEKH

SEQ ID NO: 4980 - protein, 51 aa, Homo sapiens; identical to SEQ ID NO: 4979

SEQ ID NO: 4981 - protein, 51 aa, Homo sapiens; identical to SEQ ID NO: 4979

SEQ ID NO: 4982 - protein, 51 aa, Homo sapiens; identical to SEQ ID NO: 4979

SEQ ID NO: 4983 - protein, 28 aa, Homo sapiens
HEPRVPWSDKLGNAACCTFLSKIHVQRI

SEQ ID NO: 4984 - protein, 15 aa, Homo sapiens
MREVLLFFLFYTRGH

SEQ ID NO: 4985 - protein, 51 aa, Homo sapiens
MPSEAFVIVIQPLIVSTSTDHFVTTSCGSYYSQTVSLKRKPLFYKSTLQVF

SEQ ID NO: 4986 - protein, 34 aa, Homo sapiens
MLMICLLSGRAFAYFFSNYFTSTLILLSQFSYQH

SEQ ID NO: 4987 - protein, 118 aa, Homo sapiens
VARAVCLVFALIVFSCIYGEGYSNAHESKQMYCVFNRNEDACRYGSAIGVLAFLASAFFLVVDAYFPQISNATDRKYLVIGDLLFSALWTFLWFVGFCFLTNQWAVTNPKTCWWGPTL

SEQ ID NO: 4988 - protein, 4 aa, Homo sapiens
CTLL

SEQ ID NO: 4989 - protein, 36 aa, Homo sapiens
HKFSECTVYFGFRRAVYLSLLLLASSALQLPLERAF

SEQ ID NO: 4990 - protein, 62 aa, Homo sapiens
KCFHLLWSLVTSAQRPSDGYFFEAFIYIILFCTMFFLNVQILYSSEKNTVFVDNHSYYTVLR

SEQ ID NO: 4991 - protein, 14 aa, Homo sapiens
MSTFLWDIQTTYCF

SEQ ID NO: 4992 - protein, 16 aa, Homo sapiens
LTLPYLFLGGGWRGGV

SEQ ID NO: 4993 - protein, 31 aa, Homo sapiens
MVCWLLPLWVTVLSFPVGRDVAALLIFTSSY

SEQ ID NO: 4994 - protein, 19 aa, Homo sapiens
LSLLHPLSVPPGSLEQDGV

SEQ ID NO: 4995 - protein, 6 aa, Homo sapiens
GDVWLL

SEQ ID NO: 4996 - protein, 24 aa, Homo sapiens
MCWPWGGPPLPSLPTSLRWMSLCY

SEQ ID NO: 4997 - protein, 24 aa, Homo sapiens
MCWPWGGPPLPSLPTSLRWMSLCY

SEQ ID NO: 4998 - protein, 46 aa, Homo sapiens
NTFWHGSSCLSICQFSCEDSVYRLYTAHVERGQWVLYLKYVLPFCC

SEQ ID NO: 4999 - protein, 43 aa, Homo sapiens
MLLPILLYSFLYPTIVSRNYFKLIRSCMLFLKKKKKKERKISV

SEQ ID NO: 5000 - protein, 23 aa, Homo sapiens
FNSLLLLMLPCYLCCHYPLFFPS

SEQ ID NO: 5001 - protein, 40 aa, Homo sapiens
MSRGCLSLLLIIIHFLGSHCPHLFSLELRFIFILQTGKTE

SEQ ID NO: 5002 - protein, 14 aa, Homo sapiens
FCTTFNFLFVFCLR

SEQ ID NO: 5003 - protein, 37 aa, Homo sapiens
MPSQTARPGLQLFTTPCILQLLWCFAPPVVGNFCTTL

SEQ ID NO: 5004 - protein, 15 aa, Homo sapiens
MAGSHAVWAWHCPGL

SEQ ID NO: 5005 - protein, 31 aa, Homo sapiens
MLSNKIFPVYFQLVKSFIFVVGCCLFTLGGN

SEQ ID NO: 5006 - protein, 71 aa, Homo sapiens
MFLPLSVDYHYRILGFFLSFCSALHPLVVCFFCWALLISLPLVSSPTAYVLKCVFLKYCFPLVTFLLEDFQ

SEQ ID NO: 5007 - protein, 34 aa, Homo sapiens
MSPVLWWSWNLILFMNFQSLEKSMVWIWEVGLAD

SEQ ID NO: 5008 - protein, 37 aa, Homo sapiens
MGLLLFGGIFLLTVIMKVITMRDSDLFLKFGGGISPH

SEQ ID NO: 5009 - protein, 14 aa, Homo sapiens
MFLYRNKFIPVTLW

SEQ ID NO: 5010 - protein, 36 aa, Homo sapiens
MYWVIAGTTFTSLLCLIQFISLVCALLKYLCLNFCI

SEQ ID NO: 5011 - protein, 35 aa, Homo sapiens; identical to SEQ ID NO: 4597

SEQ ID NO: 5012 - protein, 23 aa, Homo sapiens
HLPICFLFSASPGASGHFLLPFL

SEQ ID NO: 5013 - protein, 30 aa, Homo sapiens
MSIFVQVFVWKYVFVSLRYIGKELQNQLCA

SEQ ID NO: 5014 - protein, 47 aa, Homo sapiens
MKCNSCSLGPFHSLFLGPACGLVGTLESRHSRGRGRAAFLAGHSRAL

SEQ ID NO: 5015 - protein, 134 aa, Homo sapiens
MGPEDLGERDNSFHCIFVTATFLETFFWKRLPWLLVQMGVSQGAGLCPWNLSLATCFRDWSGGTEGLGFSLWGLCCLWGYTEGKAGQWGLCCGEWQLAQSRDKILELGRSPAFGVAFGAPGTAGRGAQYLLSSA

SEQ ID NO: 5016 - protein, 48 aa, Homo sapiens [sequence omitted]

SEQ ID NO: 5017 - protein, 33 aa, Homo sapiens
MCLIFSICFLCIHIGFCFVFNLLIMGLNFQIYF

SEQ ID NO: 5018 - protein, 53 aa, Homo sapiens
KEAGTWLVFWIRLDFSTGQDSLFLGRAECHVDSSDRITAVPLSLGFESLGLGH

SEQ ID NO: 5019 - protein, 33 aa, Homo sapiens
MCPYCPTSCALLVMCFLLISLSCLVASSLLLKV

SEQ ID NO: 5020 - protein, 33 aa, Homo sapiens
MCLNLTVISALLWWSGTKVAVAPRYAYTVKNNL

SEQ ID NO: 5021 - protein, 53 aa, Homo sapiens
MKGHFGKGLDELVAFNLCLHLPLSATLGRPGGASEDHRPTGLAIMTPLEVSSS

SEQ ID NO: 5022 - protein, 40 aa, Homo sapiens
EVKCIYIFLWLLMLLVLHLRIHCQIQGHEDLLLCFLLRIL

SEQ ID NO: 5023 - protein, 60 aa, Homo sapiens
  SITE (10): Xaa equals any of the naturally occurring L-amino acids
  SITE (42): Xaa equals any of the naturally occurring L-amino acids
MFFPCLPTLXLRILHSGWVGLFLLISSRAPSSSLAWKHGPGXLWWPRRPLRSCTGLASCG

SEQ ID NO: 5024 - protein, 31 aa, Homo sapiens
MMKMKMKMQWMLMVVMMMIKGVMMNTVMMMT

SEQ ID NO: 5025 - protein, 47 aa, Homo sapiens
MRIYLMLVLVYCELNITALEPKRRCLRHGLLLLCSFQGAPVIPAVST

SEQ ID NO: 5026 - protein, 13 aa, Homo sapiens
MASGLNSGAFGVV

SEQ ID NO: 5027 - protein, 17 aa, Homo sapiens
MLLLCVFLFVFMVFGAI

SEQ ID NO: 5028 - protein, 50 aa, Homo sapiens
MGAWPPCPARSSRRRSLAAWCVACCWSSRWAAPSSSTHCARRNTGPSRPR

SEQ ID NO: 5029 - protein, 49 aa, Homo sapiens
MLYLPALWFHHVQQSQGCIAVNFWYDMEYDLKYSYFQLLDSLTKASGLD

SEQ ID NO: 5030 - protein, 21 aa, Homo sapiens
MTAEAMFSFLIFICLLILFSK

SEQ ID NO: 5031 - protein, 35 aa, Homo sapiens
MFFEIHPLLTFCTICFIICTLCVGGLCVQYAIGFS

SEQ ID NO: 5032 - protein, 45 aa, Homo sapiens
MLLLSFHSLLYFGDLFILLCVHLILQCVSTTFNLFTYRTMQEFLW

SEQ ID NO: 5033 - protein, 15 aa, Homo sapiens
MCLCNDCLFWFTMFL

SEQ ID NO: 5034 - protein, 37 aa, Homo sapiens
MITDVQLAIFANMLGVSLFLLVVLYHYVAVNNPKKQE

SEQ ID NO: 5035 - protein, 99 aa, Homo sapiens
FHPFTFYVFVCLCLKCIYHRQHIVGSCFFIQFDSLCLLIDVWVHLHLMLLSVWLGLSLSSCYLFCICSMYALFPFLPFSAFFWITVFFNDSIVFSSLIY

SEQ ID NO: 5036 - protein, 234 aa, Homo sapiens
KLLYTTLRHPKCFLQRLSLENCHLTEANCKDLAAVLVVSRELTHLCLAKNPIGNTGVKFLCEGLRYPECKLQTLVLWNCDITSDGCCDLTKLLQEKSSLLCLDLGLNHIGVKGMKFLCEALRKPLCNLRCLWLWGCSIPPFSCEDLCSALSCNQSLVTLDLGQNPLGSSGVKMLFETLTCSSGTLRTLRLKIDDFNDELNKLLEEIEEKNPQLIIDTEKHHPWEERPSSHDFMI

SEQ ID NO: 5037 - protein, 244 aa, Homo sapiens
MMRTQCLLGLRTFVAFAAKLWSFFIYLLRRQIRTVIQYQTVRYDILPLSPVSRNRLAQVKRKILVLDLDETLIHSHHDGVLRPTVRPGTPPDFILKVVIDKHPVRFFVHKRPHVDFFLEVVSQWYELVVFTASMEIYGSAVADKLDNSRSILKRRYYRQHCTLELGSYIKDLSVVHSDLSSIVILDNSPGAYRSHPDNAIPIKSWFSDPSDTALLNLLPMLDALRFTADVRSVLSRNLHQHRLW

SEQ ID NO: 5038 - protein, 68 aa, Homo sapiens
MFATQGHSCPQGLSDFLLLALLMSLHHPPSPLLQRGNNKGTEDSCIWEKSCQIQKFAIMYFYVFMPCD

SEQ ID NO: 5039 - protein, 57 aa, Homo sapiens
EWWPFCPPPIPVSTFIKLLCCLHFLTTSLAAYISFFPSGVSPSLLTGSSPLHLRSGL

SEQ ID NO: 5040 - protein, 7 aa, Homo sapiens
IIGTFYQ

SEQ ID NO: 5041 - protein, 40 aa, Homo sapiens
MTGHSPSPIYLVLAWGVTAAATTLTGPVLSRYNLATPWNS

SEQ ID NO: 5042 - protein, 28 aa, Homo sapiens
MPNCLHIILGSFLLIIFTVCMFIGKGLL

SEQ ID NO: 5043 - protein, 27 aa, Homo sapiens
MLLLFWTFALDVVPTEWLAGRREILFR

SEQ ID NO: 5044 - protein, 47 aa, Homo sapiens
MYSKSSANISQGMLDILLWIDLAHDDLLGSPSPVILRSHAHSGILTV

SEQ ID NO: 5045 - protein, 32 aa, Homo sapiens
MFSRFIHLFGVLNLMWLSLVSCQCLFAFCFQR

SEQ ID NO: 5046 - protein, 76 aa, Homo sapiens [sequence omitted]

SEQ ID NO: 5047 - protein, 28 aa, Homo sapiens
MGRRIRWHSWMTLWIFLMKSALVWMIWL

SEQ ID NO: 5048 - protein, 20 aa, Homo sapiens
MFQAPCFLMYLVFFPHFERI

SEQ ID NO: 5049 - protein, 54 aa, Homo sapiens
MVRAQMSPQSPALAEWILLLALLLRLRWRQLWNKMFLAPKKKKKKKKKKKKKKK

SEQ ID NO: 5050 - protein, 16 aa, Homo sapiens
MSSWLLVYIGWLLSSL

SEQ ID NO: 5051 - protein, 318 aa, Homo sapiens
  SITE (192): Xaa equals any of the naturally occurring L-amino acids
MKAPLATLALLWYHTVVRPFFALDGSDNKAGLDEAKEILLKKEAAYPNSSLFMFFKGRIQRLECQINSALTSFHTALELAVDQREIQHVCLYEIGWCSMIELNFKDAFDSFERLKNESRWSQCYYAYLTAVCQGATGDVDGAQIVFKEVQKLFKRKNNQIEQFSVKKAERFRKQTPTKALCVLASIEVLYLXKALPNCSFPNLQRMSQACHEVDDSSVVGLKYLLLGAIHKCLGNSEDAVQYFQRAVKDELCRQNNLYVQPYACYELGCLLLDKPETVGRGRALLLQAKEDFSGYDFENRLHVRIHAALASLRELVPQ

SEQ ID NO: 5052 - protein, 24 aa, Homo sapiens
MFLVLVICYYLLLSSRGPDWPWHN

SEQ ID NO: 5053 - protein, 33 aa, Homo sapiens
MLRNTALWYHLLTDLLLIYLIGRVVSISFYFYH

SEQ ID NO: 5054 - protein, 57 aa, Homo sapiens
EPLADFCFLYRLLCRLTSRLYPCLCERGCVVGTGTILTQKLATSHCLAQMWIIVITN

SEQ ID NO: 5055 - protein, 32 aa, Homo sapiens
MSFSCACAGSASVFFLFCVAQPLPGTRQPWQE

SEQ ID NO: 5056 - protein, 46 aa, Homo sapiens
MTKKPQSIACSTLSLWCVCLASIIHEVNLEGQTGNNMSWYILPGNT

SEQ ID NO: 5057 - protein, 116 aa, Homo sapiens
  SITE (14): Xaa equals any of the naturally occurring L-amino acids
MFSVFFLLLLLFLXFILLLLLPPSSSVLLLFLFLFLLLFSFSSFFSFFFFLGQGLILLPRLEYTGTIIARCRLKLLTSSNPPFLASQSAGIRGMSHCTWPVFHYSYICYGNVTSDL

SEQ ID NO: 5058 - protein, 39 aa, Homo sapiens
  SITE (22): Xaa equals any of the naturally occurring L-amino acids
MCIEACFTPICSFCCVSFSGLXHSLFLLFIKNRISKDYE

SEQ ID NO: 5059 - protein, 30 aa, Homo sapiens
MSEVKILRFVLITFVFCKHSDPPISALSLT

SEQ ID NO: 5060 - protein, 32 aa, Homo sapiens
METAICLVLFPQLLLLVVHISSSALAHGTLIN

SEQ ID NO: 5061 - protein, 50 aa, Homo sapiens
MQWPRAEGLIHGLFQGVLLAGWTWECAVGQGAAGVLPPPSTNLAPWGPAS

SEQ ID NO: 5062 - protein, 41 aa, Homo sapiens
DPSFRSLLPLFLLFRGCVITETWNAEKCYHRNLECRKIFAF

SEQ ID NO: 5063 - protein, 26 aa, Homo sapiens
MLLGVFLTGLFLPILMAIFLLKCNSF

SEQ ID NO: 5064 - protein, 16 aa, Homo sapiens
MILIVPYILKVVWFYF

SEQ ID NO: 5065 - protein, 34 aa, Homo sapiens
MFMFLLLVGLCLFPLNITKKNKKKSCINICCISK

SEQ ID NO: 5066 - protein, 15 aa, Homo sapiens
NVCFSCLLKLFWGSQ

SEQ ID NO: 5067 - protein, 14 aa, Homo sapiens
AALWQSLLFCFVCF

SEQ ID NO: 5068 - protein, 64 aa, Homo sapiens
MVLLQTVVWLSSHVLWLPQNRAQAARGHLHVPLLAVPATSKLCHRLNSSFRGPGWHPGDLPLLF

SEQ ID NO: 5069 - protein, 42 aa, Homo sapiens
LWRLAVLKLICGFINTLLIIFPGEIFIKCRPAKAILKRRRRH

SEQ ID NO: 5070 - protein, 45 aa, Homo sapiens
MLFVLYMSLLSKAVSSMRTGTILINCVFLAPHTSAWNIATINKCL

SEQ ID NO: 5071 - protein, 27 aa, Homo sapiens
SYISDTRSHFLFLYFIHPFIQQIFAEH

SEQ ID NO: 5072 - protein, 31 aa, Homo sapiens
MLLHLCLSLPSSVWFLGVLLLSCVNTALQYH

SEQ ID NO: 5073 - protein, 56 aa, Homo sapiens
MARACVFQLSLWRKLPVGINLSPAILSLSLGCLGLGFLLLLERMTTDSGIRQRRQT

SEQ ID NO: 5074 - protein, 70 aa, Homo sapiens
MQSLPSASTFSASSACGAAMRPARGSAPSATRPLVPTTSIVSTSAEPETQGTLEHHGPWGLCPISSPPQV

SEQ ID NO: 5075 - protein, 34 aa, Homo sapiens
MASRVLAALIVASVVGLAELYVMVRAMEGELGEL

SEQ ID NO: 5076 - protein, 27 aa, Homo sapiens
MAFLGLTLCTLHLGIQASTVPLGLPSP

SEQ ID NO: 5077 - protein, 43 aa, Homo sapiens
MVVEELANIKLAPEIQTCVYCSGSMELVTMGKRQRLELCKVME

SEQ ID NO: 5078 - protein, 81 aa, Homo sapiens
MVARVWSLMRFLIKGSVPGGAVYLVYDQELLGPSDKSQAALQKAGEVVPPAMLPVQPVRVSADRPADTPAPSPSKDLLSHP

SEQ ID NO: 5079 - protein, 15 aa, Homo sapiens
MYILLFLLAIFLRLY

SEQ ID NO: 5080 - protein, 32 aa, Homo sapiens
MLPSTRVFTLRYCWSCQLSRDMISLFRQPCSF

SEQ ID NO: 5081 - protein, 32 aa, Homo sapiens
MAKSSGHNSLVAFVVVVVVLFFVCFETMSPKQ

SEQ ID NO: 5082 - protein, 4 aa, Homo sapiens
MVKP

SEQ ID NO: 5083 - protein, 31 aa, Homo sapiens
MPLVPLLLSCPPTWLARFGVSLPCSGIPVLA

SEQ ID NO: 5084 - protein, 83 aa, Homo sapiens
MYEQAAAGHGPISPFSLCVSLGIHPANQGRPGVWALGTNGAHILEWQILGDALPVPAGPVPPTQSSPQTWCNFTRAIPFPRLP

SEQ ID NO: 5085 - protein, 12 aa, Homo sapiens
WWGRVWPVNPDH

SEQ ID NO: 5086 - protein, 9 aa, Homo sapiens
MLLLVFLDC

SEQ ID NO: 5087 - protein, 73 aa, Homo sapiens
MNITRKLWSRTFNCSVPCSDTVPVIAVSVFILFLPVVFYLSSFLHSEQKKRKLILPKRLKSSTSFANIQENSN

SEQ ID NO: 5088 - protein, 9 aa, Homo sapiens
MKSPEYHYG

SEQ ID NO: 5089 - protein, 129 aa, Homo sapiens [sequence omitted]

SEQ ID NO: 5090 - protein, 61 aa, Homo sapiens
MCLLLLWLTTFQRTSGALRRGGLSSPAWAMRSPSVYSTQTPSPMMSTGTLRGLSGAMCNLS

SEQ ID NO: 5091 - protein, 12 aa, Homo sapiens
LASTANFWVVIT

SEQ ID NO: 5092 - protein, 46 aa, Homo sapiens
MAAGTFLYITFLEILPQELASSEQRILKVILLLAGFALSWPVFIQI

SEQ ID NO: 5093 - protein, 52 aa, Homo sapiens
MVTLSSLILEMWYCFWLNILVGRVSSRGFHLALTIKMTLISWVRKPIWELCQ

SEQ ID NO: 5094 - protein, 46 aa, Homo sapiens
MKSQCYSPSYFAFFCLVFFQITSASSQTLRGHVLCRTTLRDSSAYC

SEQ ID NO: 5095 - protein, 38 aa, Homo sapiens
MFTCTAGLSCLFQFCFTCGVFTDFKKECMHGVEQDTVS

SEQ ID NO: 5096 - protein, 55 aa, Homo sapiens
MPSEIIYLLSLLYTSVCLQQPPQPRWVCFCFLGWGAGTGGGRRAGFRSLLAEPFV

SEQ ID NO: 5097 - protein, 80 aa, Homo sapiens
  SITE (80): Xaa equals any of the naturally occurring L-amino acids
MLVLGLTKFAVGIVLILLVRQLVQNLSLQVLYSWFKVVTRNKEARRRLEIEVPYKFVTYTSVGICATTFVPMLHRFLGLX

SEQ ID NO: 5098 - protein, 50 aa, Homo sapiens
MWQSCLCRFVLLIEGLEPGALPAFPGSPSSRHGLTVSHVEGLGSLMKCGL

SEQ ID NO: 5099 - protein, 13 aa, Homo sapiens
MWCPAFGRVFCSR

SEQ ID NO: 5100 - protein, 35 aa, Homo sapiens
MPLLQWLALLWPLLTTEAPSGGCSQPGPGPRSSLT

SEQ ID NO: 5101 - protein, 91 aa, Homo sapiens
FLIIIISATVMFLHVSERHCPCLRLEVLSAKVFFSCIVRSIHPLCALSAFERLGCSQAAVLRDLKRDLVSLGAESIYLGTLFQERPCLHFH

SEQ ID NO: 5102 - protein, 14 aa, Homo sapiens
MLHSRLYSLVGWLL

SEQ ID NO: 5103 - protein, 26 aa, Homo sapiens
MRTYLWILTCIRTSVQGPLMTMACPG

SEQ ID NO: 5104 - protein, 47 aa, Homo sapiens
MRNTAYLPISLLLVGSGLCLAQRITLFTSGTFRRKRLYRNYKATQMS

SEQ ID NO: 5105 - protein, 92 aa, Homo sapiens
  SITE (7): Xaa equals any of the naturally occurring L-amino acids
  SITE (30): Xaa equals any of the naturally occurring L-amino acids
MASQTSXIIWPLATLPHPISSFALYSSYTXRGVPKTSRWVRPQDLHMCCSLYLHRSFLFSCLLNSYLPSGLISTFSPLLVCCSYLRSNSREM

SEQ ID NO: 5106 - protein, 35 aa, Homo sapiens
MCLLWSWLWVQPTLRCVFIFHYKNYKQLFISRQEF

SEQ ID NO: 5107 - protein, 39 aa, Homo sapiens
MKKLMPREFRGFAFRCLTCRYLILLKISLDIVSVRCTDL

SEQ ID NO: 5108 - protein, 39 aa, Homo sapiens
MVKNALWNTLHSFLSRLRFTITIWKFLGCFQCLGGAQKC

SEQ ID NO: 5109 - protein, 38 aa, Homo sapiens
MGRFVLNVIFILYPVLSWEHKAKRPSILHYLLKTCPQA

SEQ ID NO: 5110 - protein, 32 aa, Homo sapiens
MLFLFWFCQFATREFIFEQLPMAMGLGLYSRA

SEQ ID NO: 5111 - protein, 73 aa, Homo sapiens [sequence omitted]

SEQ ID NO: 5112 - protein, 13 aa, Homo sapiens
MCSCSWASSCTVW

SEQ ID NO: 5113 - protein, 328 aa, Homo sapiens
MSSLKVAATMIILKFSMAPTAVPLSLLEFVMGPEAPSLLPPTSCPFASSVTTASQGRGFRAEYYSSPSNDSTNLLCLPNHMQASVSRSYLQSLGFSASDLVISTWNGYYECRPQITPNLVIFTIPYSGCGTFKQADNDTIDYSNFLTAAVSGGIIKRRTDLRIHVSCRMLQNTWVDTMYIANDTIHVANNTIQVEEVQYGNFDVNISFYTSSSFLYPVTSRPYYVDLNQDLYVQAEILHSDAVLTLFVDTCVASPYSNDFTSLTYDLIRSGCVRDDTYGPYSSPSLRIARFRFRAFHFLNRFPSVYLRCKMVVCRAYDPLPAATEAVC

SEQ ID NO: 5114 - protein, 31 aa, Homo sapiens
MQGQQTFPVKGQIGSIFGFLGCLLLLLLLWE

SEQ ID NO: 5115 - protein, 16 aa, Homo sapiens
MPFYCLSLLLLFFKLS

SEQ ID NO: 5116 - protein, 109 aa, Homo sapiens
MGSTQVSFFFLFSFLLPSFLHSSLPPNLPPSLPSLLPSFLNLGPPKSCWDYKAMSHRGPAYIPLFLIISFFIFSILLTFILTFLSAMKTAPNLPHLRLAIFDSLMGEVQ

SEQ ID NO: 5117 - protein, 31 aa, Homo sapiens
MYVFKTQLVTCDCEIDNTWMHSCSHRIGDML

SEQ ID NO: 5118 - protein, 25 aa, Homo sapiens
DSIPAAGELGIVFVAFFILDEVQKF

SEQ ID NO: 5119 - protein, 30 aa, Homo sapiens
MLTLFFKLLLISAYYEEHECTVHTNNLMSH

SEQ ID NO: 5120 - protein, 20 aa, Homo sapiens
MTKPKPLLLSYIFCFHVLSF

SEQ ID NO: 5121 - protein, 50 aa, Homo sapiens
MPTHPTRLVLLLPIDGEHLAGSLLISTVLLGPGTLQLPCKCSAQRLPNTS

SEQ ID NO: 5122 - protein, 32 aa, Homo sapiens
MSLLLINRMWPWVSTEPLLASASSFMWEFSST

SEQ ID NO: 5123 - protein, 6 aa, Homo sapiens
MLCHFF

SEQ ID NO: 5124 - protein, 232 aa, Homo sapiens
MPSLWDRFSSSSTSSSPSSLPRTPTPDRPPRSAWGSATREEGFDRSTSLESSDCESLDSSNSGFGPEEDTAYLDGVSLPDFELLSDPEDEHLCANLMQLLQESLAQARLGSRRPARLLMPSQLVSQVGKELLRLAYSEPCGLRGALLDVCVEQGKSCHSVGQLALDPSLVPTFQLTLVLRLDSRLWPKIQGLFSSANSPFLPGFSQSLTLSTGFRVIKKKLYSSEQLLIEEC

SEQ ID NO: 5125 - protein, 232 aa, Homo sapiens; identical to SEQ ID NO: 5124

SEQ ID NO: 5126 - protein, 36 aa, Homo sapiens
MLLLHLTLGLLPQAVQSLNFLFCFIHLTLQSLHPQA

SEQ ID NO: 5127 - protein, 28 aa, Homo sapiens
MLFCVLIGWISVCLILGILGEKKMVFSF

SEQ ID NO: 5128 - protein, 23 aa, Homo sapiens
KAAVMWGHWALLFFSTMCMHFGA

SEQ ID NO: 5129 - protein, 9 aa, Homo sapiens
MVLSPLFSA

SEQ ID NO: 5130 - protein, 224 aa, Homo sapiens
  SITE (137): Xaa equals any of the naturally occurring L-amino acids
MESGAYGAAKAGGSFDLRRFLTQPQVVARAVCLVFALIVFSCIYGEGYSNAHESKQMYCVFNRNEDACRYGSAIGVLAFLASAFFLVVDAYFPQISNATDRKYLVIGDLLFSALWTFLWFVGFCFLTNQWAVTNPKXVLVGADSVRAAITFSFFSIFSWGVLASLAYQRYKAGVDDFIQNYVDPTPDPNTAYASYPGASVDNYQQPPFTQNAETTEGYQPPPVY

SEQ ID NO: 5131 - protein, 13 aa, Homo sapiens
MEGTGSGNGRYCM

SEQ ID NO: 5132 - protein, 10 aa, Homo sapiens
MFVGCINVFF

SEQ ID NO: 5133 - protein, 486 aa, Homo sapiens
  SITE (200): Xaa equals any of the naturally occurring L-amino acids
RPPRVRATKMAAPILRSFSWGRWSGTLNLSVLLPLGLRKAHSGAQGLLAAQKARGLFKDFFPETGTKIELPELFDRGTASFPQTIYCGFDPTADSLHVGHLLALLGLFHLQRAGHNVIALVGGATARLGDPSGRTKEREALETERVRANARALRLGLEALAANHQQLFTDGRSWGSFTVLDNSAWYQKQHLVDFLAAVGXHFRMGTLLSRQSVQLRLKSPEGMSLAEFFYQVLQAYDFYYLFQRYGCRVQLGGSDQLGNIMSGYEFINKLTGEDVFGITVPLITSTTGAKLGKSAGNAVWLNRDKTSPFELYQFFVRQPDDSVERYLKLFTFLPLPEIDHIMQLHVKEPERRGPQKRLAAEVTKLVHGREGLDSAKRCTQALYHSSIDALEVMSDQELKELFKEAPFSEFFLDPGTSVLDTCRKANAIPDGPRGYRMITEGGVSINHQQVTNPESVLIVGQHILKNGLSLLKIGKRNFYIIKWLQL

SEQ ID NO: 5134 - protein, 388 aa, Homo sapiens
  SITE (102): Xaa equals any of the naturally occurring L-amino acids
  SITE (114): Xaa equals any of the naturally occurring L-amino acids
  SITE (121): Xaa equals any of the naturally occurring L-amino acids
GHLLALLGLFHLQRAGHNVIALVGGATARLGDPSGRTKEREALETERVRANARALRLGLEALAANHQQLFTDGRSWGSFTVLDNSAWYQKQHLVDFLAAVGXHFRMGTLLSRQXVQLRLKXPEGMSLAEFFYQVLQAYDFYYLFQRYGCRVQLGGSDQLGNIMSGYEFINKLTGEDVFGITVPLITSTTGAKLGKSAGNAVWLNRDKTSPFELYQFFVRQPDDSVERYLKLFTFLPLPEIDHIMQLHVKEPERRGPQKRLAAEVTKLVHGREGLDSAKRCTQALYHSSIDALEVMSDQELKELFKEAPFSEFFLDPGTSVLDTCRKANAIPDGPRGYRMITEGGVSINHQQVTNPESVLIVGQHILKNGLSLLKIGKRNFYIIKWLQL

SEQ ID NO: 5135 - protein, 510 aa, Homo sapiens
QAFTGYKRYQCVYSLAEIFKVLASFYVILVILYGLTSSYSLWWMLRSSLKQYSFEALREKSNYSDIPDVKNDFAFILHLADQYDPLYSKRFSIFLSEVSENKLKQINLNNEWTVEKLKSKLVKNAQDKIELHLFMLNGLPDNVFELTEMEVLSLELIPEVKLPSAVSQLVNLKELRVYHSSLVVDHPALAFLEENLKILRLKFTEMGKIPRWVFHLKNLKELYLSGCVLPEQLSTMQLEGFQDLKNLRTLYLKSSLSRIPQVVTDLLPSLQKLSLDNEGSKLVVLNNLKKMVNLKSLELISCDLERIPHSIFSLNNLHELDLRENNLKTVEEIISFQHLQNLSCLKLWHNNIAYIPAQIGALSNLEQLSLDHNNIENLPLQLFLCTKLHYLDLSYNHLTFIPEEIQYLSNLQYFAVTNNNIEMLPDGLFQCKKLQCLLLGKNSLMNLSPHVGELSNLTHLELIGNYLETLPPELEGCQSLKRNCLIVEENLLNTLPLPVTERLQTCLDKC

SEQ ID NO: 5136 - protein, 16 aa, Homo sapiens
MLLLAFVTSFFYLLYS

SEQ ID NO: 5137 - protein, 37 aa, Homo sapiens
MYLPVCYILLLIHPSRMQSWLTYMIRYNNRMSWKYRS

SEQ ID NO: 5138 - protein, 32 aa, Homo sapiens
MLSSSRSLSFIMSVLILIPGARSCGGPLVAQD

SEQ ID NO: 5139 - protein, 34 aa, Homo sapiens
MEEWGNGSGIGREGLLLIVLKAIGKSSLYVAVNL

SEQ ID NO: 5140 - protein, 22 aa, Homo sapiens
MEVMDILMALATDTVIPSLMVL

SEQ ID NO: 5141 - protein, 72 aa, Homo sapiens [sequence omitted]

SEQ ID NO: 5142 - protein, 487 aa, Homo sapiens
MFPLTWVFLALYFSRHQVRGQPDPPCGGRLNSKDAGYITSPGYPQDYPSHQNCEWIVYAPEPNQKIVLNFNPHFEIEKHDCKYDFIEIRDGDSESADLLGKHCGNIAPPTIISSGSMLYIKFTSDYARQGAGFSLRYEIFKTGSEDCSKNFTSPNGTIESPGFPEKYPHNLDCTFTILAKPKMEIILQFLIFDLEHDPLQVGEGDCKYDWLDIWDGIPHVGPLIGKYCGTKTPSELRSSTGILSLTFHTDMAVAKDGFSARYYLVHQEPLENFQCNVPLGMESGRIANEQISASSTYSDGRWTPQQSRLHGDDNGWTPNLDSNKEYLQVDLRFLTMLTAIATQGAISRETQNGYYVKSYKLEVSTNGEDWMVYRHGKNHKVFQANNDATEVVLNKLHAPLLTRFVRIRPQTWHSGIALRLELFGCRSQMLPAPTCWGCSQASLQTPRSPPLPPRNTSGAPVQPAWSAAARAGSLESLRPSPVRSGFR

SEQ ID NO: 5143 - protein, 33 aa, Homo sapiens
MPIHRFSVLALLVMPPLMNGRQVQVKEWCFWNP

SEQ ID NO: 5144 - protein, 41 aa, Homo sapiens
VGGWSWVWSPWLAAFVCARAARDPGPSVRWRPPFARSWRRP

SEQ ID NO: 5145 - protein, 26 aa, Homo sapiens
DVVCLFLFVYVLIKHVDYFYKTKGKM

SEQ ID NO: 5146 - protein, 26 aa, Homo sapiens
MGTCTWALSGPPSSADSASRLFSPPR

SEQ ID NO: 5147 - protein, 52 aa, Homo sapiens
MIIYVENPKELTTKLLKVFLVLISQLARLKDTRLIHKSQSLFYMASTNETRS

SEQ ID NO: 5148 - protein, 19 aa, Homo sapiens
MWSLKYSSYKIFVLLIFAG

SEQ ID NO: 5149 - protein, 69 aa, Homo sapiens
MDGGQAVPTLLGGAGLGGVFHCVPFSPRPVPRVWGALLRTPPRAPSSRLWTPRQERPSAAKRNKILASR

SEQ ID NO: 5150 - protein, 25 aa, Homo sapiens
MIVLICVIVFIIILFIVLFATGAFS

SEQ ID NO: 5151 - protein, 38 aa, Homo sapiens
MKAVIHQKYGFLHLLFLLFLSLHRISSATFTLNTKSSS

SEQ ID NO: 5152 - protein, 22 aa, Homo sapiens
FLFFGVLPVCKGEFVHWERPGS

SEQ ID NO: 5153 - protein, 92 aa, Homo sapiens [sequence omitted]

SEQ ID NO: 5154 - protein, 87 aa, Homo sapiens
  SITE (69): Xaa equals any of the naturally occurring L-amino acids
MNGRHRFCFLRCCGCVFSERALKEIKAEVCHTCGAAFQEDDVIVLNGTKEDVDVLKTRMEERRLRAKLXKENKETQGSRVCFKTRCQ

SEQ ID NO: 5155 - protein, 25 aa, Homo sapiens
MCWVLFFSPGLLFLSLLCPDFFSFF

SEQ ID NO: 5156 - protein, 31 aa, Homo sapiens
MRCFLFLLGGARFICQLSTVRKHFGSPLSDI

SEQ ID NO: 5157 - protein, 15 aa, Homo sapiens
MPFNKRSHSPAALCP

SEQ ID NO: 5158 - protein, 62 aa, Homo sapiens
RRAVRWELLVLLLLLLPTLRRPGPRCRPGPGCRLRPRRPRPRVRPSQDAAPGRVSTSWPHLP

SEQ ID NO: 5159 - protein, 22 aa, Homo sapiens
MIQWFHKGLFPFGSALLLVAAM

SEQ ID NO: 5160 - protein, 405 aa, Homo sapiens
MGFCLSSLLAWCVDCFFSLCSFGVKLMDFQAHRRGGTLNRKHISPAFQPPLPPTDGSTVVPAGPEPPPQSSRAESSSGGGTVPSSAGILEQGPSPGDGSPPKPKDPVSAAVPAPGRNNSQIASGQNQPQAAAGSHQLSMGQPHNAAGPSPHTLRRAVKKPAPAPPKPGNPPPGHPGGQSSSGTSQHPPSLSPKPPTRSPSPPTQHTGQPPGQPSAPSQLSAPRRYSSSLSPIQAPNHPPPQPPTQATPLMHTKPNSQGPPNPMALPSEHGLEQPSHTPPQTPTPPSTPPLGKQNPSLPAPQTLAGGNPETAQPHAGTLPRPRPVPKPRNRPSVPPPPQPPGVHSAGDSSLTNTAPTASKIVTDSNSRVSEPHRSIFPEMHSDSASKDVPGRILLDIDNDTESTAL

SEQ ID NO: 5161 - protein, 17 aa, Homo sapiens
MSSLLLIIILALSLAYE

SEQ ID NO: 5162 - protein, 51 aa, Homo sapiens
  SITE (43): Xaa equals any of the naturally occurring L-amino acids
MRAFIWTCGTWTLWSLSDRSLGSSRICMGFAGSLKRPGRTKAXTTFWGTWF

SEQ ID NO: 5163 - protein, 60 aa, Homo sapiens
MSPTGLLVVFAPVVLGLKAITLAALLLALATSRRSPGQEDVKTTGPAGAMNTLAWSKGQE

SEQ ID NO: 5164 - protein, 54 aa, Homo sapiens
  SITE (24): Xaa equals any of the naturally occurring L-amino acids
  SITE (25): Xaa equals any of the naturally occurring L-amino acids
MLCISVFCLLMTLLFPFVLVVLYXXLTFRSSWQYCFLHFIWDLSLFLIDHVCHC

SEQ ID NO: 5165 - protein, 30 aa, Homo sapiens
MRGLKPSWPQASLSPPPHALPCPCRVAMGF

SEQ ID NO: 5166 - protein, 44 aa, Homo sapiens
MNNTCLAVLHVVMCLAWSFLWSLLLHGFIHSFFSFISSCAVTCT

SEQ ID NO: 5167 - protein, 38 aa, Homo sapiens
MSSFSSALFCPLFFGSHFFLSIWVQMAFYMIENCKGKR

SEQ ID NO: 5168 - protein, 17 aa, Homo sapiens
MMAMLYTMLALDILVCG

SEQ ID NO: 5169 - protein, 34 aa, Homo sapiens
MLWFWGLWLQLWMWQLWVLLFGNYPHEVPRSCML

SEQ ID NO: 5170 - protein, 61 aa, Homo sapiens
MELVLAAAGALLFCGFIIYDTHSLMHKLSPEEYVLAAISLYLDIINLFLHLLRFLEAVNKK

SEQ ID NO: 5171 - protein, 61 aa, Homo sapiens
MPTTVPSSMFPCSLFLLWSQLWELLWSQLWGLLQLWGWWLLPEPPQAPSLPPAPAPEPRLL

SEQ ID NO: 5172 - protein, 40 aa, Homo sapiens
MTSMLLLVRWIPKLLLLLLSCMAPGYWGRSLLFLILKAGL

SEQ ID NO: 5173 - protein, 59 aa, Homo sapiens
PHLPLMIVNLILHFSCYCWCKKHLLYQDFKNQSDKSLISLIIITDKSIEFASDYFFFSS

SEQ ID NO: 5174 - protein, 11 aa, Homo sapiens
MGFEPGWPGKL

SEQ ID NO: 5175 - protein, 39 aa, Homo sapiens
MLLEKVIRLRCSCFVLLCFSLSWVGVSSSNDVQVDLFSH

SEQ ID NO: 5176 - protein, 71 aa, Homo sapiens [sequence omitted]

SEQ ID NO: 5177 - protein, 10 aa, Homo sapiens
MPGASRSVCL

SEQ ID NO: 5178 - protein, 39 aa, Homo sapiens
GVSKRFPVAATRTAWYCLHVLSYFCFALLQLLAVGPWRN

SEQ ID NO: 5179 - protein, 31 aa, Homo sapiens
MWPLRLLCTSWSFLRSPFLGLARLKKKTSSF

SEQ ID NO: 5180 - protein, 20 aa, Homo sapiens
MLHCYPALPSLIFLGVAWGF

SEQ ID NO: 5181 - protein, 74 aa, Homo sapiens
  SITE (33): Xaa equals any of the naturally occurring L-amino acids
  SITE (74): Xaa equals any of the naturally occurring L-amino acids
MFTYWFTMLFMCKLSKCKLNINVHALPKKKKKXSRGGPVPNSPYSESYYNSLAVVLQRRDWGNPGVTQLNRLAX

SEQ ID NO: 5182 - protein, 13 aa, Homo sapiens
GNKRIKRLMPYYF

SEQ ID NO: 5183 - protein, 10 aa, Homo sapiens
FGYFQIYVFS

SEQ ID NO: 5184 - protein, 44 aa, Homo sapiens
MFSCMSNLIYLLPVTYLIMWLLIGSHSPFLSRYSTTFQNSHWQV

SEQ ID NO: 5185 - protein, 33 aa, Homo sapiens
MRSWIDFVSIYSSALCIPWFLHPWIQPTKARKY

SEQ ID NO: 5186 - protein, 38 aa, Homo sapiens
MPCWVTGWTCCSLQSHSQPAHMPPSKRILLFTSLLLQP

SEQ ID NO: 5187 - protein, 271 aa, Homo sapiens
  SITE (211): Xaa equals any of the naturally occurring L-amino acids
  SITE (221): Xaa equals any of the naturally occurring L-amino acids
  SITE (233): Xaa equals any of the naturally occurring L-amino acids
  SITE (237): Xaa equals any of the naturally occurring L-amino acids
  SITE (270): Xaa equals any of the naturally occurring L-amino acids
GFYLTAFICFLVFILNAGLVWFFPWREAKPGSTEKGLPLRKTHVLLGRSHDTVQEAATSRRARASKKTAQPWVEVVLALRNMKNLLFSEMWDIFLVRLLMAMAVMLYYSNFVLALEERFGVRPKVTGYLISYSSMLGAVAGLALGPILRLYKHNSQALLLHSSILTCTLLLLYSLAPTMGAVVLSSTLLSFSTAIGRTCITDLQLTVGGPXPAAPLLRGAXCDCSGPISPSLXGVAXRQPWAPSWPGSYAFIMSLNKRHSSGDGNSKLKXE

SEQ ID NO: 5188 - protein, 38 aa, Homo sapiens
MLGIATVFFFGLGLEVVGKNACQPALHLGLGACQLPAL

SEQ ID NO: 5189 - protein, 18 aa, Homo sapiens
MGDLKLVLLISELIIEFP

SEQ ID NO: 5190 - protein, 31 aa, Homo sapiens
MPRSFLSTFLFFGTVRGFTLSSWTSLPQSWN

SEQ ID NO: 5191 - protein, 37 aa, Homo sapiens
LPFLSLCCAMSSSSPLVLGAWQEVAAIGCFLNEGANQ

SEQ ID NO: 5192 - protein, 68 aa, Homo sapiens [sequence omitted]

SEQ ID NO: 5193 - protein, 50 aa, Homo sapiens
MVGETCLLFHLGVTCSLAWRRREKTEKGVIPNICIAQSHTRDLISLAILC

SEQ ID NO: 5194 - protein, 22 aa, Homo sapiens
MVMVVVMMAVVLYFCAPSGPSH

SEQ ID NO: 5195 - protein, 59 aa, Homo sapiens; identical to SEQ ID NO: 2826

SEQ ID NO: 5196 - protein, 120 aa, Homo sapiens; identical to SEQ ID NO: 2911

SEQ ID NO: 5197 - protein, 101 aa, Homo sapiens
VQTLPLHPPGLPSSASSVSKMEPPHLRSTRLTRTHAPPSALIKPTDPDSLSATPGWSGPRCGSALSTPRAPRPSEGAPAGASDTLQFRAVGGLGHIPVPWL

SEQ ID NO: 5198 - protein, 32 aa, Homo sapiens
MLAAVGRPKPRSPLSSLSTLQLYLFCSSTRRS

SEQ ID NO: 5199 - protein, 282 aa, Homo sapiens
MASLGQILFWSIISIIIILAGAIALIIGFGISGRHSITVTTVASAGNIGEDGILSCTFEPDIKLSDIVIQWLKEGVLGLVHEFKEGKDELSEQDEMFRGRTAVFADQVIVGNASLRLKNVQLTDAGTYKCYIITSKGKGNANLEYKTGAFSMPEVNVDYNASSETLRCEAPRWFPQPTVVWASQVDQGANFSEVSNTSFELNSENVTMKVVSVLYNVTINNTYSCMIENDIAKATGDIKVTESEIKRRSHLQLLNSKASLCVSSFFAISWALLPLSPYLMLK

SEQ ID NO: 5200 - protein, 571 aa, Homo sapiens
  SITE (189): Xaa equals any of the naturally occurring L-amino acids
  SITE (531): Xaa equals any of the naturally occurring L-amino acids
  SITE (535): Xaa equals any of the naturally occurring L-amino acids
  SITE (538): Xaa equals any of the naturally occurring L-amino acids
  SITE (545): Xaa equals any of the naturally occurring L-amino acids
  SITE (554): Xaa equals any of the naturally occurring L-amino acids
  SITE (560): Xaa equals any of the naturally occurring L-amino acids
  SITE (561): Xaa equals any of the naturally occurring L-amino acids
  SITE (564): Xaa equals any of the naturally occurring L-amino acids
  SITE (566): Xaa equals any of the naturally occurring L-amino acids
  SITE (567): Xaa equals any of the naturally occurring L-amino acids
  SITE (569): Xaa equals any of the naturally occurring L-amino acids
  SITE (571): Xaa equals any of the naturally occurring L-amino acids
MSALFLLVIGTAYLEAQGIWEPFRRRLSFEASNPPFDVGRPFDLRRIVGISSEGNLNTLSCDPGHSRGFCGAGGSSSRPSAGSHKQCGPSVHPHSSHSNRNSADVENVRAKNSSSTSSRTSAQAASSQSANKTSPLVLDSNTVTQGHTAGRKSKGAKQSQHGSQHHAHSPLEQHPQPPLPPPVPQPQEXQPERLSPAPLAHPSHPERASSARHSSEDSDITSLIEAMDKDFDHHDSPALEVFTEQPPSPLPKSKGKGKPLQRKVKPPKKQEEKEKKGKGKPQEDELKDSLADDDSSSTTTETSNPDTEPLLKEDTEKQKGKQAMPEKHESEMSQVKQKSKKLLNIKKEIPTDVKPSSLELPYTPPLESKQRRNLPSKIPLPTAMTSGSKSRNAQKTKGTSKLVDNRPPALAKFLPNSQELGNTSSSEGEKDSPPPEWDSVPVHKPGSSTDSLYKLSLQTLNADIFLKQRQTSPTPASPSPPAAPCPFVARGSYSSIVNSSSSSDPKIKQPNGSKHKLTKAASLPGKNGNPXFAAXTAXLRQEPRXGMALLKVSXKQNRFXXAAXGXXTXSX

SEQ ID NO: 5201 - protein, 317 aa, Homo sapiens
MIRIAALNASSTIEDDHEGSFKSHKTQTKEAQEAEAFALYHKALDLQKHDRFEESAKAYHELLEASLLREAVSSGDEKEGLKHPGLILKYSTYKNLAQLAAQREDLETAMEFYLEAVMLDSTDVNLWYKIGHVALRLIRIPLARHAFEEGLRCNPDHWPCLDNLITVLYTLSDYTTCLYFICKALEKDCRYSKGLVLKEKIFEEQPCLRKDSLRMFLKCDMSIHDVSVSAAETQAIVDEALGLRKKRQALIVREKEPDLKLVQPHSFLSSPGSASERACWPCTIISPPVSPHVPALAKGLICRTTRTPASLLSPPWW

SEQ ID NO: 5202 - protein, 18 aa, Homo sapiens
MGQSVNHLRVSEYSQFSL

SEQ ID NO: 5203 - protein, 379 aa, Homo sapiens
MGYARKVGWVTAGLVIGAGACYCIYRLTRGRKQNKEKMAEGGSGDVDDAGDCSGARYNDWSDDDDDSNESKSIVWYPPWARIGTEAGTRARARARARATRARRAVQKRASPNSDDTVLSPQELQKVLCLVEMSEKPYILEAALIALGNNAAYAFNRDIIRDLGGLPIVAKILNTRDPIVKEKALIVLNNLSVNAENQRRLKVYMNQVCDDTITSRLNSSVQLAGLRLLTNMTVTNEYQHMLANSISDFFRLFSAGNEETKLQVLKLLLNLAENPAMTRELLRAQVPSSLGSLFNKKENKEVILKLLVIFENINDNFKWEENEPTQNQFGEGSLFFFLKEFQVCADKVLGIESHHDFLVKVKVGKFMAKLAEHMFPKSQE

SEQ ID NO: 5204 - protein, 9 aa, Homo sapiens
MVLSPLFSA

SEQ ID NO: 5205 - DNA, 10172 bp, Homo sapiens
ggcatctccttaatggctccctagtggatggagagcctcccatgaagaggaggcggggaaggaggaaaaatgtggagggacttgatctgcttttcatgagccacaaacggacgtcattgagtgcagtaagttggggagcttgcctgcatggcgattgcacgtgttgacagctgagggtcctgtgatgctcacgatgctgggctgtgtttctctcagcagcattgtatgaaagccagcttcctccactaaagaaatagttttacaataaacagtcatgattctgatcattgatacagatcacttggcctgaacgaagtgtagcttgaggatgtattcttcccaagttctgatgtgttgattgctctcagaagaacagccaaacctagaaacatgttcttctgaatctagaattgttatctctgaattcttgaggtggaacaagtttcattgatatgttttaggcctggcatttattaaaattagtataaatgtttcattttggacctaagatttgggttaacataaaaagctagtgactgcaaattctcctatctccttaagtagatattttaaaaatttgagctgtgcttttgctagaataggtttgaatagaatgtgtgaaccaatggattttgacttttcctttctcagttcagaggaaataaattaatgcagtataatcaaaatgattttctttcttaatctgcttcaactacatctcacccaaaaatgtggtgcctgactcactgatgaccagaattttatcccaaagagcacaattacatgtgcttttttaaaaaatggtttagcactatatatcttgaacctattgaccagaagccccagtcaccatagtggctggaactccttgtctgtgttgtgaggagtgggtgctccaggaagccttccaggtactgggccatcctggacccttcttcaagcagtgggacacagtttgggaaactgaaaattgagattgagggaagacagttgtctgtttcaacatgtttttacttacaccatccctattattatttgcccattttctatttcttgaactcagagaaagcttaataagatggcaggaaaagacatggttgagttaaagttcagaaatgaaaaataacatccactgaaatttctttgccctctggtggggtctaattaaaacagaagcattcaggtggctaagagtaaattttcaaaattgggccgggcatggtggctcacgcctgtaatcccagcactctgggaggccaaggcaggtggatcacttgaggtcagcagttcaagaccagcctggccaacatggcaaaaccttttctttactacaattataaaaattagcctggtctggtagcacgtgtctgtgatcccagctactcaggatgctgaggcaggagaattgcttgaacccaggaggcggaggttgcagtgaatcgagattgcatcactgcactccagcctgggtgacagagtgagactctgtctcaaaaaaataaagaaaatttttttcaaaattgattaccaatgcagtgatcatcataatggtcatatttgttgatggtatgattgttttcagaatcctgtaaaagtacactttgtaatggactagctgtgacttacatgttttctgtaagttaaaatgccatttctaggggtatggccctcaaacagagttgtagcactagtaaatagccttcctgtttgaaactacttctttgatagattttgttgactgataaattctttctccataaactttaacaaattgggaagtttctgcagctgacacttctttttgtttattatcatgttcaatatttgtaggtttttttgtttttgaaacagggtttgtttttgagacagggtctcactctttcgcccaggctggagcacaatggcgcagtctcggctcagtgcagcctccaacttctgggctcaattgattctcccacctcagcctccctagtagatgggactacaggcgtgcaccaccatacctggctaattgttttgtatttttggtggggacggggtttcaccatgttgcccaggctggtctcaaacttctgggctcaagtaatccacccacctcagcctcctgaagtactgggattacaggcaatcatgttcagtatttggatcacgacacagctttgtctctggatcaggtgttaggaattaataatgcaacacacgtgcttttttcctattgcaagtacacattctattttaaatctgagactgattttattcatttcactattttaagccgttgttaagaatttgttgatatttttctttttctaaagtcccatttagaaagcctgagagaattcctaattgaagttagagaatgtatttttaaaactttttttttttaactgtcacattttgaaatgtagggattcctcatttggtgttgtcgggggtgatgtgcatgcacataaaatacaaggaaagcactgctcgatctgtaaataaaccaagtaggaaaagatgtaaaggccagcagtgttacctggatgaaagaggacagatcctagaatttagtattttgtcagcactctaactgtgctgccatgaaaaagtaagagtgcattcagcaacagtggacaagctggcactattccctgtgccagcactgagagtcaaaaaatacagtcctgacaagtgcttgcactggagaatgcagtgtttaggatggggtagcacataaatcataatgtgtcctggttgttcatgtgtgccacgaccaagggatgtctagggtactttgtgagcccaaaggaagcctgggagtggagggaagaggatatggggagaaacagatgaagaagtttccctatggatggctgtacttcaattaagttttgaagatcatgtagtagttggtcattttaaaagggttggcagagaacatgtgtaagaggagagagcctcttgggtttgaagaactgaggaatttgctgaggaagtgagcttcagcagagatgagcttgcagagaaggcaggatgcaaatcatggagggccttgatgccattcggaagaacttggattttgtcctggagttaatagggatgcaattattgaaaaaaataggagagtgatgtgacataattttttgaactgggaagggctgcattttagaaaactgactccagcgtagtggtgtggaggttggattgaagataggtgggattagaatcagggagaccatttaggaatattgcaataacctgggtgggaagtgacaaaagcctgggccatggtagagctgtggggaaggagaaatgggtgtctggaggttgaaataactgtagacttcagttagtggtggtctttccaatgttgccacacatgtctgagacaaagtgtcccactaccaacaaaattatattgtgcacagagtgcccataagttacatatagactggcttttagaaattcctttagtataaattatctttaatatcattatccggggatctccaagagagactgagaggccgcctttcatgcatatcagctcagactataccccccatgttgtattcccagtggctggcttaggatttcagagcatggaaccttagtggactataaattttttacctaattactagttctacagtgtgaagaatgatataaaagtttcgtcttcttctttttatttttatttttttgagacgaagtctcactctgttgcctaggctggagtgcagtggcacagtctctgctcactgcaacctctacctcctgatttcaagtgattctcctgccccagcctcccaggtagctgggattacaggcaagtgccaccatgcctggctaatttttgtattttttgtaaagatggggtttcaccatgttggccaggctggtcttgaactcctgacctcaggtgatccgcccacctcggcctcccagagtgctgggattacaggcgtgagccaccgtgcccagcctcattttctgacttttaatagctgttcccaaacaactagacattgtttctagtaactattttctctttttgataaaagatccattctaggatagcgttttcttgaaataggacattgtcagaggctctctcttcgtgtgagaattcataccattgtgaactttctgcaggaggatgctgaggtgaccaaagcttttgaagaagatatagagaccccaccaacaagaaacattccttctcccggacagctggacccagacacacggatccctgttatcaatcttgaagatgggactaggctggtgggggaagatgctcctaaaaataaggatttagttgaatggctgaagctgcaccctacttacactgttgatatgccaagttatgtaccagtgagtattgcagagtttagagttggaaggaatcttgcaggccggtccacttcattcccttacaacatagaaatccctgacagctggtccctctgccttttccttgaatgtttcctggtctcaaacatttcccaggtctttgttgttgaatcttcttcattacagatactagcttcaggtctgtcttactgaaggcagccttacagttatttgaagatgcgcgttatgcatttccttactgtttgcttctcccatcaaactcatgtgacttcttcagttattctttccatggcatcgtttccaggcagtcttagtattggggtaacactgttgaatgcactttctccagtctccagacgaggccccgccatcccagagtgctatgaagccaattacttccagagatttgaccagttagtgcagcccaagattgtattagctgcttttatggcaactaatcctggtgccttatattaaacgttagacagttcatatctccaaatggtttgtcacacgaactgtttgctagctagcaatgcaagtcttttgctttctgtatttatgtgattgattttttaaaacttaaatgtagagttttacattttattttgttgggttcagcctagagttcttgccactcagaaagtacccccaccccctacaagatctgtctgtttgttggttagttctcattacagacagtctcatgttgttgatggggtatcatctctgtgttcattggagccactaactagaaattagtaaaagtactacagaaagcctcctttaaaagtatcatgacttggttaaacatttaaagaaaaactttaagtgaggttattgatagataaaaggaaaagccaattctcacttatgtattccttaatggacgggtaaaataggagttttttctttcaaagagaaaaatatggtttctaatattaataattaaaatgattcttgaaacttccataataattgaagatgatctgacagttctctttggcatttatatagagaagaataagtactaaataccaattttactaaatatgttttttcttttgcagaagaatgcagatgtgctgttttcctcatttcagaaaccgaaacagaaacgacatagatgtcgaaaccctaataaattggatataaacactttgacaggagaagaaagggtgcctgttgtcaataaacgaaatgggaagaaggtaaacgctgggaaagggaattgatcactatgcgatttcttagcccagaaggaagtgttttatcctgccttcttctataggggaaaagaatcctgtctgcccgaatgcgtgtgtgcgtgtatgtgtgtattatagaagggggagggagtagattaacagaaaggggagggaagactgtgtttttaatcatttgtcaaatgcctctacccagatgggtggagctatggcgcctccaatgaaggatctacccaggtggctggaagaaaatcctgaatttgcagttgctccagactggactgatatagttaagcagtctgtaagtacaaactgcatttctatcaagaaaggtagctatacaaaactgttttccttagtctttcttattttctgttggccattaattattcagttgtaacttagcttaaaagaattgacataatacatcattttcatacatcatttcatacatcattaatacatcaatcattaatccaaagtgaattcatttatcagctccaatttaaaaggtttgtatggaaacatacattcacaatcttagaggtagacttctccaggggggattgccccagctaagcctacttaacagctcacctgtggaataggatgtatggtggttgagatcattaagattaactgtgatttctgatttaaaaacaaaacaaaacaaaacaaaacaaaaatacaacagttctgcctaaaagatttgttaccattagctttttaaaaattcgttcatgacatgctggttctttgttttaattatacattaaaaatgtctttcggtgtaacattctgttgatcttaacacacgtgtgagtttgtgaactgacaccgtagtcagaatagggttccatcccccacccccaccaccccgagttccctcacaccgtcctttccccgaccccagcccctggctgccgctgacctgttgtccatccctgtctttttgagaatgtcctgaaatggaagcatgaaggacataagtcttgaagcagtttctttcgctcatcatatggaaggtcatcgatggtcacatgtgtcacagttatctcctttctgttgccaagtagctgtctccattgcatagatgtgacactggacggcttagccctcacacactgaaggacatctgggttatttcctgatttttgaaactatgattagagctgctataagcaattgtgtacaggttttggtgtgaacataagttttcatttttctagggtagatactaaaatataattacattttccatatttcaaaaatacttttacatatatttgaaatatccaaaataacacattatagagggcataaaacatcctgggtttatattatgttatactattttataatttttctcccatacaatatctttttttttcttttttttttttttttttgagacaaggtgtttgtcacccaggctggagtgcagtggtgaaatcacagctcactacagcctcattctcctaggctcaagcaatcctcccacctcagcctcccaagcagctggcactacaggcacacatcaccaagcttggctagtttttgtattttttgtagagaaggcattttgccacgttgcccaggctggtctcaaactcacctcaagcaatctgcctgccctgacctcccaaagtgctgagattacaggtgtgagccactgtgcccagccaaaatttttttttaattgacagatatttaattgacaaaaattaattgatgaatcaaatatatatgcaaggtgtacagcacagtgtttttttcttttaagagacagggtcttgctgtgtcacccaggctggagtgcaatggtgcaatcatagctcactgcagcctcaaactcctgggctcaagcagtcctcccacctcagcctcctgattagccaagtagctgggatgacaagcatatgccaccacacctggataatttttttttattttgtagagatagggtcttgctatgtgccccaggctggtctcagactcctgggctcaagaaatcctctagtcttggcctcccaaagtgttgggattacaagcatgaaccacggcacctggcttcaaagtgatgatttgatataattatacattatgtactttcctttttaaaaatttgttatgggtacatagtaggtgtatatatagggtacatgagatattttgtacaagcacacagtgcataatgatcatgttgggtagatgaggtatgcatcacctcaagcatttaccctttgtatttcaaacaatgtgattatactcttttagttattttaaaatatacagtaaattattgttgactgtgtagtcaccctgttgtgttatcaaaaactagatcttactcatcctgtctaactctatttttgtaccccataatgtactttctgatgtatgatttgttgagttagttatggatgcagctaacttgacatttacctcactgatgagtagccttgagcaatttttgtgcagttcagcaagctaacataataataaaaacaagttttgctgtcattaagttttatcattgagctgttaggagggaagaactacttaggtatttccatttggaatggcaggttcaccacagaggctcacattgagatcaagttgtcttcgacagcctttatagccactgtttgcctcccctgtactccagggttttgttcctgagtcgatgtttgaccgccttctcactgggcctgtagtgcggggagagggagcgagcagaagaggaagaaggcccttaagtgagatcgccagagcagccgcggccgccgctgctgtggcctccacgtcagggatcaaccctttgctggtgaacagcctgtttgctggaatggacctgacaagccttcagaatctccagaatctccagtcgctccagctggcaggcctcatgggcttccctccaggactggcaacagttgccaccgccggaggcgatgcaaataaccctgctgctgtgctgcccctgatgctgccaggaatggcgggcctgcccaacgtgtttggcttgggcgggctgttgaataaccctctgtcagctgctactggaaacaccactactgcttctagtcaaggagaaccggaagacagcacttcaaaaggagaggagaaaggaaatgagaatgaagacgagaacaaagactctgagaaaagcacagatgctgtttcggctgctgactctgcgaatggatctgttggtgctgctactgcccgggctggattgccctcaaacccgctagccttcaaccctttcctcctgtccacaatggccccgggcctcttctacccatccatgtttctacctccaggactggggggattgacgctgcctgggttcccagcattggcaggacttcagaatgccgtgggctccagcgaagaaaaggctgctgacaaggctgagggaggaccctttaaagatggagagacccttgaaggcagcgatgccgaggagagcctggataagactgcagagtcctccctcttagaagacgaaatagcacagggtgaagagctagactcacttgatgggggggatgaaatagaaaacaatgaaaatgatgaataaccagtaccagttccagttcaagtgtttaaaacttttgacaagtggtagtcctactgtttacactcacagttaatgttcatacctagttttataagctgttctgtaacatagtgtagcaaaaaaaaaagttcaagtcatgttatacaggtgtgtcaaaaggtatcttggtcattaagtattgtgcagtgcattatttattatccctaggagagatgaaatttgagaggtgatcatgtctttttaaggaaacttacataatgctctgctttttttttttctcttggtaccattggtattataataaagagcaatttgtaactgagtggcactaatggaagaaagtgctgctcaaaggaagtatgaagttatatatttaattttttaattttaatttttaatttttttgctgtgaaggtcaagctgaaatttaccatacatatcatacttgctcatttgtttccctttttgactgtatgggggttcccacactcgtgcatacacacacatccatacactctgacaatctccacgctagtgtgaacgcctctgtcccgaggcgcagcaataataaggcagctgttgaatgtgaagggtccctttggaaaattaacctactgggagggttcttgccagacagaactacagttccattgtctcgtggtcttgtaatgcactggtaaaaacaaaataaatagatgaataaataaagagtgagagaagagagaatcaggtaccttttttaaattaaaggactttgttactttagccacaaagctaaaacagcattacctcagctctaaactagccttgaagtttacagacatgactttgtaaatgtattgtttttctttgttgtgatgtccttttatttttttcttttgaaactgctttccatgtaagataaaatgtaaatgcctgccaactgtagtaatgatgctttaaaaaaaagtgacccatgatatgcagagaatgtaattatagaatgtagtatataggga

SEQ ID NO: 5206 - DNA, 986 bp, Homo sapiens
actcaactgttttgaagactagacagtaaggaaaaccttgaattactctcacataattccactccagatatctcaacagcaatgcatacaaaaagctcctattactccctcaaaagggcatctgagaccgagaatacttagaaatgtgtgcagcgtgtgataatgtggtacactgaagaacaaaagggcaaaagaaaaatgaggctttaacaggcacaatatctaggtcatttatccttggttaatgggtagaaaaacacaatgcggtagtgtcagcaagggacacaaaggcactctggtgtcctgcagaccagcgctcgatgccagaaaccagggtgtggaaaaacccatgtggaattgaaacagacccacttaagcacgcacgcgcgcacgcacggtctcaggagctactgatttgtggacccctttttgacctttggtatttaaagtaaaatataatttgagatctactgttttcacctttttatgtcacctgaaccaacacaaagccatatttccatccagttaaaaagcaggggaagggatgtggacgagagtgtttcgtgtgtgttgccttcctccacacccttcccccaggacgtccgcacacagtccacccccagccagtgtgctgccagacaggtggtctaaattcctcccagactgtgagattcagttcgtttatgctccaagatgaaaatatgccccttaatgattctgggaaagaaacaacctgaaccctccaccttacagatcctgtgattgcttttatttatcatcgtcgttgtctgctgaaagtgaatgggccgtgcacactggaggaaagtgccttgaagagaatattttttgaaagggaattatttgaacacgggaaagtgaaactaggtctgcatgaagtataggaaatttaagtatttaagtaacaaagatgttagcagggagaatttgcttaataaaatgagtcattaaagggtgttttttttaaa

SEQ ID NO: 5207 - DNA, 8173 bp, Homo sapiens
tgcgtgtccgcatgctgtactacctaagacaagaagtgataggagaccaggcggataagatcttagagggtgctgactcaaggttagtgcgagctcacatttgttctcaacctcagtgagataatctgggtagccggaaaacatcatggattgtgtttcagaaccttcataaaccactagtaacccatctccttttttgcatcttgaatgcagtatttgtccttcgtgcttggggatgtgatgagaatcaggaaaaggctgtttgcatttatgtttgtagtgtaaagagatgtgaactaaagcactggtgttctgagatgacccttaaaatgggataccatgtgataaagttcatttctggtcatggcagagggctactgactcatgccctttcttttaaccttgctgatacctccccaccatgctcagatgtttatcgtgggagagagggcatgtgagctatgtatcacattcattacttggaattcttttttaatactaatatttcttataaatgttgtctttcagtgaagccgatgtgtggatccctgaacctttccatgctgaagttcctgcagattggtgggataaggaagcagacaaatccctcttaattggagtgttcaaacatggtaagtgacgtttctgtttgaatacatctcaactgtatggcttggtctttatttagaactctttacatactcttttccaaagtcataatattaatgaggatagttccaaaggactcttggcgtctaccatttttctgtactaaaaatctaatatgaactgtaaatatcagatgctgtttttgaatgtttgttgagcatttgagaagaaaacatttctttcttggctgtaaataaaacccaaaccatatttgttttaataatagccaagttgtactatagctctccctaaactttgcttccagcgcggcttcccttgctaactctgccaaccagtgtcaaagtggacggtgggcttaacctctgctattaatctgtacaagtgcctcctgggctttgttccaagcaatatttcacaaatgtcagtgctgagaactcgcggctcccctgagtgggatgcagccttgttaactttgaaaggctggggatgcagaactggcatgatatatacagtgagcgattcctgattataatcccaattctctggaggtcgcggaggtattctcagcagcccagcctgactaaaggggagaatgatggcttataaaacctttcatgattacagtttggcttgcggctctacagcagttaggagcggtgtgttgtagtacacatcctaattgaattgtgctgttctgcctatgtactgcagccacattttgtgagctcagcctcaaaatcattttcccgcagtgcactgttgggatctgccattttccatctagtcaacttgggcagtcaaaaagcaaattgcagtttgaaaaccatagagggaaccgtgtcatcttactgacatgcatcatcctaaacctaataagacaggttcgctggccttatgtatatggggatttttcagccagccatgcgagttcctgcaggactgatgctattcacagagtggatgggggtggactcagtgcacccctgcagaggtcataaaggaacattgcgaatccttctaaatgtcaagcaaaattagatctggggaaaaatagggtcagaaatcctcccaggcatcttgcagttattctgaacctgtttttctattagtgtttgtggtaattctgataatatccctgaagtgtaacttggctcccagtagcttccctagaaggagcgttccatagaatgatctactaaaacaaggtccacttggattcaacagagatgctaaccttgactgaaaaacaaacttgtgttgtggcagtgctgtgattttgccagtgatggggcctttctttgtttctgtgtgttttctgtgcacggatgggcacggcacaggctatgagaagtacaacttcatgcgagctgaccccgcgctgtgctttctggaacgagtcggtatgcctgatgccaaggccatagctgccgagcaaagaggaacagacatgctagcagatggtggtgacgggtaagaaggacattttaaaatttgaataaactttatgtcagtttcacatctattggcagggttcagttcttaccctgcagtacacactgtattgtgtctgatttgaagttcaggagatgtttaccagtctactctatttgtatgtcgtaatgactgtttaaacaatatacattatcttgataatctgaaacttgtttttcttttccaaatgtcatttcccgcaatctccccagaccccctccaccacactgccatggctgcatgttttaaatactgatagagttgcttttgatgtcaaacccataattaaaagtagcactgggcagattattactctttcctacccaccccccttccttcttttgcttatcagtatgattcaaataatttttgtgtttgttttacataggggagaatttgatagagaagatgaagacccagaatataaaccaaccagaacaccgttcaaagatgaaatagatgtatgaacttgagtatattggcttttatagctccattaaaatattatatgcccacataagacttgttaaactttatagataatgaccttttctttaaaagacaaagaaaaatgagaccccaaattaaagtaattctgtttcttgctttgctttcaaggaatttgcaaattctccttcagaggataaggaagaatccatggaaatacatgccacaggtaaggtcccagaaaagcttgtgtagccgagcagacgtgcactgagcagtcattgttcacgtggtagggactgtcctgcttcatgacagcagtgtcttaacaccttatttcttctacactgacctgttttgtgaatcattttaattcttgttaatggctgtgttttcatgacattgaatttcttagataggataactgtttctttgatgataattagctgatttatattttacactaattagtgaaaaattttaagcatctaaactatagctcttgggaatagagcatagagcatttgctaagtattcacctaaaatattttcagtttatttagaatattgaccttttaccgaatataaaatcattacacaacaattatgcagttattttttatactcaagatgattattgcacatacattagaggagagtaccttataagaagtttatgctgtaaagtgtgtttctttatgtaggactaataaataatgttttcatcccctctaaggagttaaaaaagaaataagtgtatatattccaagtgaatgttattacttatttatattttaaaaatgagggcactgagatgccctttcccacactgtcatttgaatcttaatgagtcatcctgttttgttggaatactctgtattgcaagattgcagctacacatttcaaaaatgtttttccacttccccaggcaagcacagtgagagtaatgctgagttaggccaactttactggcctaacacttcaaccctgactacacgtctgcgccggctcattactgcctatcagcgcagctataaaaggcaacagatgaggcaagaggccctaatgaagactgaccggcgcagacggcggcctcgagaggaagtgagagctctggaagcggaaagggaagctattatatctgagaagcggcaaaagtgagtttcttcaaggtttccactcagctcccggtacatgcccctctgccctgctcctgtagacccacaagagacaggactcatatcaaaggtagtgaccaccaaagaaaggctcgctccaacaaagcagtctgtttccccacccccaaataactaccatgtataaagtctggggggaagaagaaaagaaacagtaaatattaagtcttttcctgaagtatgatgcaagctaatataatctttctaacaggtggacaagaagagaagaggctgatttttaccgtgtggtatccacctttggggttatttttgaccctgtgaaacagcaatttgactggaaccaatttagagcctttgccaggcttgacaaaaaatctgatgagagtttggagaaatacttcagttgttttgtggccatgtgtaggcgagtatgtcgaatgcccgtcaagccagatgatggtaggtacatttagcaacaaagttctatacaaaaagacgagtaaagtgaaaaataagaaagtgtacaatgtagaatgcccttgaattctccccaagtaaatatgagcccttctgtgttacagaaccgcccgacctctcctccataattgagccgatcacagaggagcgagcctctcgaactctgtaccgcattgagctgctacggaagatccgcgagcaggttctccatcacccccagctgggagagaggcttaagctctgccagccaagcttggatctgccagagtggtgggagtgtggacggcatgaccgagacttgctggttggtgctgctaaacacggggtcagtcggacggattatcacatcctcaatgaccctgagttatccttcttggatgcacataaaaactttgctcaaaacagaggggcaggtaatacatcttccttgaacccactggcagttggatttgtccagactcctccagtcatctcatctgctcatattcaagatgagagggtactggaacaagccgaaggcaaagtggaggagcctgaaaacccagctgccaaggagaaatgtgagggcaaagaagaggaagaagaaaccgatggcagcgggaaggagagcaagcaggaatgtgaggcagaggccagctctgtgaaaaatgaactgaaaggggttgaggtcggcgcagacactgggtccaaatctatttcagagaaaggttccgaagaggatgaagaggaaaagctggaggatgacgataagtcggaagagtcttcccagcccgaaggtaaggccttaccactggcccctctcctgaccctgcagcagctggttgtgagatgcgttgctttctggcagcacggcacctgctctttttcacgagtacttagtgtacattttcttctgtgaagggataatttcaagttatgcttatatctgtgttttgctctcgcaccttatagcacctaaccatggtattttgaagaacataaactctaagaagggttgcatggacacattagcaatttctggtttaaggatggaagttaacttgtagtgagtgacagtgtattaagaattctatgtgattttaattttgacaaatatgagggaaggtggtcattcactgagtaaatattgttaatcattttgaaacaattggtgcttgttatgttttgattcagaagtaaagagtgggaatagaatctaaaaataaccaattttttaagtcacagtacggttgctgaaactggcccagaataaaaatagagcacgtactgtgctgtagctggaaccttcaacttttgacagaaggtcagcccttttttctgtgtggaagaacatagactcttgagtcaatgacttggttggctatcagcctcttgtaaggtttacttgcacggtgctaggtggctagtgactaacctctctaagcctctgtgtcatcatctgcaagatggaaataacaccatctatgttaaagggctgttgtaagctttagacaacagtgcccaataccattctagccatgtagtaggtactcaataaaatggagctgattagtattcacatttttaatcatgtcctttctaaacttcagtttccctgatactgtggttgtgagtaatgcacattaactcatttctcagcaggagctgtctctagagggaagaattttgatgaagaaagcaatgcttccatgagcactgctagagatgaaacccgagatggattctacatggaggacggagatccttcagtagctcagctccttcatgaaagaacatttgccttctcgttttggcctaaggttggcaggtttttgttgctgttgttttgctgaccaaaaaggattagggtagaggaaatctttctagcttgatttttcaagtaattttaaggtaaacttttgacacagtatatgaagactatagatttttcttatacttttaaagaatgatctgaaaaagcccaaagaaaaaaattgtagaacacttttctaataggatgggaaatgtgatgtgaaagaaagataataagaaatagaagtgtgtatatggattgatctttggctccatgtggcttttaggttacttacccccgttgtctagcataatctatggattatcactgtgttttaaaatttttttgtgaaataaagccttcagatttaagacaactttatagttttggaaacctaccagcttcttgacttggaagagggtgtactgttgacccatttgcttttgacgcattatgagataattccaaatgtagttatctgtaaccaaaagcaaaatggaaattacttttttggctaaatagtataattttataataattccctgtgtaatttaggtctgtttttcagggtgaggaaataatcatcctaatcaccataacagggctgtctggtttaaaacaacacaaaaaatgagcttcagtcagcctaccccccaggctcgtctttcccagtattattgtgtaagaaacaaggtgaaaattttgaccaaagaatgtactgtcaaagacattttgtttcctctctctatccctttagttcccctgttatgctaacctcctttattgagtgtaggagggagtttcccagatcagtcaaaggttatagtagcagacacttttaatctatggaaactcagtctaaagctgtaattagaaatttttaatgtacacgcttcaatgaaatttgaagtgataataggtagggaatgcaaattgacattcattaggtgttcctaggttggtgcccacttcataatgctgaactttattaatagtgacgctaatgatgtcctacttcctgggactgcaatccagcctgtagatctgaagggccagggcggcaagaagctaatgcagggtttccattgtcatctactgacatccaccagcagagctctatggagcttgtacaagagttactttttaaatatgaagatattttgaaggtggtgattatgtagtacatttttctgttttatgtagttcagtgttcgtaattaaaaatagcatgttttctgtgttgaagccacctaggaccttctgccagagcaatgccattataggagattttgtttatttactttcttgtttgatttcttgccttgttttcttttactttttgtcctccagttgacttttaaacattttatgctcttttgcatcttgaaggatgtatttatctagtaattttaaccagggctttgttaaaatttcttgtgacttttcttctccctccaggatagagtaatgataaaccgcttagacaacatctgtgaagcagtgttgaaaggcaaatggccagtaaataggcgccagatgtttgatttccaaggcctcatcccaggttacacacccaccacagtggacagccccttgcagaagaggagctttgctgagctctccatggtcggccaagccagcattagtgggagtgaggacatcactacgtctcctcagttgtcaaaggtgaattagaatggcttgtttctgcagcttaaaagggagctctctaagccttaactgagtttgcgagcttatatttcactggccttgcttagaaataagatagctgctgtttcctcagctctgtgcaccagtcatgaatgcttaattccttaagcttcttgttccttatttctaaaagccagcccatatagcagtactgttttggctcactgcaactctgttctgttggaatttttcaataggaagatgccctcaacctctctgtccctcgccagcggaggaggaggaggagaaaaatcgaaattgaggccgaaagagctgccaagaggcgaaatctcatggagatggttgcccagcttcgagagtctcaggtggtctcagaaaatggacaagaaaaagttgtagatttatcaaaggcctcaagagaggcaacaagctctacctcaaatttttcatctctttcttcaaagtttatcttgcctaatgtctcaac

SEQ ID NO: 5208 - DNA, 7609 bp, Homo sapiens
gcagctcggtgctgattatcacaactgtttggtgacctacttcactgacctgtgaggattccttcccttcaggtactggattcttgatctttctgcatcatcaaggtcctaattgcaatgaattacactcttgcttaaaaaaaagctttataaatgtaaaactttctcatataaacatctttttatgtaatgatcattatttctgacatctccaattgaagtacttgataacttaagcaaaattaagatgtttgatattcatgatgtcaagagatttatagtagtcatttctaaatcttcaaaactatgtaaaaaagaaagggctcattttgtatgtataagaccaaatataatcttgagcagtatactgattatttttggaataaggtaaaatttggaaagccaaattttttttcctatataataagtcaatttgagctttcagttacccaacagattgctccagcaataattggtaattttataattaacttctgttgtttgtagcgagtgactaattctgtaaagtgctgtgagagacgagataaagagtctttaaaacattattaattgaaataggattggaggaatacattatacatttgctatgtaagtttttgaaatagctttacatatgttattataaattgcattcagcaagtagttctgacttttgtaatgtgcaaatgacattcagctgtaggaactccagcttcttaagatttttgctgataatttagagcagtggctgcacagcaaaatcactcaggagctctgaaaaaaataactcgtcttccagagattttgattttgtttttctgcagtgaggaaaatgtatctgtaattttataagctcttacaggtaattctaatgactagcttaaaggattttgaatgtcactatcttgaaggattttgaatattacacaaatagggcataacttggaaatagcaatggactgtgcagtgtaccagatcggtgtccatattgtcagaaaaaaattgagactccttctaaaaatgcatttaagagccaggtgtggtggcttgagcctgtagtctcaactactcaggcggctgaggtagtaggatggcttgagctcaggagttctaggctatagtgcacagtgatcacacctgtgaataaccactgcacgccagcctgggcaacatggtgagaccttgtctcttaaaatacaatgagtttcttaccagtctaatctaactccagtgtggtgagggggtgggactagaccttgaccacagtgcccaagtagataggaaatgaatgttgattgaatatgtgagtgagtgaagagttatgcttcattcacgacagcagatgcttaatccatatcagagaagtgaaactttacttttaaaacctgccaagcaaaaagaaagcacaatagctcaccataacttgttctgtaaagccttttgtacattccaaagcactttcacattaacttttctcattcatacatttcaaattttaacaatacatatagccaggaagatcttttttaaccccagttacagaagaaaagctaaaaccacatagcagcctggcagtaatatttgatcaagttagcgtgagaaattagaaataatatttttcaaaatataacatttgggtcagttcaaattaatggtgaaaagatgagttattcagtaaatggtattggtacagttggctatccatttggaaaataaagttatgcaaaataaattccagatggatgagttaaattcagatacaacgagaatttaggggatttttaaaatgtaatcatggtatggggaaggcctagagcagaaccccaatccagaagtcataaaaggagctactgagacttacctactgtggtaggtaaagacttgcactctgatttcatgcaatttagatttatttccatttctgcttattgcaactgtatgatcttagaactaaaactatcctttaaacatccaaacagatgtttactcaaggaaatacatattacaacaatgagctatcattctttgcctcttaaattggcaaaaatttaaaagaattggaaagaggtgaaaaagagtacagtccctcatattctattggtaaagtataagtcatactctctttttttgtttttttgaagggtaaattgacagtatctattaaaagttaaaataagtatgtcctttgactcagcaatttcagtcctaaatatctgtcctagagaaataattatacatttaaaaatatgtactaggattgttactgaggcattattcaaaatagctaaaaaacacaatattctaaatgcttatcaatatggaaattgacctgttgggggtaagtggagaagggagattcttttttttgaagatctatgggtgtcggtgattttgctgtgaaaaaccactagaaatgtttttagatagtatttttcctaacaattgttagctagtgttttgtactaaggagcaattgtaaggcatagctaattttaatcaaatgtagtagtttgaatgtctttctataaacaaattttataactgcttttttttttttttacagaatggaaacagactgtaatcccatggagctaagcagtatgtcaggatttgaagaaggttcagagctgaacggttttgaaggaactgacatgaaagacatgaggctcgaagctgaagcagttgtaaatgatgttctctttgctgttaacaacatgtttgtctcgaaaagcctgcggtgtgcggatgatgtggcctatatcaatgtggaaacaaaggaaagaaacagatattgcctagaactcactgaagcagggctcaaggtaactcacttttccttttagaaaaaaaaattatttatgtctttaccactttatcaaaaagaggggtagtggggaggggaagagtgttaaaagagaactggatattcagtagcttccaaatttttttaagaaaaacttttaacctagaaatttttattaattttaaaggcttttgatcgatatggggaaacagaatttttttgaaaaacatttgatttgcagggcgtgactttgttttaatcatgacccccaaaactaatttatttctcatctatagctaaatgtgttcaccagaattatacatacattctttgcattgaatgggttttgcagtcactgtgttgaaaagattttcaacacctcttgaaaatgtcgcttctgttaaaataacatacttgacaacactgttttccaactctgagatcagaaataaatcagagcagaacattccacccccagatttccaagagtgtcccattaaccctttattatgagtatctctttattatgagagcttttctaggcggattaacctttccattctttaaaccaaaatcatgagtttagaatagtagaaaacatcacctgagagcaacttttaattaaaaaagaaaaaactataggccagacctgcgggctcttacctgtaatcccagcacttagggaggccaagctggtaggatcattttagagcagaagttcaagaccagcctgggcagcatagcaagaccgtgtttctacaatatattttttgttaattaacccaacatggcagcacttgcctgtaatccagctacctgggaggcttaggagggggcctatgagttcgaggttgcagtgagctaggattgggccactatactccagcctgggtacacagaccctgtttaaaaaaaaaaaaaaactattataaaatctttgacctactgaacaaagggatagacattagaaaatctaaaatctagttttaaccttactaatcagtgaatcttcagtcttagaaaatgtcatacatttctgtgtttctatatttattcaaagtaattgtacattatcataaggtggtgagcaaggcctgcctaagcaagtaagaatgtcacatgatatcaagtacataaacatctctttaattcgctggattcactttgctgaagatgagtcgtgtatactgtatattccttgatggagcaaattgcaaggccagcatctgtactaccctcagttccctcacagctgctgcaaagatagctgcttagctttaagcatagtacctgaattaactaatttttgtgcacttcttttcacatccttaaatttgtactaaaagctcagagtatttagaggtgaatcttaaatcagaagtagagataaatgacagaattagtaagataattctctgtcttgtgttggttaattctaagttgactgtggagaggtagaaggagttctgatcagagagtcagcagtcttaaatgtgaatttaagtgatcttgagtgagtccgtctacccctgagagagtttctgcttcttaatctataacttggagatttaaaaaaaacttaaaacgatttggggaatgattatatgactgtatgatacagaaagatctgaaccatatgtaaaacctgacatgtagtaggtgctcaaatatttgtttgtttttcagtctgattcagttaacatttattgagcaactatcctgtgtcagcaattgaaaatcaaaccatgcataagacatgatccctgtccaccaggaagatcacagtctagcagagataagaggaagaaggcaaactgaactctactccactgtagagagtgcagtaatagagcatggatctgaagaggtgtgattcattttccttaggtgtctgcctctgcttttcatttaaaaaaaaaaaaactcagcttctatttctaacacaaactttcacctcctatggcttaaatagatgtcataaaaatttaggatttatatagggaatgtacacacttaagtcagcaaaaactaaattaattttgccctatattgtgctggtgaaccatgatataccttataatcttgtcaaaaagaaaagttgtagctgtgttcacaggaaaaaaaaaaaaagaaaaacacatggcctgtcagccttttgcctaagatcaattggagtatcttttcttatcagtttaatatctgttatgtcctctatctaaggacaatatattaaatggatttttggagcagggagatagaataggctcttgctccattaacttcacacatcgacctggtattgcaaatacctccagaaatagtgtacccctaccaagaaaaaaaaaacacattaacatgttcttttatctcacagaattgagcatttattccctgtcaggtaagaaatatattaggtgaaagtggcctttcagattactaataataaagctaaacagttattaaaactaataaactattaaaccaattattaataaacaattattaaaattaacaactaattattaaaactaaattattaggaataatttttagaattgtttataaaagaagtgaaaaataatgaaaaaaatatgaactaatgatatattacctattatagtacttaatatagtggaccctcaatatatgtggaattaaatggggtaaataatagatgcatgttttagaatatgaaaatgaaataccatttttgtgtagcttttcaaattctttctctgcatttccttgagcttctaagtaaaaccttttaaatgttgaaaattctatagggagcattttagtggtgtttctgtgttatacattataagttgctgaagtattaaaggttgtatttaaaatgtgtatactctgactttgagaaatagtttcactcagttacccatgtatctggtggtctagtggctaggaaaagaaataatttatttttttgaaaggatgattactcacataaacacttggattttgctttctgtaccaacatgaaaactaatgaattcactgttgcatttctcttgtaggtggtaggctatgcttttgaccaggtagatgatcatttacagactccctaccatgaaacagtctactccttgttggatacactcagccccgcctaccgagaagcatttggaaacgcactgcttcaaagactggaagctttgaaaagagatggacagtcatgactacactttttcctttcagaggggctggtgctggtacagaatgttgatataaagcttaaaattcttgcatatggtcatagaaaatgcatctttggttttgtgtttttatcacttgcttccaacttaggcttttggctcagaagattattgaataatgatttgtcttagtttctgtttcagtaagggaattctgaggccgttgctatgataccatcattaagacattcacatgtcttcatataatatctcttcatttcaaatcctaatcactatttcatactattacagggctttgatgctgccagcactgtcttttacataggaaattctagatttgcacagtaatagaggaattagaagtacctaactatacactttgattcagcctgctaaatcaggggttcaatactagcttggacaaactttgtagtaattaattgctaccagccttattggaaacaaattatcaactagtttcccctgcacaaattttgaaattcactgcttcacttaatctatttatattactaataatggattaataaagatgaattaattatatattacttaactagtattaaatgaaaaacagggactgaaatagttctgtattccgtgtttgcaacagccagccaactaagcagaggataaaccgttagcaaatgaatgtaataattactcatttccaagatatctaagcacataagcaaatacaggaacagacttcattctttttcttaacaaaaaagcatcttcagtgtgtgatttaaaagaaagaagattctggtttcctagaaaacaatattttggcctgtgttgattcttattctgaatgtgtgtttacataatgtacagtatatattcagaaagtatttttgcttcaacgtttactttctatgatgtagtgctttggtattcctacagcaccccaccttccccaacagatgtacagtgttctgtctccattcgaaatctacaatgtaatatgagtgcattgtatgggtttgaaaccaaaggatgaatgaagcattcagagacttaatatttgaaaaaggaatagtcagtattttatattttattacaggtactgatatttataaatttaataaactgtaccatgctgctgcatgttttcaagtacatgttgaacagtaaggattggggagttgttttttaatggtcacctaaagcagctgctatagaaatgttgaactaaaattttgcatctggtcataccttcatgcatttatcatttgcagatatttttccatcattattaaaaaacaggaacttttaggctctgaagatcatgtggaccagagcaaattaaagttcagtttgtgtcacaattcattgccagacttcattggaatgctttgtttgatgatgtatgttcattctcagctttattttcagatgcttaactgggcaacgaagtctaacttcaggttgaactttctcatgtttaatctcaggctaaatgtaaatgatatttgtaaagtttgaataaaattctgtttactcattttgagttagtatgaaaaaaagtgattgtatgtttaagaattgaaattgttcattttgtgataaatgattaattccaaga

SEQ ID NO: 5209 - DNA, 7609 bp, Homo sapiens; identical to SEQ ID NO: 5208

SEQ ID NO: 5210 - DNA, 3948 bp, Homo sapiens
ccagacccagggctacctgcggagtccacaggaccccctgcgccgggcagccgccgtgcttataggtgaggccgcccggggtcacactgcccctggcaccggggctttgggagctgggccagcctccccctggggggctgtggggcctgcactcatgcatctgctgtggtccaggcttccttgtccaccacgccagccccggctgtgtcaaccaggacctgctggactccctgttccagggtgaggccccaccttgccaggggatggtgtcctggagacgtggctggtgctagggcggagtggacgggagcggtgggtggagggccaggggcccggcactcggcctcctgggctccccagcctgagccgcgatctcctcgcagacctagggcgactgcagagcgaccccaagccggctgtggcgccggcagcgcacgtgtccgctcagcaggtggcgatgctggcccgtgcccggggctgcccccgcggccccgccttctccgcatcgccccgcgccccgcccggcccccaccagtcttcgccgacagccccttccagcgccggagcgtcgcgggccgctggggctgctccggaccccgccgagcctgaggctcgggctggggccgagggccagggtccgactcgggcaccccacgcgcatagcagcctgtccccgccctgacggaggggctccctgggcctggtgctggacgccaatgccctcccccaccccccacccccgtgacccctcttcaggcacccaccaccctgatggtgacagagggggacagccagcacccatctgtccccgtcagggctcttgttctcacagccccctggagcatgccccatgccccaaccttgggcctggctcctggcccagatggcacctggcctcttgagtctgctgggggaccccaaagttggtggtcccatagcctgccctcctgggtctccacctcatgcctggacaggacgctgtggcctgtccgggccttggccagccctgcagctgcacccccgatcctcatccctcaccccattccctgccagcatcctaaggctcctggcgggcatcctctctgctcaaaattattgacctgtctcccggccacacctgctgtgccctctcagccaggccatcatcaccccctgttcattatgtcaggcctcatgggagcctggccttctccagaagctggccccggcgtcctcccaagctggaccacgtaggccccagatcacacctgggggtccagatgtaggggtcctgtgtgcacgcccaatcagaccgagcacttgtgacactaccccaacacctctcccagggctgaatgaggaacgcgccactggacacatgaggaagaggctgctctgggagctactgatgctgtgacctcacctctctggctttgggcggcaggtccctgcacctaggatgcctgcctggaaatgtccttgcattcgtggcctccttcacagcctcctcctcagagaagcctctgcgagtgcacagggagtgtgtgcagccttgtgaagggctgggaccacttgcccagactggggcccctcaggcacaggcgtggggtcctactgacctgtctccccagctcccacacagaaagcatctaaaataaacacacgtggatggaaagcgttgggcatctgttttgagtgtggttatgggagctgaccctggtccaagatctggctcaggctggggtaataggccatagtccctgatatggccccaggtagagtcagtttggcagcagggttaaaggtcaggcaggctccaggcacaggctatggccaggtcaggttgggttaaccctaagacagagaagctgcgctctggtctaacaggcatggaatggatggggttagagctgtcagcaccggggtgagtgtctctttgcaggtcatatgcaggaagctgaggatcaggtgaagggcccgggtcttcgtggagtcaggggcaaggtttggtggatgagtttggagcctccacagcagataccaaaacgggattcaacataccagaaacagatagagagaaagaggccagagaggcagaggccaccagatgcccagtgaaggtcagatagacggaagccccatggacgtccgtgctagccttcaggaagctctcaaaccagccatctgtccgaggtccgcacctcccaggacgggctaggagcacccatggggggcacaccctcggcactggcggggacgggtttcgggacacagccacatggatcgtctcagtagcagccccaaagagggaagcaagcccggcctccttgctcaccttgcaaccaggagccaggccccagggcaagcatgtgctgcccacctagcacaggcttgcccacaccccacagcacgctggacagtctggtgggcaaacccaacagtgatgccacgctcaccccagatgggggctgaggcggggagctggctgtggtgggcaggcagcacccctgcgctcctccccctccctcatggtgcccgggagagtccgcgccgtcctgcggcaggctgtgtgcagcgcaggcgggcttgccccatacagctccctgttaggagtgtgtccagccccgccttgctctgcactgcccagaacctggttgccctgccaggagtgagattcatgcaaagtccacatggcctctagagtgtgactcttccctgctggaattcctgggaggctccaggtggcacagtgggctggtccctccatggggatgctgtgtccccagggtccatcagatccacctgcagagagcccaccccagggcaaatattccaacggggtctaagattggagggcaagagggcaggtgcaccctgacactcattccctttccacctccagccagtgggccgggacagtcttggcctggatgcccaaacaatctctaacgggccatgttgccagagagctcattggtggtgcagctctcaagatggggctcaggtgtggcctgtcacatggcatggcctgccggtctcagggccccgaggctgtgccttgtgtgcctgcctttccaaatgctttctaggacccgggctactcccaccccactcaccctttcaggtcacccgaaagggttttccaaggaggaccatgagtctgagaggcgttgagtttgttcctacactgtgggtaggagtgtctaggagattctgtaacttggatctgagatactggagtttgttttgtctcctgtttcaatgttaatgtcactattcatagcaataccccatctctacaaaaaatgaaaaaattagccaggactggtggtatgtgcctatcgtccagctactcagcaggctgaggcgggagaattccttgagctcaggagatcgaggctgctgtgaaccatgattgtcccactacacagcctgggtgacattgcaggaccctgtctctttaaaaaaaaaaaaaaaaaaaaaggccaggcgcggtggctcacgcctgtaaacccagcactttgggaggcggaggcaggtggatcacgaggtcaggagaccgagaccatcctggctgacacggtgaaacccctgcagtgagccgagatggcgccactgcactccagcctgggcgacagagcgagactccatctcaaaaaaaaaaaaaaagtctgctgggtgcggtggctcacacctgtaatcccagcacttcgggaggccaaggtgggtggatcacaaggtcaagagatcgagaccatcctggccaacatggagaaaccccgtctccagtaaaaatgcaaaaattagctgggtgtggtggtgtgctcctgtagcctcagccactcgggaggctgaggcaggagaattgtgggaggtggaggttgcagtgagccgagatcacgctactgcactccagcctggcgacagagagactccgtctcaaaaaaaaaaaaaaaaaaaaaaaaaaaa

SEQ ID NO: 5211 - DNA, 331 bp, Homo sapiens
cccaaccaggtccagctccaggccctgttccctgtccccagatcacaccgagtcagcagccttccctagacccgccgcttcctcgctccgcgctggccgccccctcccacccttgcagcccctctctgtctccgcctgccctgactgcgccctcccacgcagacacgggactcaatccgcgcctcggccgtcgggctccttgggactctggtgcgccggggccggggcgggctccggcctggggctccgcggccccctgcggaagctggtgctgcagagtctcgtgccgctgctgctgcgcctgcatgaccccagcagggacgctgctgag

SEQ ID NO: 5212 - DNA, 835 bp, Homo sapiens
tttccttcgtatgccacctttattgtgtttccccaactcctgggccccatggtagactggccacatggctactgggctcctggccttcctagggctagcagctggtgggcaaacactctgccctgctggagagctgccaggccatgcccgggcacaggctagtggggctcctggctcagtcctgatagcagtgccagggaggcgtagagtgcacacatgcggccctgggcctgcggctcccagcacacgtggggagtgtcctcccccagctctaggccacactcgtccagcaagacccaggccggtgctccttcgccccagctgttccccaggagcccggggggcagggacatggtgctgcgctcctgccacggggcactctgctccaagaggctgcccacctgccaagacagggcaggagtgagtcagatggggaaatctgggcatcttgtgcctgcccataccaccccttcccaggtgccacagggccccttccactggctcagcccatcctcctgcagcccgaacccaaccctctcaccagctcgagcggccccaacagggtctgcgactccagcgcctccgccagcagcttgtgctgcgtttcactcagcactgggagagagtcaggtaaaagggggtttctgaacgcccaccgggaaagcccacctccctccctcccacccgccacctgcccccagcggccgctcactggtcagtgcccccagcaggtagacaacagggatagcgagttccggcaccagcattccggagacaacaccaggcactccaggacagcacctgctggaccgtccaggggctccaccggcccaag

SEQ ID NO: 5213 - DNA, 2446 bp, Homo sapiens
ttccagctggcatcccgctgctcagcaacagccccaccccgctggagagcaggctgggttacatgtctgccaggtgagcctccctgggggctggttggggtggaacgtcatagtcgagctgctcactgtgcctccctgggcaggtggacctctgaggggagcagacctcctggtcttaccccaagaaatcaggcaggcctctagtccacagagctgtccccgcttgcctgggtctgaggcgcccctccatgaccaggggaaagtcaagttcacaccgccaaggtcccagtggggaagggctgggcttaccctgccaaccccctgaggaagctgccctctggcccctgtggggaggagtcagcccctggtgggaccctgcccccgcccctccctctagcccctccagccccggagtctggcctttgtctttgcccttgagctcttgtttgcttcctgtggctcccttattcccccagtcctgctgagcaacatctggagtgagagggacaccctgtggaggagacagacgggcaattatttaaacctgttattaattttccattcatctcattccttgccaaatgttttcccctctccctcccttaggcagctaacagtgagtaccccccactaaccctttggccaacttgagagctgatgctggccaaggattgagttgacagaggggagcgctttgctgatgagattggcgggagcaggcggatgtgggagcccagagccttgtatcagtagcacccagcaagggggcagagggcctccaccactttcccgtttgggaactgttctggaggggcagatgttttgaagctttgaattgctagggacctcggagaagctgctctggtagctgagagaaagagggaggaggtgacagatgtgatggcctctgtgcatcctctgtcacttccgcgcctcctctctcccctcgccatgctctcctcttccttcccagtgagcagctccggctcctacagcactcccattcgcaagtccctgaggcgggcagcaccacctttcagggcataattgaggccaaccggaggtggctggaacgtgtcaagaatgaccccaggttgtatccttttacctggttcccaaactgggctgggctgtggggactgtgcttgtgccctgaggggctgaggaggatcctgttcagcctttgaccctttcatggcccctgcctggctatgcccagcgactgcagttttccttcaccttgtggccagacctctcttctcgtcaacacccaagccaaaagctactttgagcctcctgcagctgggccttgatgagcacaacagagtgaaggtgtatcgcttctgaggccctgagcaggggcttggggcagcccagcctctcctccacccagaccaagtgcctgaggagctgcctgccttcttccatctgagaaagcaccctccttccccctttgacttgcaggagccaccagggaccagggggttgagtggaacagtaaagccacacattctgtgactatataacctatctcaggctaaaatgtgtggactcgtacgagctcttgtcattgacatggcaagctgatggcgtgcggtggctgcggggtatcagggccgggagccctttgggaggaagggaggcgttagaggagctgccttcggaggctcagggagtccctttggagctggttgtttccttggccctgcagcgcactgctcggggctcccaaggaggttgtgtgtatggttcttaattcatcaggacaaagacccccagcatgtgtgtaccctgggacccgatttctctgggcccacatctatctccaatacctcagcctcagatcagaccctttcttttttgtctttcttctcttaatttttaaatgcctcttttcttgagcattccatctctctttttgaccctctcaggactgggcttagctgtccagagccctgccggagggtgctgggggctgtccctctgcaggcactgtgttttcctcaggggctgtcctcagaacacccctcctgctccctggggctcctcagggagccatttcagctggagtctcaggtctcaaaaacaacttctccaggaggccaaaaaaagactgggttggcttctggtcctcatgatggcttttatcctcctgggacactttgggtatattcatgggcattgtttccatctgtcttttctacctgtgccacccctggccctgattccacggctgcctcaggcaggcaggcaaggagctaggccggtgcccggccctggcagcaaggggtctttgtgcagttggagatgctgccgttgtggcagagcgtcctgcagccccgcttccatcagcaggctctggggtgggggctttgcaggggatgctctctgatgtttgttccgttgtttaaataaaatgcacttatttttgtttttttttttgcaa

SEQ ID NO: 5214 - DNA, 3502 bp, Homo sapiens
cccagctccctccccgggaccctaagagcacccccacccccacctactatggctccctggccaggttctcagccttatcatctgctacacccacgtccacccaatgggcctgggattcagggcaggggcccaggctcccctcctctgtggctcaaacggtggacgacttcctgttggagaagtggcgcaagtattttccatgtaagccccactctgggcggagccttcccacctgcctcctcctcctcctcttccttccttttcttctaccctctttctcctgctccttttctcctcttcctcttttgcatccctttgccacacctctcctcccccaacgttaccatagtccattggtccattgactctacctgtgggtccctggggaaggagacattgcaggtggccctgcagccaggagttctatgggttgggacggtttagatggagcctggctgactggggcctttattgtggattctggagctcagtagaacctaaaaggtcattgtcgtcattatcttaatagctaccatcttgtgcaatacatgatgggccaagcagtttatatatattttttcatttagttcttaattctctgaggtagtaattatttatccccattttacagatgaggaaactgagtttcagagagtttaagtagtatgctccagggtacccagtgagtgagtaacaaactcagttgtgaccccatgtctctgtgactccaggattctgcttggaacctcttggctgtgtggctaattcttgcttctgagccaggtggcctccccaggtctcagccctgctgaggattatgaaaagccataaaacaaggcatttgaggggaaacaaaatatcttctttttgccctaacccaaattgaaaagtagattaagttttaaaaataaaataaataggaccattcctgtctctcacctgtctctggcctccagccactgaagcttttccttttattgtttattctggggaggcaagaggtgctggtgggcagggtggtgaccactgcccatttctgagtcctgtccccatgctcttccagctggcatcccgctgctcagcaacagccccaccccgctggagagcaggctgggttacatgtctgccaggtgagcctccctgggggctggttggggtggaacgtcatagtcgagctgctcactgtgcctccctgggcaggtggacctctgaggggagcagacctcctggtcttaccccaagaaatcaggcaggcctctagtccacagagctgtccccgcttgcctgggtctgaggcgcccctccatgaccaggggaaagtcaagttcacaccgccaaggtcccagtggggaagggctgggcttaccctgccaaccccctgaggaagctgccctctggcccctgtggggaggagtcagcccctggtgggaccctgcccccgcccctccctctagcccctccagccccggagtctggcctttgtctttgcccttgagctcttgtttgcttcctgtggctcccttattcccccagtcctgctgagcaacatctggagtgagagggacaccctgtggaggagacagacgggcaattatttaaacctgttattaattttccattcatctcattccttgccaaatgttttcccctctccctcccttaggcagctaacagtgagtaccccccactaaccctttggccaacttgagagctgatgctggccaaggattgagttgacagaggggagcgctttgctgatgagattggcgggagcaggcggatgtgggagcccagagccttgtatcagtagcacccagcaagggggcagagggcctccaccactttcccgtttgggaactgttctggaggggcagatgttttgaagctttgaattgctagggacctcggagaagctgctctggtagctgagagaaagagggaggaggtgacagatgtgatggcctctgtgcatcctctgtcacttccgcgcctcctctctcccctcgccatgctctcctcttccttcccagtgagcagctccggctcctacagcactcccattcgcaagtccctgaggcgggcagcaccacctttcagggcataattgaggccaaccggaggtggctggaacgtgtcaagaatgaccccaggttgtatccttttacctggttcccaaactgggctgggctgtggggactgtgcttgtgccctgaggggctgaggaggatcctgttcagcctttgaccctttcatggcccctgcctggctatgcccagcgactgcagttttccttcaccttgtggccagacctctcttctcttcaacacccaagccaaaagctactttgagcctcctgcagctgggccttgatgagcacaacagagtgaaggtgtatcgcttctgaggccctgagcaggggcttggggcagcccagcctctcctccacccagaccaagtgcctgaggagctgcctgccttcttccatctgagaaagcaccgtccttccccctttgacttgcaggagccaccagggaccagggggttgagtggaacagtaaagccacacattctgtgactatataacctatctcaggctaaaatgtgtggactcgtacgagctcttgtcattgacatggcaagctgatggcgtgcggtggctgcggggtatcagggccgggagccctttgggaggaagggaggcgttagaggagctgccttcggaggctcagggagtccctttggagctggttgtttccttggccctgcagcgcactgctcggggctcccaaggaggttgtgtgtatggttcttaattcatcaggacaaagacccccagcatgtgtgtaccctgggacccgatttctctgggcccacatctatctccaatacctcagcctcagatcagaccctttcttttttgtctttcttctcttaatttttaaatgcctcttttcttgagcattccatctctctttttgaccctctcaggattgggcttagctgtccagagccctgccggagggtgctgggggctgtccctctgcaggcactgtgttttcctcaggggctgtcctcagaacacccctcctgctccctggggctcctcagggagccatttcagctggagtctcaggtctcaaaaacagcttctccgggaggccaaaaaaagactgggttggcttctggtcctcatgacggcttttatcctcctgggacactttgggtatattcatgggcattgtttccatctgtcttttctacctgtgccacccctgccctgattccacggctgcctcaggcaggcaggcaaggagctaggccggtgcccggccctggcagcaaggggtctttgtgcagttggagatgctgccgttgtggcagagcgtcctgcagccccgcttccatcagcaggctctggggtgggggctttgcaggggatgctctctgatgtttgttccgttgtttaaataaaatgcacttatttttgtttttttttttgcaa

SEQ ID NO: 5215 - DNA, 1798 bp, Homo sapiens
gcggaaaggccacaacctgctgaagaagaaagaggagaagctgaatcagttggagtcctctctttgggaagaggtgcagccccatgtccacatagtccagtgggccctggccttcctcttctgttcttgggattgggttgagttctttggtcctgcatccgggggagttgggcctctagggcccaggattgggcagtaggcttgtctactggctgatgaaggtggcagtggcttcaattctgagtttgttgaagacacctgtgggtttggatacctgtgctgaatggtccggaatatacctggaacctcttgctaaaggtgcctgagaagagggccaagcctttaccctgccctggtccctaaggacaggtgtgaccagggtgtcaggaatggacacacatgatagattttcctacctgccttgggaccttgtggactttctcctagatgtctgaggcttaggtgtagcgggggaggcttaggtggagtaacactgcagggagagcttactgggaagggtggtgggggtctgtgtggacctgatggcactgttgtctctgtctcaggcatttgggacatatgctgagccttgcctccctcccaccctgctgtgaggcagcctgtgtgatttgcttcgcccagggtacctggtggaactctgggccccagaggagtctactcaccaagtcctcagttcccacacatcacaagggcgacagcctacataccaccttgaatttgtagcaacaaaattgctaggagaacaaatggagatggccatatttcatggatttgcgtaagaaaaccagcttaaagacaaaacataaagaagaacctagctcagtgtcccagccacttcctaggaaggaaaaaggaagggtagaaagcacgtgggagaggtgggtcataactgctgactttaccccacaggcctcagatgagggcactctgggaggatcccccaccaagaaggcagtaaccttcgacctcagtgacatggacagcctgagcagtgaaagttctgaatctttttccccgcctcaccgtgagtggtggcggcagcagaggagtgagtgggggagatgcggggtgaggaccatggtatccatggaatgggaggaacttggggaatagaagaagagctctcttccctcagccctgcagagggaggcctctgtgagccggtgtctggactaggtgctcggtcagtgctgggaaggaatcacaccatctaggtttgccagcacgtggggctgaaaggtcagggaagccctctgaatgctgcagagcactctacggtgtgaccactggccttgctggcctcttctcttccagggcctccttgaggaggcttttctctctcagctgccctggcctgtatgtgacagaagggccctctccccttccttctctctggggtcctgggcccttcacccagcaccttgccctggaaacctgtttctcatggccagcttctcacttgcactgtctggaacacagaagccctgccatccctgaccccctcataaggttgaggggctgttgtctggagaagcagggaggggtggccagtagggtcctccatgacagctgtgtctgggaatggtccagggtcctgagcttgagtcccttcccaccatccacctcttttctttcagtcgactcaaccccgagtctcacctcccgcaagatccacgggcttagccactccctccggcagatcagcagccagctgagcagtgtcctcagcatcctggacagcctcaaccctcagtcgccgccgccgctcctcgcctcc

SEQ ID NO: 5216 - DNA, 1329 bp, Homo sapiens
ttttttttttttaaaggatattcttagtagactatatgttcacatgactcgatattcaaatggtgcaaaagtcactccatgagttatctagtgctccccattgaaggtaaaaaatactaccagttctttctggagattttatgcaaataaaaagaagggacacttatgattctcttccctattactggtggagtatgggtcactcctaatgtaggatgggatgattgccccaagctctgtcgtgagtggttgattgacggttttcttaagggaacaatgctgggaaagatgataggcgcccgccactgacccctcccgcctccctgcccctccagtaaactcccacacaaaatagcagtatgaggtgtggggaaataatcttggcctccgtcctgggtttacttttgactctgccacctacaagctgtcacctgaacaagtcctttccgttcctgtgtcttccctggtcacaagctctaagcctgaacccacactctgggaatgaagcagggtagcggcctctgcttcagcaactctgaggggtctaccttgggtggggagttggcctcatccagagggctgctggagggccaagacaaggctctggtggggaggtgtgctgagaggggattgcttatcccaccaccagcttttctgggggaggtggggaagtgatggttaaaaaatggagttcctgctatcagccatgtcctgatgaattggaaagtccccttctttctcctttcctcttgcatctcctgcctgcttcccctgcctgccctcctgtgacatgtgccctctccagcaggtatgtcacacagcaccccaagggaagggcagtgtaacgctcttttccatgatggactaccacagccagaggaagacaggccttcccttcttttctagttctttttggtttgaaaacaaggcactcttattttccccttccaagaagctggtggttcacacgggccagcacacgcattatcaaagacctagtttgtttctagtaaatgagtccattgaagtgggagccttggccgggcaaggtggctcacacctgtaatcccagcactttgggaggccgagatgggtggattgagatcgagaccatcctggtcaacatggtgaaaccctgtctctactaaaaatacaaaaattagctgggcgtggtgacacacacctgtagtcccagctactcaggaggctgaggcaggagaatcgcttgaacctgggaggcggaggcaacagtgagccgagattgcgccactgcactccagcctgggcgacagagtgagactgtctctccaaaaaaaaaaaaaaaaaaaa

SEQ ID NO: 5217 - DNA, 1799 bp, Homo sapiens
gcggaaaggccacaacctgctgaagaagaaagaggagaagctgaatcagttggagtcctctctttgggaagaggtgcagccccatgtccacatagtccagtgggccctggccttcctcttctgttcttgggattgggttgagttctttggtcctgcatccgggggagttgggcctctagggcccaggattgggcagtaggcttgtctactggctgatgaaggtggcagtggcttcaattctgagtttgttgaagacacctgtgggtttggatacctgtgctgaatggtccggaaatatacctggaacctcttgctaaaggtgcctgagaagagggccaagcctttaccctgccctggtccctaaggacaggtgtgaccagggtgtcaggaatggacacacatgatagattttcctacctgccttgggaccttgtggactttctcctagatgtctgaggcttaggtgtagcgggggaggcttaggtggagtaacactgcagggagagcttactgggaagggtggtgggggtctgtgtggacctgatggcactgttgtctctgtctcaggcatttgggacatatgctgagccttgcctccctcccaccctgctgtgaggcagcctgtgtgatttgcttcgcccagggtacctggtggaactctgggccccagaggagtctactcaccaagtcctcagttcccacacatcacaagggcgacagcctacataccaccttgaatttgtagcaacaaaattgctaggagaacaaatggagatggccatatttcatggatttgcgtaagaaaaccagcttaaagacaaaacataaagaagaacctagctcagtgtcccagccacttcctaggaaggaaaaaggaagggtagaaagcacgtgggagaggtgggtcataactgctgactttaccccacaggcctcagatgagggcactctgggaggatcccccaccaagaaggcagtaaccttcgacctcagtgacatggacagcctgagcagtgaaagttctgaatctttttccccgcctcaccgtgagtggtggcggcagcagaggagtgagtgggggagatgcggggtgaggaccatggtatccatggaatgggaggaacttggggaatagaagaagagctctcttccctcagccctgcagagggaggcctctgtgagccggtgtctggactaggtgctcggtcagtgctgggaaggaatcacaccatctaggtttgccagcacgtggggctgaaaggtcagggaagccctctgaatgctgcagagcactctacggtgtgaccactggccttgctggcctcttctcttccagggcctccttgaggaggcttttctctctcagctgccctggcctgtatgtgacagaagggccctctccccttccttctctctggggtcctgggcccttcacccagcaccttgccctggaaacctgtttctcatggccagcttctcacttgcactgtctggaacacagaagccctgccatccctgaccccctcataaggttgaggggctgttgtctggagaagcagggaggggtggccagtagggtcctccatgacagctgtgtctgggaatggtccagggtcctgagcttgagtcccttcccaccatccacctcttttctttcagtcgactcaaccccgagtctcacctcccgcaagatccacgggcttagccactccctccggcagatcagcagccagctgagcagtgtcctcagcatcctggacagcctcaaccctcagtcgccgccgccgctcctcgcctcc

SEQ ID NO: 5218 - DNA, 1865 bp, Homo sapiens
ttgtcttacaggtacaccaggggttggaaaaaccacactaggcaaagaacttgcgtcaaaatcaggactgaaatacattaatgtgggtgatttagctcgagaaggtaagggacactttggtgttagatttgttttgttttttttttaaggtctggtaagtggagtgttagtgctgggtattgtcatagggtacaaaaaacagagattgccattaaagaatatatactctgttagggaatccacagaaatattaagtgtctaatgctatgtcctggttattttgaccattttcccttccgccttcaaaatggctggcaattcttgtgaatagttgggaaggctcctataaagagactggatttcggataggtagaatgtgaataaggagaatgtttttaagttgaacaaacaaaggtttggtactgctaaacatatatatgagcacagtgagtatattggtctcactggaaagagactgttttgagctcaggtgtgggacctgactatgctatggtatcttagattagtgtgagatttgcatgcaactgcatatattctaagatgatcattgtttttatttattttaccctgttttcccctaatctttcatcgctcccttatttgtgtcttcatctttttatagtcgacaatgatttgtacatggtaggaactcaataaattaaagcgaccttaagttgcctcattaaaattaagaaaacatatggtttaaattttaaaaatttttttacagtttaacatagatttaaaatttttttaagttcctgacagttgctactaaagtaactatttcagattgatctaatgtacatatttttttcaaatgatctaaagtctgatcatcggatatcatggagtctggcaagacggcttctcccaagagcatgccgaaagatgcacagatgatggcacaaatcctgaaggatatggggattacagaatatgagccaagagttataaatcagatgttggagtttgccttccgatatgtgaccacaattctagatgatgcaaaaatttattcaagccatgctaagaaagctactgttgatgcagatgatgtgcgattggcaatccagtgccgcgctgatcagtcttttacctctcctcccccaagagattttttattagatattgcaaggcaaagaaatcaaacccctttgccattgatcaagccatattcaggtcctaggttgccacctgatagatactgcttaacagctccaaactataggctgaaatctttacagaaaaaggcatcaacttctgcgggaagaataacagtcccgcggttaagtgttggttcagttactagcagaccaagtactcccacactaggcacaccaaccccacagaccatgtctgtttcaactaaagtagggactcccatgtccctcacaggtcaaaggtttacagtacagatgcctacttctcagtctccagctgtaaaagcttcaattcctgcaacctcagcagttcagaatgttctgattaatccatcattaatcgggtccaaaaacattcttattaccactaatatgatgtcatcacaaaatactgccaatgaatcatcaaatgcattgaaaagaaaacgtgaagatgatgatgatgacgatgatgatgatgatgactatgataatctgtaatctagccttgctgaatgtaacatgtatacttggtcttgaattcattgtactgatattaaacatgcatgctggatgttttcaagttgtgttttagaaaactaataataatgagtaaacacagttaccatacttttcaattgaaatgaaggtttttcatcagccttaaaagtgtaagaaaaataaagttgtcattcattcgat

SEQ ID NO: 5219 - DNA, 244 bp, Homo sapiens
tttttttttttcttttgagacggagtctccctctgtcgcccagactggagtgcagtggtgtaatctcggctcactgcaagctctgcctcccaggttcacgccattgtcctgcctcagcctcccaagtagctgggactacaggcacctgccaccacgcccagctaattttctgtatttttagtagagacggggtttcaccgtgttaaccaggttggtctcgatctcctgacctcgtgatccaccc

SEQ ID NO: 5220 - DNA, 35764 bp, Homo sapiens
gccaagctgaaagttctactctttctagtggaatatcaataggtgagaaatacttctctgagagggttgcaatttaactttaaataaaaatgttaataaaacttggctggaaaaaaaccccacccacacacagagaaaatttggttaaaaaaacaaagtagcagttaaatatgggatgaagttaataatttgtgatggttttaaaagtgcttgctgtttttaactccagaaggggaagcatttgaagaaggtggaaaaagaacatatgggctggttgaattagttaactgcatgtgatttggatatggggaggaggaagagtgtggagtcaagaatgacttccggttatttgggttaaacaagtataatagttagatgatgatgctattaccaaggtagagaagacagagtaataatctgtgggcagtgaagcgtttgtgaatttggggaatcaggtgtgttttggacatgtttagtccctatggagatgtcaggtaggttgttgaatatgtgaatctggagctcggggataaggtcagatctgaagatatacgagaggtagcatatttataagccatgattggttgagggtacctaaagagagagtgtacataaataaaaaaacattctcacatttagaagtctgattattttttaaaagaaggatgagtcatcaaaggaaactaaaaaggagagatcagtgaagtaaggggaaaaaaacaaaagcccagtagatgaagtatctcaaggaggaggaaagtactgaatgtgtgaatatcaaatgcagaacaagagagctaagatgagaatggggaattgactgggggatttggcaagataaaagtcattggtgaccttgataagagttgcttcatggaagtgtcagggcatggcctggattggagtagatttgaaaatgagaggtgaggaaacagagatagctactgtgaaggagagcagaaaatagagaccatattagaaagggatgtgagattaagagagggatttgtttgtttttacttcctaaacttttaatttttgagtcttctagatgagcattatttcttgttacaattagaaattattcatatagcctgggcagtgtggctcacacctgtaatcccagcactttgggaggcccagatgggcagatctcttgaggtcaggagttcaaaatgagcctggccaacatggcaaaaccccatctctactaaaaatacaaaaagtagcagggcgtggtggtgcatgcctgtaatcccagctacttaggaggctgaggcataggaatcatttgaacccaggaaacagaggttgcagcgagccatgttcgcagcactgcactaccctgcctggatcacagagcgagattctgtctcaaaaaaagaaagaaattgttcatataatagctacttttatttttaaaaagaaataaaggaggaatatgtcttcatctatgattaactaccagattgttcaaggactaagcctattgttactaatatcttaatattggtaaacagccagtagaaggagatgcaaaaggagattgattttctggaacatactgactttcttagcccttgagagttaaaattaaattatttcagagctctccattaccattcagtagttgtttattctgatagtcccctttttatataaaaatacaagtgattaaatgataaaatgttttaaaaagaaggcaagtttgtcacctgaaatacctcttatcaatgttctaagttgcctatatgcaaatactaatctcagtatgaagaataattttgcaaaagaaagaactttttttcagtcaaaaattttctacacgtccatggaatttggcatgccacttaaagcaaaaagtttttaaaattacagctctcaagtatataatattttactctttctcataagtgttataatgagaattattctgtagtttatagcttttacttttcatggatgtccttttggctaccaaaagattattgtttagttattttattgagttacagttagtgtctcagtgtggagacttttctcttttagagcagatttttgcatttgtgtttattttttaattattctaaggctaagtaagtaaacagtaaaagatcattgcatcctagtttgtaaactaagaacattacacataggcatttaccttcgaggatttttgttttaaagctttaacaatatgaaaaaaagaataagtctattaccataagatgataggtgttaatatacacacacgagtttttccctcagctttaacttttacatgcaatattaatctacagtgaaggctttgaaaatactgtgggaaaattaaccagtgcttagaacaatggccttaaacattttctaatgtggtatctatcctagataatcttgagtagtctcacctagctaactaagagaagcatattcactctgagcttcatgcttacattttctacaaataagttatcctaattatgcttaaattttcagtctttaccacatagtgccacaaatcaaaggataatgtagataatgtacaagaccccaccaccaccacgggttacctctggttcttctgaaccatacaatacagaaaattatttcagtgattgttatctcagtttatccaaggatggtacataactagtgccattgcaaacccgtagaagggtattaatccatcgtctctaagagagacgagtctaatggataccttacagcatccattacaggtgtctgatggataccttacagcattagaatttgagtctctcagaaccctgcccgtaaaaaagagtttgagtctctcttcttagaaccctgtctgatagacaatttaacttgacctattaatcatcctaatttttttgagagccagaattacctttaaagtaacatttaagtaaactaagctgttttggactctctaaattcattccccatagtttttttgttggttttttttccccctagctaattgtaaacgttctgtttgaagaccattttattttaactgatcttttggccaaagagaaaattgttgcatttttatagcaccggtttttggttttttaaatttagagattccatcttctttgtctctagagacaaataagtggatttcattaggctttttatacttagggtagtaatggactttaatacaaagagaaaggagtatgccatgaatcgtcaaggattttataattatattggtcctaaattatgacaaacctaataagaaattttgtgttattttatgttctctaatggtaggaaaaattgtttattgacataatgaatttcagctacaaataggcaagcaaaaatgttttatgctattttgttattttaggttgtcgtgtcaactgtattccaatatattgcaaaataaacctaacagcagtaatattagaataaagaattaatatgtggatatgttcatctacaatgcgattgtcattttatgagcatagttaattaatttatttttacattgtgaaatgcaaactagagaggtaattctgatgtttaaaaaataggataacttttcattttaggtagcagcgatggttctgaactaagtgaagagacctcatggcctgcttttgaaaggtaagataaattgtccatttgaactacttggagtttattttgtctgggttaaataatataatacaaattttcagagataatatttactacatatccctaagcgattaagttttctactggtaaaagaaattagaagttgatatttaagtttggatatgtaagtaatgagaatgaatgatagtcttatctctaaatgtttatttggtggcatgacacatgtatttgaattttaatacatttacatttataacttaaaaataataaccgatcatcgacaagtaacctacttacatattcaaaaaattatttccttaagttctggttcatttaagtaattttaaggcatttagtggaatggtcaactttattctctgctgctttgtcaaggacaaaatgatttaataaattttaaattatacaagtaaagcaagttaaggttagaatttaaatggtcataaactcaaaattttcagagtacacttttatactgaaatactctaagttgtgctcccttctccttcctttgttgctttaagctgttaaatctgtcatctgcctgtagcaaatatcatactatattgaggtctaagtacatataagatctgaagaatgtgaccaaacaatgcaaataattatttattaaatgtccattaggattcttatgttttcactgaccatttcagttctgccatttcagactcataaggtatttggcttttgaccaaaacaattgctcccttttttgtatatgaactaagtaactaaatttctgaaaatgcctatattcattactcaagcgggtcatttagattgaatgttaaatgtcatattaatactgaagttgaaaatgtgtaattgcataactccttatcagtcacaatttataaaacaattttaaattaaattttatttgaaatcataaatttcatgctgtttaattggaaaaatagatccttattttttatgtgacttcataaagatttctcactattatgtgattaagattttgtttataagttctacattgcaaagtacttttgatcctttctactctaattatcagtgttcccaacttttgttctctttgttttgcgggataataataagtaaaaacaaattatttttatttatttttgcattatttttcttgcaacctttacttctgatctgttcatttgggtttgcctgaaatgtgaaaaacacaagaattgcctttgacatgttgtctgaatttgttcaaattgtctttccctctagaaagaacgtaaaaccatgagaagttgattatagagtgtactgtaatctttatatttaaaaaatattgattaaccaaattgttttttagattgcttgacttatgactaaccagaatggtggtgtgttaaataatctgttctcatcccagcaggttacttatgaagacagtatttaatgatgttaccttcacgtctcaaaacaatttttttgctttataacaggtgttttgctttgcagacatgtgtggctaaaaaaagctacttttcttatgccaagtttaaaatagtgggctcttagaacattttgagaacagtgaaatgaatgctgcccagcaagattcagacatgaaataatagaaagtgaataaagaactaggatataaagtactactcatggatagtgaacttgaaaaatgtactctgaatgttgacataccattttctgttcttattttctagacagacatcaaatacattgtcttattttctagacagaaatcaaatacattgttgtctttttttctagacagacatcaaatacattgtttaagttgctaaaataatgcttttcctttaaaacatcatttatcaacagtgctttcgggttttcctaggcaaagaagtatcagtatttttatgtgtctgtttttattttttttgtttttaactattatgtgccattttggataagtattaactcatcatttttatcatttattggctttgtcagttaatgtagaaataatataacgcctatattactcagttcatttcttttatttactataaaggataaagaggaaaataaagttttcctcatgagtttacaagccacattgcttttaggtgtcttcatagggacatataataaaaatgaattacttatataaatccgggcatcatatttaaactagaatccaagaagtggtatagaaacgtaagaatttttgaagtatttttgaggttttttttttattatttggctataaatagctctttaattcttttagcagatttgtgaaagtgaatgtatatgtaaatatatggtgtgtactaaatacctctaagtatttctagagtcaatagtagaagaaaaaattttttgaaatctatgctgcatgctttaaaaaagaaagaggaacaatcacatactatccttttgtaagatttagaaagctatattacaagaagaaactattatactgttctaggtattgataatgactgtgtgaataaaagtatatgtaatatatacaatttataatggaatccaacaggaacagattataccattctctcggcccggtgacaagagtggcacgaaatggctatcgaagtcacatgaaggccagcaggtacaattcccctgcattcaggggtcacagaactcccttatggtgttggtgattggcttacatgggtgtggtctgacgttatttcttttctttctcaactaattgatttaaaaactaaacaaattacctagaaaaactttctttccaagatctaatatgaagataaatttcaactattctttctgatccacagagctaattgctaaaacttgcatcttaatgttacatattttaaaatgcttccaagttggtagcctttaaactgcaccagtctttctaatgctgatagtttttgaatgaacaatataaaaatctgcttctttattcataagttgtaatcaaagcattttctttgctaataaatttatatttgatttgtctttttaaaaagtttttcagataaactacaggtcctgaatgtagacgagtctatttcataaaataatcatttgtatatttaaattcatattcattcagttgtttgtctggttaaaccaggtctcttttggactgttattagctgtggaggcagataagggtggtgtattgattgggaacgtggggtttagtggtgatgggtaatcagttcataatacaacaaaataccaaacttcagaagcaaactttacgtcagtttgatggtgtctaatctccgtgcatgtacctccctgaatataaatagctctagcatgaaatttctactggtttataggttcttaagtcactctgaagacacctaaataatcacaaaggaataaactggcaaactttagttttcattgctcttataggaattctgcagctcatgtcaagtcaccagtgacatttttgtcagcatgtatgttttattggctcatgtagaaatcattaattattgtattaaacataggaccttaaatcaattagggaaagatattaaagtgttggttattttgtgatttttttttttttaaaagatacatgaaaaggaaatcttgagttttgggttttttcctttcgtggagagctattaggccataatcacttatccattgacaccatttaaatgttattaaaatgtattgcagaaagctagtttttaaaatatattattattgactttattacttctttctgctattttagaattaaattaagcatgttttctttttttttttttgagcttgtatttttattttcagttttatatatacttaaatacttttaacaaatagaatcctcatttttcctaccaggacttaaagtttctatgtggaaaataaggttgcaacagtgatgcagtgtggcatgttaagaagaagaaaacaaatcttaaatttttaatttaatatttactaaagtgaattactgcattctttctaaattatactgttcaaatatgtaataaagtgtgttttttaaccatctgctgactttaataactttctaatcaactttttgtacagcttataaatttcaagattaataaacctttagaattgtcagtgtcttctcagctctgaataaagtaacaaacttttaaaattaagaataattacattttatttaagtacctacttgatgactattgtagacaaaagctcttatgtgttcttttcttcgttattatagttctgcagaatcagaagatttggcagtacatttatatccaggagctgttactattcaaggtgttctcaggagaaaaactttgttaaaagaaggcaaaaagcctacagtaagatttcatcatattatattttaatacacctctaaaaatatgcaaatttataagactctgtaaaagtactaaaacaattaaaataaaacctgattatagtagacttgaaataatattaaataaggtcctcccctcttatccttgggtcatccattccaagatcccccggggatgactgaaacctcagatagtaccaaaccaaattaccatcatttggaacatgtttctgttcatgtcttccattcacaaatataataccttttctatcttaactaagcacttaagcccacacagtaaccgtaacttttgcagtttgcgatgctatagcaaaactagcatgaatttctttttccttcttcacaatttcacagatacaaaatttgttcttaccatggatcttagcaaccttagcgtctaatttttctttccttaatccaagaagttttcttttcacttaaggaagcagtggggagtgggacacaagggtagcacatatagtgtggagacgctggacaaagaaagggaagattatgtccacagaagcacagagcagaactgtgtgagattttatcatgttactcagaacaacacatgattttaaaacctgtgaattgtttatttctcaaattttccaataaatatttttagactatggttgcctgtgggtaactgaaaccacagataagagggaaaatattgtacacatttgtttcaccatgttttcttaacataaaatgttattatatgtgccatatagatttctgttaaatcatgtgttaagggtgcttaaatcctgtacttttttttacccccattatagttcgtatacaaaattatttcttagagaaccctgaaagtatatcatgaagaagtattttagtattaagtttaggtaaaatagaaaataaagagtaacaaccctaaaaaatggaatttgattgtgttttatcattttatttaaattcctgtaatacagttttgttttctacataacatagaatccaaatattaaatgctttccaaacctataactatattggggggggaaaaaaggaagattggtggaacaaagctcttaatatgtatcaaagaagtttcttcttcctcaacaccagcatagtagtttgactactaaggaacaatttttttccctttctcaaatttgaaatataaaacctttgatatatattcacacttaaagcttttgaagatatgggggcttcatataagtaatcttattttgttgtttatatcacagtaagccaaaggcacatacaaatcaagaatctcttaggcaggctagtgaactcagaattgcatgtcagttgaagcattaccataccttttgtgtgctggatgctagaaatagagcagtgaacaaggtgaggcaaagtgtcttcctcctggattacatttcagtgaggagaaatagagaataaggctttaaaataatgtcataggatacagaatgatggggcaaggagggatgccaccatggcaaaacatttgagctgagatctgaatgaggaaggtgagttagctgtgtgaatatctagagttcaggagacaagaaggcttgtgtagtttacgcattgaaattggggaaggtggaggagatcaagtaagaggcaaaagctggagttgtttgatgataaattaaacatgatgtatgagagaaagagtgaaaacaaagataacttctaggtttggggactgagatgggtgtatgttggggacatttattgaaatggggggcaggtcagtcttggccaagttcagtttgatatgcttattaaacattcaagtggaggtgtcattgtggctgttgaaaaagtatggatcatgaggtcagcagagaggtggcagggagatagatttgggagtcattagcatacagatagatagtatttgaaatatggaactggatgatagattatctaagaagaaagtatagctagagaagaaaacaaggttggagatggggctctgtagcattaaaggtctcccacaaagaagagtataaaggaaaactaaggaactgttatcccagaagcctagcagttacagtacttcaaaaagcaaagagtggccagctgggtcagatgctgttaagaggctggctatgataaggatagaggctttgctaaaattacaatcatcagtgaccttgatggcccaaaagccaaatgaaatgagttaagtagaaaatgggcaaaacagaagaagtagaggcaagatttagagacacccttgcaagaagttatgctgtgaaaaggagaagagaaattggttggtgtctggggagtgaggagatgggtcaaaggagggattttaaaggtgggagtactattaaggttcatttgtataatggtggtagagggagagagattgagaagcaatggagttaattgcaaaagcaaacttctttattttttttttctttttttttttttattatactttaagttttagggtacatgtgcacattgtgcaggttagttacatatgtatacatgtgccatgctggtgcgctgcacccactaactcgtcatctagcattaggtatatctcccgatgctatccctcccccgaccccacaacagtccccagagtgtgatattccccttcctgtgtccatgtgatctcattgttcaattcccacctatgagtgagaatatgcggtgtttggttttttgttcttgcgatagtttactgagaatgatgatttccaatttcatccatgtccctacaaaggacatgaactcatcattttttatggctgcatagtattccatggtgtatatgtgccacattttcttaatccagtctatcattgttggacatttggattggttccaagtctttgctattgtgaataatgccgcaataaacatacgtgtgcatgtgtctttatagcagcatgatttatagtcctttgtgtatatacccagtaatgggatggctgggtcaaatggtatttccagttctagatccctgaggaatcgccacactgacttccacaatggttgaattagtttacagtcccaccaacaaatttacaagaaaaaaacaaacaaccccatcaaaaagtgggcgaaggacatgaacagacacttctcaaaagaagacatttatgcagccaaaaaacacatgaaaaaatgctcatcatcactggccatcagagaaatgcaaatcaaaaccacaatgagataccatctcacaccagttagaatggcagtcattaaaaagtcaggaaacaacaggtgctggagaggatgtggagaaataggaacacttttacactgttggtgggactgtaaagcaaacttctttaaaaagtgagagagagttggaatctagggcataaaaagagagttgagtttgcctttagatagaatcggggttaactattcttttgtagctggaggaaagactgagtatgtgggtctacaaacaggtagttacatggcagtgacaggagtatttgagattaagatttcagaagtgatacagctcaactctgaggttaggactttggttgaagtgaagtggacttgatcattggcacttagaatgtaaagaaactaagaagccaggagcattgtaatagtatattcctgtgtttgtcctatccaggtagcatcttggacaaaatattgggcagctttgtgtgggacacagcttttttactatgctgccaaatctctaaaggctaccgaaagaaaacatgtaagtatttgttctctacatttttagcgtggtttcccagactgttcatggttataaagaaagcagtcctaatgggatacaaaggttttttgggtttgccttgttttttcctatcttctagtccaaaagtttttacatttatttcttttttaaataccatttttccattgcaaatgtcaaaactgcacattacgcttatctattttgacatcaaagctttctcaaatctggagtttcctgttcaatattgttcaaaactattgccttggagtttcctttcctaatcagcaaaatgtggaaatgtgggaccaacatctaaagttctttccacctcaatctctggttcagtgattcttcccaacaatgaagaggaatgatcaattacaacagttactgcaatcactttcttgtgcttcatattacttaaaagaagcctcttttcaccctgtagaattttcctataaatcttttttgcatgctgttttgtttttacataccagtgatagaatctttgaaaggaagaatgattttctatgttgcattaataaaatctgagaggaattttatttctaagtcacatgttttgggggagaaaaattacgtggtttatcctactgaggaaaggtaagccagtgaagaaaaatttaagtcctttttctacttaaaacttaaccaaatgatactgtataattcagagtaattcagagaaactcttctttattctcacagttttagccctttaatcaaaccacaggtatagaaaagaacatttttggtttaaatgaatgtgggaagtaccgtaagatagcattgcctttctttatcagctatacccaccacctgccaccctcctgatcatcatgactcattgtcttgcttttcttcatagtgttagcatatatgtttccctaattaatccatggtttcattttttaactgtacctcagtgggatcatatatattcttaagcactagcttttttgctcactattattatataattgttaagatagctcttgcattgagataaaggacttgagtgaaggatcatggagatttcttcggtgaatatttattttttgtattctggtcaaattgacaataatgcctatataccctacaacatttacatagattagttttgctagaacaatttgtagagttagtactgctgttctcaaagtgagaaaaaggttggattcattcagttcaattaaatccttagcttcatatggaaagtaacttttcacatagccacattgagatacttgctggatagatttcacttagctgactattgtagaaaagtcattattcaaaataaaatggtttttttgttttttgttttttcttagtttcaattagaaaaagtccaaattagagaagttataactgaatttgtcatctaatggatatgttaaatattgttttgtgctttgcattgttgcttgtgcataaagttactagtatattatactttgggtttttaattatatgaggtttctgataggtaatgtatgcaaaatgtttggaaattaaagcatagtgagttgtgagaaaatcttattgagtaccaaggaaattgaccgcatttctcatcttttctaattaaattaaaatataattaaagaataaatttgaagaacaggatagagggtatagagacaggtctatatctatatttggtattaatcttgagatagaaaagatatggcacagaactaaatggaagaaaaaaattttaatcgttttcaaataaagttagaatacaaataaattggaggaaaatatctgctatatgtaagcaaccgaaaaaggattaaaatcaccatttaaacatagcaccacctgtattgttgtgttttggttttggttttggttttggttttggttttggtttttttttttgccaaaatatttaacctgaatcttatgaggaaataatcaaatccaaattgtgggtcattctatgagacagctggcctagattcttaaaaagaccaaaatttggcaggtggagtaagggcagggggacaggaggactgttctagattaaaggagacttgacaactaaatgcaatgtatgtcttttagttgaatcctggagttatattggggaaaaaatttaaaaagctataaaggttattattggaacaacttaagaaaatgtaacatggactttatgtggttgtctcttcaatttcttagaaatgacaattacgttgtgattgtataggaatatattcttgttattaaaagatacatgttgaaatatttagggttcaatgttatgatgtctgcaatttgcatttgaatgttcagaaagatcaaacaaacacaaaaatgtagattaaggatatatggctaatcattgtggcattctcaacttctgtacagtttgaattttttcaaaataaaaagctggaggagaaaaaaaatcatagattaaaatatacctgttcatggcaataaacccagaagtgggacatatggaagtctgtataccttattttagtattctataaagtatatatttttttgcctatgaagaacagtttgtgtgggtagagtgatcaacctcacttactatttaaaaatgcaaattaagggagacactttcctgccattagacaaaaatttaaaagattgatgacatagcattggtcatgatatggggaaacagactgtcatccatggctggtaaaaatttaaattggtattgtttttgtggtggccagtccgagtcagtatttagcttggtaataaccagaaattcctcatctgagaatctgtcctactgaaatttttgaacaagtgcacaaagattatctgtagaagaatatttctataatatttatgacaacagaaatctggaaatacccaaaatacttatcaataaggaaatggttactgatagatgaaaaacacaagtcagagtgtaaatatatcccccattaatacgtaaaaaccaacagcagcaatgacacaaacctctgatataataaatgcatagaataaggtctggaggttgtcacctcaagtgatgattatatctggggaatgtgatgggattcgctggtggttaaagggcatttgcactctagtttcatccctgtttctgaagcagtttatgttgcttgagttactttttactttttgaaaaagggaattgaggtggaagtttttaggcttaagaaaagaatattagaagatcatagtattcatgtcgaagtacattatgagctgtcaaatcagcagtcctgtggtagggccaatttcattcttcacagtagtaaaacttactgatttctttagctttcatatttcaatttcatgttgttatgaatgtgccatgttcattctttttcccatttcctttaatcgtgaagcatatcatacatacaaaagaagataggtagtgtacatgtacattttaaagcataataaataaaatgaacacctgtatactctccacccagtgtgaggaacagaatgttactagaaccgtcaaagccttcccagaggcatccacttcttccctgtcaaccatatccacagcttcttgctgtcctgaatttcttgttaattgtcgccttgtttttctttagtgttttaccatgtacacgtccttatacaatgcactgtttgatttttaaacaatacctgaatggcttcacatacagtcttaagcactagcttaagccaacctgttcttcttttataactgccctttctcagaattaagaaaagaagttgtagctaaaataataataaaagaatggttaactacaaaagtaatagacaggctaagaatacccttcttttttgaaaaatacaagtaagaatattgtcattaagaattatctggttgcagggagctgagatcacaccactgcaccacagcctgggcaacagagtgagactgtctcaaaaaaaaaaaaaagaactctctgatagcactgctgatttattacatcatcagatttaagacagcatagctactaaaatgcaaatgtccttcctataaggagtagtacagtaattcagaaaaaaaacaacagattaatatatcatattcacaaacatgctctctgggaatagggaatagatcagttaggttttgatgcagagttgaagctgggaaggtctggaaagtaggagattatctgaagaaggcatgcctaggatgaaattcagcagtaaaaggccccaggctggctgagaccagcatgaagtcacaaatctcatctttcattaggagaaactgaaaatacactccctaacactgaagttttgctagaataaaccataaattttctgtttccgctaattatctttttttctctcagttcaaatcaacatccaataagaacgtatctgtgataggatggatggtgatgatggctgatgaccctgaacatcctgatctcttcctgctgactgactctgagaaaggtgaattgttagaataactggggcttacgatactgcgtatgtgtttgtgtatatgtatgtatgtatgtgtgtgtgtatacttgtcatatatataatgttttatgcatacatgaagaacttgatgagccaaaacctagtttcactggaatactcaagagagaaagtatttgtgtagttttatctattgggaaatacttctgtcccattatgtattttaataatatttgtggagcttattttctttgctccatgggcatatatgcttgaaaattaaaagcccagctaatccctagagacctaactaggaaaggagggagggaatttgagaatatataccccattgttacttcaaatttttagagacttgccatataggccatactgcttccttcatcaataccttgaaatggattgttattcttaagttctgaaagtggcagagttttcctttaaatatttattctatcacttttaattaaattattcagaaccaatattctgcagtcttatccacacagatctagagatgccacacaattattgtatttatttagatgtattttattctaaagaatatttaagaacaaaattatttcttttaatccataagcagcaaaacagtgactttctgaatatatttggctcagatcactttccaagttaattataatattttacatacagtatatagagagacacttatgaataaaataactggctattgaccattggagtttataaagtagatatgagaaattggaggatgggccatgtataatcacatcatatgttcttcttactctacctgtgactatagtggatacctcaaggctcatcagaaaatatccccaagtggttgcttttcttccatcataacaactgctagctgttgacaagtaccagaaagatactttcagcagttcacaactggaatactatgttaccttttattgacttcacaactatattttgacctctgtttattcagatactattttgtatcaacagatatcccacttttatgtttcagtgttttaagtaaacaagtaagcaaatatgttggaggcaggaaaaaataataccaaaatgtcttctttttagattaagtagattgatttacagaataaatacaccctactcaacattttttttcccataagttattggggtacaggtggtatctggttacatgagtaagttgtttagtggtgatttgtgagattttggtgcacccatcacccgagcagcatacactgcactctgtttgtagtctttttaccctcatcccccttctcacttttctccccaagtccccaaagtccattgtatcattcttatgcttttgcatcctcatagcttagctcccacgtatcagtgagaacatatgatgtttggttttccattcctcagttacttcacttagaataatagtttctaatcttatccaggtcactgcaaatgctgttaattcattcctttttatggctgtgtagtattctatcacatatatataccacagtttctttatccactcgttgattgatgggcatttgggttggttccatgattttgcaattgtgaattgtgctgctgtgaacatgcgcatgcaagtatctttttcatataatgacttcttttcctctgggtagatacccagtagtgggattgctggatcaaatggtagttctacttttagttcctcagggaatctccacactgtattccatagtggctgtactagtttacattcccaccagcagtgtagaagtgttgcatgtttaccacatccatgccaacatctactgtttttttattttttttattatggccattcttgcaggagtaagctagtatctcattgtagttttgatttgcatttccctgatcattagtgatatggagcattttttcatttgtttgttggccatttgtgtatcttcttttgagaattgtctattcatatccttagcccacttttcgatgggattggtttttttcttactgattcgttttgagttcattgtagattctagatgttagtcctttgtcagatgtatagattgtgaagattttctcccactctatgggttgtctgtttactctgctgactgttgcttttgctgtgcaaacgctctttagtttaattaggtcccaactatttatctttgtttttattgcatttgcttttgggtttttggtcatgaaatccttgcctaagccaatgtctagaagagttttccaatgttgtcttctagaatttttatagtttcaggtcttagatttaagtccttaattcatcttgagttgatttttgtataaggtgagagatgaggatccagtttcattctcctacatgcggctagccaattatcccagcaccgttagttaaaaagggtgtcctttccccactttatgtttttgtttgctttgttaaagatcagttggctgtatttgggtttacttcagagttctctattctattccattggtctatgtgcctattttcatagcagtaccatgctgttttggtgactgtggccttacggtatagtttgaaatcaggtagtgtgatgcctccagatttgttcttttcacttagtcttgcttcggctgtggtgggctcttttttgattgtatgtgaattttagaattgttttttctgattttgtgaagaatgatactggtattttgatggcgattgcattgaatttgtagattttgcttttggcagtatagtcattttcccaatattgattctacccatccatgagcatgggatgtgtttccatttatttgtgtcatcagtgatttttttcagcagtgttttgtagtttccttgtagagctctttcgactcctttgttaggtatattcctaagtggttttttgttttgttttgttttgcagctattataaaaggcgttgaattcttgatttgattctctgtttggtcattgttggtgtatagaagcctactcaaaattttgaattcaaagccccagcctccttcccatatcaaaggcataattcacgaaattacatttcaagatgagagcattttcattggatttagttaacagattctttgttttcttcagtttctcttagcatgcctaatagaactacttcaggtagccaaaattttatgaagtctatctatactaatggttttttgcgggggaggggtgagtatgtaaattgtagctgtggccagctttattgtagatatggctttttttcacattgacctaatgtctgtgtctgagttcagcaagtgtaacggtgttacttgactaaacatttggtgaagaaacaattacttcagaaagtgaaaaagttattttgagtgttagaatctcaaggaaaagctgaataatgcttaaatatagttaggctcttgagccattgaatgcagttattaaggaaagaatagaattcagcacaaattgtgaaataaaaagaacttaggtcaatgaaaaaaggaaataaagcttaatttagagcagcctatagtacatggatcctttcttttctcaatttgttttctcaccttaatacatataaccatttaaaatatcctcattatatgtcagtcttgaattaaagtcaatatagaaattacaaaatacacacagcacaaatgaatatctaatttcttaaaagagagaaagttgcctcctagactttccccaagagccctcaacagaactggaaatctgtaataatattgacaaatatcttgtaactaaagactaaaagcatagtctatcaatgttatatgactaatccttaattatactgaatagctagtgtttaagtattaaacatattgaagcattctggcatgttaaaacttaacattaacatctactaatatttaggccaggtgtgggggctcatgcctgcaatcccagcactttgggaagccaaggcaggcacatcacttgaggtcaggagttcgagaccagcctagccaacatggtgaaaccccgtctctactaaaaatacaaaaaacttagctgggcatggtggtgcacacctgtaatcccagcttattgggaggccgagacacgagaatctcataaagctgggaggcagaggttgcaatgagctgagattgtgccactgcactccagcctgggcgacagagcgagactccatctcaaaaaaaaaaaaatctaatatttagatcatctaagtagtaagtattcagaaccaatattctgcagtcttatccacacagatctagagatgccacacagttattttatgtaggtgtatttcattctaaagaatatttaaggagacaaaattatttcttctaattcataagcagcaaaagtgactttctgaatatatgatagcatgtaaatgtgttgcatcgagaactctttattgtattggaaatacaataaaaataggaaatacaataaaatggaggtgttgaatagaattctaaaactgaaaactctagtcatgtttaatttgctcattattatctggcagaattattatgtgtcgtccttacatttttaatatttcccccttattttggataattttaggaaattcgtacaagtttcaagctggcaatagaatgaatgcaatgttatggtttaagcatttgagtgcagcctgccaaagtaacaaacaacaggtaagcatttctcctaattctcagaatagtccataatttgggaacatatgtaaaagagttccaagagaagtaaacagactagttctgaattaactaggagaatggtggtgtttttattcttgttgattacagttaataagatatgaaggtctacatcttagtgaggagctagacagtaatcatgcaaacaagtaacaaaatttcgaacagtcagaactatataaagaaaacaatagacgtatgtgatatagagcaatgggagtacagacaacttttgataacataaggttgggcagcaaagatctccctgaggagatggtattgacaagaaccacaagaaggaacgagctataagaagaggagagcagagtgctgtgtaagggaagagcaagtgcagggagcctgaagctggaacaagcttaaggtgagttcaaagcacagaaaggtagctagtatagtagtcagagtatagttctctaaagggtaaaaattagatggcatattaaattaataaaaattattcgaattcatctttatttgatctattgacaatttgatgtgggtttctgtggtggtagtgaaaccaaaaaccatttaaattttgtttgcttttattttactgaaacaaaaatggtctaattgaaaggctttcagctgcagaagagcaggaatccattgtgttgttttccccaaaccctgttgcacagttagagttgaaccacagattggtagagcagacataaaacacatagccacatttatagaaatttatatagactttttgtagaaccagttgtttgttaaatatatttgaaaatcattgacttagcatattgataatgcagaagtctatggttagcattatcagtaggtaatattgaatatgatgcactatataagcttagaaagcttacagaagtatttttcaccctgtcatatcaggatgtaagttattaccctttcttgataattgaaactaaggctccataatacaaaatgacctacacaggtcacacaagtaaaaaatggtggattcaaactttcttcatcctttaagtccattctttttgtttgttttttgacttttgggttcagagggtacttgtgcaggtttgttacatgggtatattgtgtgtcactgaggtttggtgtataaatgatcctgtcacccagttagtgagcagagtacccactggtttttcaaccgtcacccctctcccaccctccccactctggtaatgctcagtgtcgattgttcccatctttgtgtctaggtgtattcaatgtttacctcccacttacaagtgagaacatgcagtatttggttttctgttcctggattaattcacttaatggtctccagctgcattcatgttgctgccaagggcataatttcactgttttttaaaaatcactgtgtagtattccatagcatatatgtaccacattttctttatccaatccactgttgacaggcacgtaggttgattccatgtctttgctatagtgtatactgctgggatgaacatacatgtgtctttttggtagaacaatttattttcctttgggtatatgctcagtaatgggattgctgggttcagtggtagttctgtttcaagatctttgagaaatctccaagctgctttccacagtggctgaacttacattcctaccaagtgtataagcattcccttttctctgcaaccttgccaacatctgttattttttgacttagccattctgactggtgtgagatggtatctcattgcaattttgatttgcatttctctggcaattagtgatattggccgtttttcaaatgcttgttggccatgtgtatttcttctcttgagaagtgtctgttcatgtcctttgcccactttttaatggggttgttttttgcctgtaaatttaagtttcttatagattctagatattagacctttttcagatacacagtttgaaaatattttctcccattctctaggaatgttggtttattctgctgatagtttcttttgctctgcagaagctctctaattaggtcctgtttgtcagtttttgtttttgttgcaactgcttttggagtcttcatcatgaagtctttgccagggcctgtgtccagaatggtatatcctaggttatctttcagggtttttatagttttaggttttgcatttaagtctttaatccatcttgagttgatttttgtatacagtgtaaggaaggggtccagttttaatcttctgtatatggctatccagttatcctagcagcatattgaatagggagccttttccccattgcttgtttttgtcagctttgtcaaagatcagatggtagtaggtgtgaggcattatttctgggctctctatactgttccattggttctatcctgttccattggtatctgtttttgtaccagtaccatgctattttttggttactgtagtcttgtagtatagtttgaagtcaggtagtgtgatgccttcagctttgttctttttacttagaattgctttagctatttgggcttttgttgttgttgttgttgttgttgttcccatatgaattttctaatggttttttctaattctttgaagaatgtcattggtagtttgataagaatagcattgaatctgtaggttggtttggacaatatggacatttaacagtattgattcttccaatccatgagcatggaatgcttttccatttgtttgtgtcatctctgattactttgagcaatttttgtaattctctttttcttttttaattttttttttttttttttttttttggagacggagtcttgctctgtcttcaggctggagtgcagtggcgcggtctcggctcattgcaacctccacctcccgggttcaagcgattctcctgcctcagtctcccgagtagctgggagtacaggcgtatgccaccacgcccagctaattttttgtatttttagtagacaaagggtttcactgtgttagccaggatggtctcgatctcctgacctcgtgatccacccacctccgcctcccaaagtgctgggattacaggcgtgagccactgtgcccggcttgtaattctcatagtagagatcttttacctccttgattagctgtatccctagatatttttttctttttgtggctattgtaaatggaattgtgttcttgatttggctctcagtttgagtgttattggtgtatagaaatgctgttgatttttgtacattgattttgtatcctgagactttgctgaagttgtttatcagatctaggagctttgggtcagagactatggggttttctagacataacatcatatagtctgaagagagatggtttgacttcctctttctatttgaatgccttttatttctttctcgtgtctgattgctctggctgggacctccagtaagtattatgttgaataggagtggttagagtgggcatccttgtcctgttccagttctgtaagggaatacttccaacttttgcccatttagaatgatgttgctgtgggtttgccatagatgactcttactattttgagatatgttctttcagtgcctaatttgttgagggcttttaacatgaaaggatgttgaattttatcaaaagccttttttgcatcttttgagatgatcatatggttttctgtttttaattttgtttatgtggtgaatcacatttattgatttgcatctggtgaaccaaccttgcatctcaggaataaagtctacttgattgtggtgaattaactttctgatatgctgctggattcagttagctaatattttgttgagaatttttgtgtctgttcatcaggtatattgacctgtagttctgttttttcattgtatctctgctagtttttggaatcagaatgatgttggcttcatggaatgagttagggaggagtcttttctttctcgatttttcggaatattttcagtaggattggtactagctctttttcgtacatatggtagaattcaactgtgaaatccacctatttcaaggcttttttgggttggtaggttgtttattactgattcagttttggaactcattattggtctttttagggattcagtttcttcctcattcaatcttcagaggttgtgtttccaggaatttatccatttcttttaggttttctagtttgtgtgcatataagtgttagtctctgaggattttttgtatttctttggagtcagttgtatgtcacctttgtaatttctgattgtgattatttggatcttttctcttgttttatttgttaatctagctaccagtctatcgatcttgttttttctttcaaagaaccaacttttggttcattgcttttttgtatgcattttcacatctcaatttcattcacttctgctctgattttggttatttctttttttctgctagctttggggttggtttccttttgttttgtttttctagttcctcaaggtatgatgttaggttgttaatttgagctctttctaacttcttgacataggtattgagtctgatatgttgtgtctctgttttccttagttttaaatcattttttgatttgtgtcataatttcattctttacccaaaagtcatttggaagaaagttgtttaagttccatataattgtgtggttttgagaaaacttcttggtattgatttctagttttattgtactgtagtctgaggctatggttggtatgatttcaatttttttgaatatgttggcacttgctttatgcccaagcatgtggttgatcttagagaatgtgccttgtgccaatgaaaagaatgtatattcttgtgttgttgaatgaagtattctgtagatgtctgttgggtctagtttgtcaaatgttgagtttaagtccagaacatttttgttagttttctgcctcagtgatctgcctgacactatcagtggggtgttgaagtcttccattatgtagttatctaagtctctttgtaggtctctaagaacttgttttcctaatctagatgctccaatgttgggtgcatgtatctttaggatagttaagtcttctggatgaattgaaccctttatcattatgtaatgcccttctttgtcctttttgaccattgttatagtctgttgtatctaatataagactagcaacctttgttcttttttgttttccatttgcttgataaatcttgctccttacctttactttgcacctagtatgttgttacatgtgagatggttctcttgaagatagcagacagttgggtcttgcttctttggccagcttatcactttgccttttttgcctgtttacattcaaggttactattgatgtgtgaggatttaatcctgtcatcatgttgttagctgcttgttatgtagacttcattgtatagttgctttatagtgtcagtggactatatacttaagtgtgtttttgtggtggcagttatttttctttcatttccacatgtagcactccttaaaggacctcttgtaaggcaagtctgatgatagtgaattccttagtctttgcttgtctgaaaaggattttctgtttccttcacttatgaagcttagtttggtgggacatgaaattcttagttggaatttcttttctttaaggatgctaaaaataggcccccagcctcttctggcttgttaggcttctactgaaaggtccactgttaacctgatgaggttccctttactgccccttttctcaagctccatttaagatttttttcttttgcattgaccttggagaatgtgatgattaagtgtcttggggatgctcatcttgtatagtatcttgtggggagtctgaatttcttgagtttgcacatcaacttctgtagcaagattgggataatttttgtggatcgtatcctcaaatatgttttccaagttgcttactctgtctccttttcttgcagtaacaccagtgagtcataggtttagtctctttacataatcccatatttatcaaaggttttgctcatttttaaaatttttttctttaatgtttgtctctgttaatttgaaggagtgctcttcgagttctgagattctttccttggtttggtctattctgttgttaatgcttccaattgcattatgaaattcctaggctgggagtggtggctctcacctgtaatcccagcactttgggaggccaaggcaggcagatcacttgaggtcaggagttcgggaccagcccggccaacatggtgaaaccccgtctctgctaaaaatagaaaaattagctgggcatgttggtgcatacctgtagtcccagccactagggaggctgaggcaggagaatcgcttgaacctgggaggcagaggttgcaatgagccaagatcatgccaccgcactccagcctgggcaacagagcaagactcccatctcaaaaaaaaaaaaagaaaagaaaaagaaagaaatttctagagtgaatttttaaattccagaggttcagtttggttctttcttaaaatggctgtgttatctttcaactcttggattgttttactgttttccttaaactgggtttcactttttcctgtatctcactgagcttccttgctattcagattctaaatccaaagtctgtcatttcagtctggttaagaaccattgctgggaacctattgtagttgtctggaggtaagaagacactgtggtttttagagttgctagagttcttgcattggttctttctcatctgtgagggctgatattcctttatcctttgaagttgctgacttttggatggtgctttttgtttttatgtttttgatttcccttcagggtttgactgtggtataagttgggtatagtcaattggcttcctttctggatgtcttcagagaaccaaggttcagcttggcactcctgggctgtgtcctgtaactcccaaggggctgggactgggcccctggctttttcctctggcctcttgaggtcgaccaccggctgcactgggtggaccaaggtgctcccaggctgctggcaaaacctctccatcaggctactggcaaaagcacttcctcaggggccactgttgaaagtgttctggcaggatggtgggggccactggtaaaagcactatggtgacagtcgcccgcaaaagcattccaacagaatagtggaagctacactgtgtgcctgctcccatgggagtggccaaacagggaccttggaaggggccagtagacagtgggacatgcagctcagactcaccccagtcccatgggaaacacagccctgctctctccaaatatggcagttagcaaaggtcagagccacctagaggagtatgaagagccttggtgggtgggcgcctatggccgtgttcctttgcagctttccccacaccataccccctgggctccatgtagacctaagttctgtctctgccagctctccaggcagttccccctggcaactcaaatatccaggaggactatgggatctcctgccactaggatcccagcggtttgtggtgagagtgggccattccacagttactttactcaccccttccttaggagctgttcaggaccaggaatgagtcccagcactccacagccctgtgcagggttcctagcttcttcgctcttcaaccctggttctgcatcatctctccacccactctcagaaaatcggtgattttctctcagtgcatcctctcagaagataggcttggagtatgctggtctactagatactcagatctctcttggtgggagaagctcttcctggctttgcctagttggccatcttgtcccaatcccgagggcatttttttaaaatattgttggagtgggctttgttctctcatagtttttattgtttcaaatatatatgcaacactaatagcagtatttagtaccatttttagcaacctccataaaggacatgaaatgtcatagagcgaaaattattttttgccttgtcaggttagtgtctggggcagaatgaaagaaacagatcaggctttgtctagactaagcctttcaggattcacctcattgctatacattttctttaaatgtaatttagggtattaagactctttttttttcaatctcagattccaagatgaatctagacaatatatacatataccagcttaaaggttcaatttcttttactgtattagtgagtatttctgtgcaacaagtcaaccagacgtgtataaatatttgtttctatacttgcaagaattagaatagtggcaaatttgtaagtagaacctgtgaaagttttagtagaaaactctgactcaaatgcaaaatatcttaaaccacattcaggcaacttaaaaagaaatgaaacttttactttacttaaatacaagtttctttttttttctttgagacagggtttcactcttgttgcccagcctggacagtgcaatggtgcgatcttggctcactgcaacctctgcctcccgggttcaagccattctcctgcctcagcctcctgagtagctgggattacaggcacccaccacaggcccagctaatttttgtattttcagtagagatggagtttcacaatgttggccaggctggtcttaaactcctgacctcaggtgatctgcctgcctcagcctcccaaagtgctgggattataggcgtgagccaccgcacccggccaaatatgagtttcttataatcagacctgaaaatttatactttaagcacttgagcatttgtgttgtatttgatttgtaattcagttatgagtacattggccaacataatttttttattcagaagctgacacttgtaaggtatttatgtttttgcatataataggtttcagagagaggttgctaaactgtgagagctgtcttaaggacagaaaagaccactgacatatgaatacctctcccagtattttggaaaactggttttgaggatttgttttaacatagtgaaactctaataaggaattttgtttttctgtacttattttaatcatgattttacaaataaattcttagtaatgtttgttataaaattatttttgctgattttaaaaatatgcacctaggaatttttgtaatatataatgagaaaataaataatggcaaacaagtgtatctggaatctcaccctaccagagtcatacttactcttgctctcatttattcattcagtaaacgtctactgagccccctgtgttagacaagaaagatattgtctctaccccttctcctgtatagatgtcattttactagaaagagtattaactcattttggtgattttctctcaaaaatgttctagcatgttaattattcataaactattgaagctccttatatcaagttccttttaaaagatacttaagtagaaagattgggcttgcctaaataacaaggaaagataagaaatactcctttgaaaaacaacttttaaactcagtttttaatgcttatattttttaggttcctacaaacttgatgacttttgagtagaagcctgagaaaaaaagagaggtgaactgttgcttctacgtgagcatgaggacctgataaaagagcgccagctataaaccatcctgtgccaggaagagcccagaggctctgtctcagtcgttggagttctcaaccaaaaaagcactaatttcagggaatgatttgagatattcccagagaacaaattggagttgcaaaacaaactgccatgaaccatgcttcttatctcagaactgacctgtggaaaccactgccttaaaagaatgaaaggaaaaccaacatgaaacaccaaatagtgtgtgtgaatcttctggcggtgctgtgcttggaatagatcgtagctaatttgcatttcttttaactttgtaataattttagaggggggaattgccttttttagatatgctttaaaaaggaaaaacatactcttgtggattccatcaggagctggttttgaaccgaggtgaagagacttagcagggattgtaccagcagcccacctgcaaggtttgttctccctctagtagtctgcaacctcactggctttctcacagcaagagtgtaggaatgagaaatgttagtcatgtgagttcttgggtttgtttgggattgggtgggggtgtttgttttgttttggatgaggggagaatttttttaaacactaaacttctgaaatgtagtactgtaaggggaacattatttcctgcaggaggtacaaaggctgtgtgttcatttgccagacgctttttttttaaataggttccagaaaacatggttgtttctaactagggttaaagtttagctttctatatgaattcattgttggaccacagatctgcttaagtaaagagctataatcccaacctaaacttttctgagattttacaataattagatctttttccaagttaattgggttttcccttctcccagtcataggtggtttttatcatcaagacagactgatattttgtcaggatattttcttttacagtgtttgatgtgcataatgccagagttatttttttattattcattttctctctttttgttcaatatgagattcaggatcatatttgtttaaaaggtaacacatagagatgtatgtatatattttgttataagacatacaaaataattttaagagggataaaggtgaaaatatcagattctggaaattttaagtatctaaactttatacttgtatgatttaccataaacataccaaaacatttttctgaaaatttactgtcggtctctgacatgaaaccgtattttgtcagtagttgaccaagcagttttatgagaactcttctatgcaatgatgcatttaatttctaaagtaaatgttgaattattaaaaaaaaagtttgaaggtaagatgccttagaattttaatgaaaaatgacactcaaacaaaggctatatgtcgaatgttataaactcttgagacataatgaattttagcagtggcctagagtaaggtaatgctttgtgactgatatctactaatagacttctgttactttgggcctcacataaaatttctcacattcgtattcttagagaattttatacttttttattataagtattttgcccttgagtccatgaaacttcaatagaaaatattgcttatacaataattagcttaaaatccatccaaaggaaaagagaagagctttttttgagtgttaagttttttaatttagtattctgtttggaaaagatgttaagagttcaaatatgcttcttatgtaacagaaataccattatttctggggtttagtgacacaggctggagaggacaaaagtttcctgtcctgaatgatttttcaattaatgctctaagcttaacccatgttgggtaatagaaagacatagccagcagtattactacgtagaccttgcacatcttacttttgttttgcatttttaaaaatttcttaatttgtttatttctcttcagaaatagcgtttttaacagtgtatgtgcttttttaaaaagtattgtgaatgagaaccctgtggattttttttatttcatttgtttgtcataataagctaacgtagaaatgttgtaggttaaccatatctgtggaaatatgcagttggaagtcagagcctgacatcacatagttttgccaaagggagagagctaagctggaagatgtttttgatactttcggctctaaacattaatggatgtttgcgtagagtaagatagcgttcaaatttggttaatagtttatagatagacttgtggcctctgactgactaaatttcttaacagcacagaagtcgttgtttttctgtctttaaaatttattcattcagaaaattagtcattgctttttaagattattttagcatttgaagcaaattgaaaacagaaaagtgacttaaaatagtgtaggtgaattttttatctataatttaccaaataatacctgataataattcaaagaaaatatgttaccaaaatatattaaatatataggtagttcattcgtgggaagatgaatcttcttattaagcctgccctcaattgtaaataagtgactcaaaaactcaaaatgttcatcagcattcaggtcatttgtttcacccttagccaagaagaactcattagaaattcagttataatttcaatttaagcctgtttatgataagcataatgattggcatgttatatagcctgttgaaaataactacagaatgaccttccagagcactgtttttggcctcgtgcccgctctgttcaggctctgcttgtttttcagaatatgatttttacctccagacagtaagaattgaacaagaactgatcaaacacaccttcctattttgttttcttcactatgtaaatattatttgggcaaacattacaaaaagggatccaaacaatttgagtttcagtatttttttctccctaggcatgtgcttcaatttcaaatatttttttctgtgtggaaaatgccatgtaactattgcactaccttctgtgtggactgtgttggtattggttctttctgtatatcaaaagtcagggtgtttataactgcaaagtttgtataagtggctttattcctcttctagaagatttatgaggagcctaggaagcactattggtacaggaggaaaaaagaatggaaaacatgtttacagactctagctttccttattagcttaaactggggccctcaaagagcagcctgttgatcttttggccaaatgacttgagcataagtcttttatttctttttaaggttaaatcgtaaactgtatacctttactactgaaaacaaaactatagggcatcatactaattgaaaatcaatagtaatgggttccatccattagctttttaaatgaatagatctggtattgatttccttcctgtttttttgaggcacattcctttacaaccagtgtttaaaccaccacgtaatcatcttctgcaaacaaggggtgccagtgttgcctaacagaagataatctttaataaagcaaatcctctgcttcaaaggtttttgaaataattggatccctttttgaaaaggaagatgagtttaactgtgtccaggtggagtaatagtactgctgttgcatgaatagatgatacaaagcaagtgatgaggttggtatgacttctttagtgaccttttagggtttgcttttattttcctctcttttttgtattatttctttcaaacatagtaaatatatgattttacagccaaagtggtattctgttttttctaagctttgagatacaaatattgctatttaatcacattgatgatgaattactttccatgtgaaccttctcaaaatgatttaagtacctttgattttgctcccctaaaaatggcttgtgtctaaagtgacatttttttccctatttggagggttctaatgaaagagatccaggcataaaaactcttttgcttattgaaagcaatttgattacacctatgtttcaggttatagtggggagaaaatttggtcagtgccttattatttgaagagcaattttagggcatcaagtatgacaataatcatgtgccctcttgctcctcttatttcaggagtgtgtgctatccctctctccaccagcttaatctttctcaccccaagtctaacaaagtctttacagaaacctctgtaggtgattgttgcagtcttccttggtttttgagtctttttaaacaagctcctaccctgcttctatccttttagagtaggagattaaaaataaacccaccccagtcaacctttagataagcactcttaaaaacaaatttgaagagcactcttcagccaagttcatttttattttgttgttgatgttttgagcatacatttaattgtaaggccttttggaaaagccctaaaagaataagatacaaccagaaatatttgagttttgttaaatgtactgaaatcttgtaatgaaaatccctttggccagaaatgagatttatttccatttatttttacatttaagtaacactcaaaacaaacaagtagtcacttaacctgccagttattattttcttgaaaatatacaagaaagtaaaaatatctctaatatataagttaaaggaaagttaagagactaagctagttttttcagtgaaagcaaagttggaaatattttgcttctctcagattattggaagacctagagctactggatgttaacctgaatcaagatgttcttttcacatttttttaaagggctagtatgttccagagtaggcaagtagtcattcaagccaaatgaaagagttaactggtccttgaggagtgttagcaaaatttaaattttgaccctggccatttgtactacagaagtgattatgggattaaaagaatacataattacagtgttttgggattgggctcttttttttcttaatagaaaagcagaaacttcataaataatagctgtgctttagataccagataacaaatattgtttcccctgaagatatgacctactagaactactcacatatatagtccaataattactgacttaataggtatggtaaaatagctgataataagtcagactctcaagagtttctgtaccttgattattgacaaattcattgttttacatcctactaaagaacatgtgtgtggggagggggtggggaactggttcacaacataatctgaaggagatcaaacatctgtaaggacaggtacccagtgatgataatatatctgaaaacacaagccatttttattctttatcccaattaacttgaggtactctaatgatgaagcactcgattgcactatgacctccttgagtgatgtgcagcttggttcctctctcactttttgtttctttttaatatgcaaatgtgagtgtgcgatcttcagtgtgtctgcataagctaacttaagatgaatttaagtacagttttctgaaatatttctattgaaataaattacttaaaattata

SEQ ID NO: 5221 - DNA, 386 bp, Homo sapiens
gtttgggttataagtcagcatttttaattttatctttcaaatttttaagtcttttgtaattggatttattgtcgatttattagttcagtagaaaatggtatccttgaatagttttcttttttcttaatagctgttttctgattcagtaaaatgccttgtttgcctaaaagcttttatttcttactttacctgaatttggaaatgggattttgtcaacaatgcatttatatttggggacgataaatgaacattacagagggccatcataaataaaatcaggatagcaatatacctttttaaaagagttacaacctttatatcaagacagtcattgtttgtcttaaccaaaataagtcaaaaataacagctataaaaattattttctt

SEQ ID NO: 5222 - DNA, 437 bp, Homo sapiens
ctgtaaattctaggatcagtttgttatgttccatgaaaacactgttgttatttttattggaattactttggatttataggttaatctgagaattcacagttttgaaaaatttactcctttcatctgtacacatgtctctctgttcatttagggcttttaatgtccttcagtaatgttttacagttttctcctgagtagtctcttacattttttattagtttatgtctaagtaagttagtttttctttctactatgaatgtgacttttttgttacatttcctcattgactattgtgtgtaggaatgccattggtctttatgttgattcttatatctagcaaccttgttgaactcccttacctagttataatggtttgtccaaagatctgttggaattatattagtggcaaataagaatagttgtttcttcctttccaa

SEQ ID NO: 5223 - DNA, 6585 bp, Homo sapiens
ctcttcccttgcagcctcgaagcggaggatccctgtgtcccagccgggcatggcgacccccaccagcttttcgatgacacaagttcagcccagagccggggctatggggcccagcgggcacctggtggcctgagttatcctgcagcctctcccacgccccatgcagccttcctggctgacccggtgtccaacatggccatggcctatgggagcagcctggccgcgcagggcaaggagctggtggataagaacgtgagtgggcggggctggtgggagtggggggatgcacggggccacagggcttcagacttgagctctgcctccccagatcgaccgcttcatccccatcaccaagctcaagtattactttgctgtggacaccatgtatgtgggcagaaagctgggcctgctgttcttcccctacctacaccaggtcagcacccccaggggaatgtgggtctgcagtgggcctgtggggggctcaggggtgggggcaggtgcatggtggagccgggagattcgcctcgagggaggagggcctgtagcagggtgggaggggcctggctctgagggtcctgcccgtctccccatccccgcaggactgggaagtgcagtaccaacaggacaccccggtggccccccgctttgacgtcaatgccccggacctctacattccaggtttcaccctccccctaccctgcaccctcctctctcttccgggcctatatggagcgggtgtgtgggtgcctggaggcccagggcagttcttcctctggtgaccagtgtctgtgtgtctgtctcccacagcaatggctttcatcacctacgttttggtggctggtcttgcgctggggacccaggataggtaagggaggcctggggcaggccgaataaggtggggtttgggaggcccatggttggtcaggaaggtctcagttccaaggtctcagttcccctttcaggacagccccactttgctcccagttggcccaagatacagccctcagggtcactgtcagcatcaccctcgcctcttccctgtccttcctacccacatgcattgcgtcaccatcccctgtgctgggtgacccttctccatccacccttcctcttggcctctactaccagacccatcctcatcctccctctgtcatcaccagctccccactgcacccctactccagcagcagccaggatggtcctgtctgaggtgcgggcctggcccaccctgccccgccctgctatccatggctcccaatcaagccccagctcctcagcctggcactgcccctcccgctgcacgctccggtctattcctttccttgggagggctggcactgtctcctggggccttgtcacatcaactcccctctgcccaggagcgtgttcccctccactactgccgagtacctgcacatccctgctggctccattccagtatcacctcctccgggaagccttcctgccccccaggctagatcaggcccctcctcttgctcacatcgccctgttcttttcctttatggcactgaacacatctgtcattaactaactggtgaggccctggggatgtggcagaggccaagggctttgtccctgaccagctccttcctgcaggcttcagctcggtgtcccctctcctgggaagccctctctgacacctgtctcctgactgtcagcacagccccctgtgactccagccctgcctgctctgggtgtcactgtctagggatgggtctgccatcctctctggatgggatttccgtgggaataggatagcgcgcacatccatcttggtcactgccaggtgtccagccctacccaacacagagctgtccccagatgggtgctgggggtggggggtctgaaccagccaaccaagtggcggggctttgtgcctgcaggttctccccagacctcctggggctgcaagcgagctcagccctggcctggctgaccctggaggtgctggccatcctgctcagcctctatctggtcactgtcaacaccgacctcaccaccatcgacctggtggccttcttgggctacaaatatgtcgggtgagtacccccgcccttcacgccagccccagcccttgggccttgtcctcacacagcctcctctccctcccccaggatgattggcggggtcctcatgggcctgctcttcgggaagattggctactacctggtgctgggctggtgctgcgtagccatctttgtgttcatggtgagctgggctcggggctggtgaggctgaggcacaggtgccccggaggcatccaggcatccaagcagaggatgtcaggtgtggggttcagaccagagacacattgctgaactgaggagccctggagtggctgcccggcctggggggtcaggagggcttcctggaagagggggtatcctgagccctggaagaggagacaccagccaggctgctagaggctggggatccccagcacacaggctccaggctgggctctcactctcattccactctccttacatgggagccttcctgccagaatttccctggaaggagattctctagagcccttcccactggagtccaggggtgctggtgaagagcactggggtctgcaggctgggtggaccccaagcttagttggatcctgggcaaatcacttcctttctttaaattcagtttccccttttgccgggcgcggtggctcatgcttgtaatcccagcactttgggaggccgaggcggtcggatcacgaggtcaggagatcaagaccatcctggctaacacggtgaaaccccatctctactaaaaatacaaaaaattagctgggtgtggtggtgtgtgcctgtagtcccagctactcaggaggctgaggcaggagaatcgcttgaacccaggaggtggaggttgcagtgagccgagatcgcacacctgcgctccagcctgggtgacagagcgagactccgtctcaaaaaaaaataaaaataaaaaataaactcagtttccccttttgtaaaataggatgatgatacttgcacctcaaggtgctgggaggattcactgtgagcatgtgagaagcagagggcagactgtggtggctggtgggccagggcagagccttggataaactttgacttaagtctcatcatttaaaagtttaggccaagcacgtgactcacatctgtgatcccagcactttggcaggctgaggcaggaggatcactggaggccaggagcttgataccagcctggacaacatagcaagaccccatctctaaaaaaatataaaaattagccaggcatagcagtgtgcacctgtagtcccagctactcaggaggctgaggtgggaggatcacttgagtctgggaggttgaggctgcagtaagctgaggtcacgccactgcagtcaagcctggcggacagggtgagaccctgactttttttttttttttttttttttttttgtgagacagagtctcgctctgtcgggaagctggagtgcagtggcgggatcttggctcactgcaacctccgcctcttgggttcaggagcaagtctcctgcctcagcctcctgagtagcagggactacaggcactcaccaccacgcccagctaatttttgtatttttagtagagacggggtttcatcgtgttggccaggatggtctcaatctcctgacctcgtgatccgcccgccttggcttcccaaagtgctgggattacaggcgtgagccaacgcaccaggccagagaccctgtcctttaataaaaataaagatagcatttctggcgtgtcttcagaaattgccgtgtggccagcataagggggggcagcatcctgggccacgtctcccaccccctcaggccgggtgtccaccgggaagtcccccttcacccgctccaagaccttgcctggcatttgagtatggaaccttctcagattttgcccacagggcccggggagaagcaaatcctcaccatgttaggaggtttggggaaactgaggccccgggagcagaaacctgaggctgcagagggccagggacttgtccccagctgcctggggcttctaggcagaggctggaagtatgtccgggctctcactctggcccagagggctcaaggggtaaatcccttggttcctctctctctttcccacccagatccggacgctgcggctgaagatcttggcagacgcagcagctgagggggtcccggtgcgtggggcccggaaccagctgcgcatgtacctgaccatggcggtggcggcggcgcagcctatgctcatgtactggctcaccttccacctggtgcggtgagcgcgcccgctgaacctcccgctgctgctgctgctgctgggggccactgtggccgccgaactcatctcctgcctgcaggccccaaggtccaccctgtctggccacaggcaccgcctccatcccatgtcccgcccagccccgcccccaacccaaggtgctgagagatctccagctgcacaggccaccgccccagggcgtggccgctgttacagaaacaataaaccctgatgggcatggcgtggacagcctctccttggcctcgcgcacgaatgggcgggcccagcgctgggcagggggcagggagctggggacgggccagagtaggcaccacgctgaccagtcgcagaaggcagagaggaaggtttaatgagccctgtccagggcccttcagtggggagcctccttcttcttgcccttctccttcttgcccttctccttcttcttcactttgggcttcttggccttgcccgggatgctctcgtgctgcttggagccagcagcgtgggactgtggggccgagggcagggatgggagagaagagatggttctgggctggaagcgagacagggggaccactccccgcaccctccccgccagccccagtgcggggacgcctctctggggtgcagggcacgtgcttggggacgctggcgagagccccttaccttcacatccgtgtccgaatcgctggagctgctgctggagtcggaagagctgtggtgtccttgctggatggaggtgcggcagtgaggcggcgccccttacccagccccctgaagttggaggcctaaggcaggaccctggggtcaggggcaaccccagccttcccgcccctccgcagccggtgatgaggcgacttacctttggacccggacctgccccttgcctccgaccggccctgaactttgtggggactgagcttgggatctcccccgtggcccgcccccacaccgggcttctgggaggtgggctccagggctgtggagagaagttgggtggttggtgcaggcagcttctgggcttgagtccggccccctgcacctccagtccacactccccaggagctcacctgctcccaggtcgaactccatggcggtaagagaagttgggtcctaaggccaagggcgcctgggccctgcagaggagcggagcagggggaggagcgctgagacctgcccgttggaggaatgctgagacgccccacccaacctctgtcctggtcctcagccctgactcattgcccggcaccacccaggatttcctctgtgagaagtgggggagatggacaggtgactgcttccgccagccttggtgcctcaggggaggccgactgaggggggctctgtggatggcattcggggagctacaggtttcccccaaaagctcagatgctcgttcttgaagagggaggtgctgcccctgccttcctgcgtaccgcgacaatacagcttcctccgcggcgctttaacacgcagggcgctgctgccaggggcgtcccgtgttctaactcgctcccacagcccctccggcttggtgagcagcgtctgaggggtgaggggcatagacttggagccagcctgctgcactagatgccagctgtgtcacttagcagcaaggtgacctcagcaaagttgttttacctctgtgcctcagtttcctcatctgtaaataacagctacccatgggattgatgtgaaagtcagaggagttaatttcctagaatggtgtctggcatgaagtactgataatgtgttggttttttaaaaaataaaaggtaggtgttttaggccagtcatggtggctcacgcctgtaatcccagctgctccggaggctgaggcacgagaatcacttgaacctgggaggcagaggtttcggtgagccaagatcacaccactgcactccagcctgggcgacacagtgagactccgtctcaacaaagaaaaaaatatatagatataaaagataagtgtcaggccgggcatggtggctcacgcccagcactttgggaggccgaggcaggtggatcacctgaggtcaggagttggagaccagcctggccaacatggtgaaaccctgtctctactaaaaatacaaaatttagccagccatggtggcaggtgcctgcaatcccagctacttgggaggctgacccaggataatcacttgaacccgggaggcagaggttgcagtgagccgagattgcgccattgcactccagcctgggtgatggagcgaggctccatctcaaaaaaaaaaaaaaaaaaaaaaaaaaaaaaa

SEQ ID NO: 5224 - DNA, 246 bp, Homo sapiens
gaggcaggcagatcacgaggtcaggaaatcgagaccatcctggccaacttagtgaaaccccatctctactaaaaatacaaaaaaattagctgggcatggtggcaggcgcctgtaatcccagctactcgggaggctgagacaggagaatggcgtgaacccgggaggtggagcttgcagtgagccgagatcgcaccacggcactccagcctgggcgacagagcgagactctgtctcaaaataaataaa

SEQ ID NO: 5225 - DNA, 1918 bp, Homo sapiens
aggacctccacaaaaagtactcgtacatccgcaagaccaggcctgacggcaactgtttctatcgggctttcggattctcccacttggaggcactgctggatgacagcaaggagttgcagcggtgagaagggtgggcactgggcaccgaggcaggtgggtgtctacctcctccccgggcgagtaggatgtgtctcgagtagggtgtctccctccttcccgggcgatgggctggactctggccttgcaggcggggcagtgctgtctcggccctggcgtctgggctggtcgaggagcccatgctggcccacctttccatcccacccccaggttcaaggctgtgtctgccaagagcaaggaagacctggtgtcccagggcttcactgaattcacaattgaggatttccacaacacggtgagccctggtgcctgtcttgggctgggccatgggggaggggttcacctggtgaggaccacccatctcctccctgtcatcttgccctttctccctccgtggctgcagttcatggacctgattgagcaggtggagaagcagacctctgtcgccgacctgctggcctccttcaatgaccagagcacctccgactaccttgtggtctacctgcggctgctcacctcgggctacctgcagcgcgagagcaagttcttcgagcacttcatcgagggtggacggactgtcaaggagttctgccagcaggtgccgtccccctcccctttactctcggccgggggagtgcagtgggccacagggcctggggcggggtgcggagaccagggcctgaccggcacctgtgccacaggaggtggagcccatgtgcaaggagagcgaccacatccacatcattgcgctggcccaggccctcagcgtgtccatccaggtggagtacatggaccgcggcgagggcggcaccaccaatccgcacatcttccctgagggctccgagcccaaggtctaccttctctaccggcctggacactacgatatcctctacaaatagggctggctccagcccgctgctgccctgctgcccccctctgccaggcgctagacatgtacagaggtttttctgtggttgtaaatggtcctatttcacccccttcttcctgtcacatgaccccccccccatgttttattaaagggggtgctggtggtgagccgtgtgtgcgtgtccctgctctgctgcccgcctggctgctctgtctgctgccccctccccccaggtgggtccccctgcttttcacctatctactcctgagcttccccaacaggagcaggtttgaggggccaggcctcttggaggcccctcctgcttcgttgggttctgcttccttcccttcttagctggctcaggggcttctatgggatcctggaagttccttagggacttgcccagggtcccagggccacccacacttcatctgctccctcataggccccacctccacgtcccggctgggccccagaccccagcttcctgccctccaccgggagtctgcatggttgggagtcctgggtggaggggcctttgtgaggctggacccggctcagggcaggtggaggagctgggcctcccacagggtgcccgggcagtgccatcctggtgggggagggcagccttcaaacgtgtggggtctacagtcctcaggtctaggcagggctgccggttctccacctccccatccgccccaggccccctgcctgtgcctgccttgcaccccctctgcttgggccacggtgtctctgcattgcctgcctttttgccttcacctcttttcttccccgccccctgcacattcggggtctcagcccccaggctgtgagctccttgggggcaggccctcaataaatgtgaactgctgctgccgcctctgccgtccgcctgtgcctctgcccgcctgg

SEQ ID NO: 5226 - DNA, 1920 bp, Homo sapiens
aggacctccacaaaaagtactcgtacatccgcaagaccaggcctgacggcaactgtttctatcgggctttcggattctcccacttggaggcactgctggatgacagcaaggagttgcagcggtgagaagggtgggcactgggcaccgaggcaggtgggtgtctacctcctccccgggcgagtaggatgtgtctcgagtagggtgtctccctccttcccgggcgatgggctggactctggccttgccaggcggggcagtgctgtctcggccctggcgtctgggctggtcgaggagcccatgctgggcccgcctttccatcccacccccaggttcaaggctgtgtctgccaagagcaaggaagacctggtgtcccagggcttcactgaattcacaattgaggatttccacaacacggtgagccctggtgcctgtcttgggctgggccatgggggaggggttcacctggtgaggaccacccatctcctccccgtcatcttgccctttctccctccgtggctgcagttcatggacctgattgagcaggtggagaagcagacctctgtcgccgacctgctggcctccttcaatgaccagagcacctccgactaccttgtggtctacctgcggctgctcacctcgggctacctgcagcgcgagagcaagttcttcgagcacttcatcgagggtggacggactgtcaaggagttctgccagcaggtgccgtccccctcccctttactctcggccgggggagtgcagtgggcccacagggcctggggcggggtgcggagaccagggcctgaccggcacctgtgccacaggaggtggagcccatgtgcaaggagagcgaccacatccacatcattgcgctggcccaggccctcagcgtgtccatccaggtggagtacatggaccgcggcgagggcggcaccaccaatccgcacatcttccctgagggctccgagcccaaggtctaccttctctaccggcctggacactacgatatcctctacaaatagggctggctccagcccgctgctgccctgctgcccccctctgccaggcgctagacatgtacagaggtttttctgtggttgtaaatggtcctatttcacccccttcttcctgtcacatgacccccccccatgttttattaaagggggtgctggtggtgagccgtgtgtgcgtgtccctgctctgctgcccgcctggctgctctgtctgctgccccctccccccaggtgggtccccctgcttttcacctatctactcctgagcttccccaacaggagcaggtttgaggggccaggcctcttggaggcccctcctgcttcgttgggttctgcttccttcccttcttagctggctcaggggcttctatgggatcctggaagttccttagggacttgcccagggtcccagggccacccacacttcatctgctccctcataggccccacctccacgtcccggctgggccccagaccccagcttcctgccctccaccgggagtctgcatggttgggagtcctgggtggaggggcctttgtgaggctggacccggctcagggcaggtggaggagctgggcctcccacagggtgcccgggcagtgccatcctggtgggggagggcagccttcaaacgtgtggggtctacagtcctcaggtctaggcagggctgccggttctccacctccccatccgccccaggccccctgcctgtgcctgccttgcaccccctctgcttgggccacggtgtctctgcattgcctgcctttttgccttcacctcttttcttccccgccccctgcacattcggggtctcagcccccaggctgtgagctccttgggggcaggccctcaataaatgtgaactgctgctgccgcctctgccgtccgcctgtgcctctgcccgcctgg

SEQ ID NO: 5227 - DNA, 1836 bp, Homo sapiens
gctccatccaacacctgggccgccttccttccccccagtcagagctcagacagtaggagctgccacaacgagatctttattaggctcctcgggggcggggcgcggagggaaagaaggggtggccaggcccaggccaggctgcaggctttggcgacctctcagagctgggagcggggtcccgaaggcgggtctgagggcagagcagagtcagaggtgtctatgggcgtccccgacctcccaggctgccccgtggtttcccgccctgcttgggggtgagcgggggttagtgggcgggttagtctagggccggggccgccgcacggggcgaggccctgcttaccagtcccggtcagggtgggctgcgggagcctcaggctggaaggcagaggacagtgagagcccgcccccagggtggaccggggcaggggcgggccgtggggcggcgcggggcacgtacccacggggaagtagtgggggagccggctccggtagatgtcctcgtccttctcgaggaacacgcagatgatcagccggtccacctgcgccaggggctgctcagcctgggccgagctgccacgcctggccccaggatcctgtgactgcctgccctggtgcaggctttcacctgcctggccctgcgcccttcacggaggctcacggctgtgtgccatcacccccatctcgccaccgccagcgcccttgcgcaggagaaacagggaaggaaggggcgggcctggccctgcgctctgcaccctgactccctgggcgatgatgggggctggtcactctggccaggatgcggaccccaccctcgcccgggcccaggactcaccttgtccttgtgctgctccagccactctcgcagcgtggccagcacgatctcggcggccgcctcacaggggtagcctgaggcgggtggggcgggagtgagtcctaggctctggccccgcccactcccctgtccgccccggcccctcccggcgtctgggtccaccgcccactcctggtccttgcctttcttccagactcaccaaacacgccggtggagatgcaggggaacgcctgggcggggaggggtgagagggggttggaacattgtcactgcgccccgcctcccgccctcccccgcgggccgtccctcaccaccgagcggagccggtgctccagcagcaggtccagactgctcaggtagcagctgcggagctcggcagcctggctggcgctgggctccccgtaggcgatgggccccactgtgtggatgacgtctacggggggcgacggggtcagaccggcgggggtctacgcggtcctcagctccctcgcttccccctgccggcctgggcagaagggggcaggaaacacctttccccccaagcgctgagcctcctccgcgaaggcccccacccctgtgggccccctcgagcccgaatccgcacgcgcacagagccccgcgccccctccccacatctgtatgggcccggctgagacccgagcgcgagtgtgggcgcgaaggcgttgccccccagctccatcctcagcctccacgcacggtctcccccatgtgcttcctggggtgtgcggggtgggggccgggtcttggcccttaaggttaagaagggccccctgaggagttccccagcactcctgtgggggccgcagccctgatgtcccagtgacacacgggcgccctgtctgcgccccacagctgggggcgcgtcggggactcacacttggccgggagccgatagccgccggtgatcttggccttgccagtcttacagctctgcagggtccggcactcgtcggtaagcagggggccggcggcccgatgaatgc

SEQ ID NO: 5228 - DNA, 1837 bp, Homo sapiens
gctccatccaacacctgggccgccttccttccccccagtcagagctcagacagtaggagctgccacaacgagatctttattaggctcctcgggggcggggcgcggagggaaagaaggggtggccaggcccaggccaggctgcaggctttggcgacctctcagagctgggagcggggtcccgaaggcgggtctgagggcagagcagagtcagaggtgtctatgggcgtccccgacctcccaggctgccccgtggtttcccgccctgcttgggggtgagcgggggttagtgggcgggttagtctagggccggggccgccgcacggggcgaggccctgcttaccagtcccggtcagggtgggctgcgggagcctcaggctggaaggcagaggacagtgagagcccgcccccagggtggaccggggcaggggcgggccgtggggcggcgcggggcacgtacccacggggaagtagtgggggagccggctccggtagatgtcctcgtccttctcgaggaacacgcagatgatcagccggtccacctgcgccaggggctgctcagcctgggccgagctgccacgcctggccccaggatcctgtgactgcctgccctggtgcaggctttcacctgcctggccctgcgcccttcacggaggctcacggctgtgtgccatcacccccatctcgccaccgccaggcgcccttgcgcaggagaaacagggaaggaaggggcgggcctggccctgcgctctgcaccctgactccctgggcgatgatgggggctggtcactctggccgggatgcggaccccaccctcgcccgggcccaggactcaccttgtccttgtgctgctccagccactctcgcagcgtggccagcacgatctcggcggccgcctcacaggggtagcctgaggcgggtggggcgggagtgagtcctaggctctggccccgcccactcccctgtccgccccggcccctcccggcgtctgggtccaccgcccactcctggtccttgcctttcttccagactcaccaaacacgccggtggagatgcaggggaacgcctgggcggggaggggtgagagggggttggaacattgtcactgcgccccgcctcccgccctcccccgcgggccgtccctcaccaccgagcggagccggtgctccagcagcaggtccagactgctcaggtagcagctgcggagctcggcagcctggctggcgctgggctccccgtaggcgatgggccccactgtgtggatgacgtctacggggggcgacggggtcagaccggcgggggtctacgcggtcctcagctccctcgcttccccctgccggcctgggcagaagggggcaggaaacacctttccccccaagcgctgagcctcctccgcgaaggcccccacccctgtgggccccctcgagcccgaatccgcacgcgcacagagccccgcgccccctccccacatctgtatgggcccggctgagacccgagcgcgagtgtgggcgcgaaggcgttgccccccagctccatcctcagcctccacgcacggtctcccccatgtgcttcctggggtgtgcggggtgggggccgggtcttggcccttaaggttaagaagggccccctgaggagttccccagcactcctgtgggggccgcacccctgatgtcccagtgacacacgggcgccctgtctgcgccccacagctgggggcgcgtcggggactcacacttggccgggagccgatagccgccggtgatcttggccttgccagtcttacagctctgcagggtccggcactcgtcggtaagcagggggccggcggcccgatgaatgc

SEQ ID NO: 5229 - DNA, 491 bp, Homo sapiens
ccactcaactgttaaggccggagcctgtgcatgattaaggttattctccctctctcgcctctcgccaagtttatgcactcttcccctgtggaccatctctttcgacaaatccagcaaaaccccacccccatcctggaaaatttcttcttcaatcggggttaagtcggggatctagagaggtcgggtgtgaaaggaaaggaccttcgggcgggaaccaataccaagctaccctcctggttttcgttgtttatatacatgggagggggaaaatggtctgtatttttaaaacagaagatgtcctgccgtttctgcttctgtttttccttttttctttttttttttttttaacagccaattcttttgaagggagatagccagccaattttccatttctccttgcctacggagctcatgcaaacttccctacgctagccggctggccctgtgcaaccttcactaccacctcccgccaaccccctccgcacctactt

SEQ ID NO: 5230 - DNA, 491 bp, Homo sapiens; identical to SEQ ID NO: 5229

SEQ ID NO: 5231 - DNA, 776 bp, Homo sapiens
  SITE (709): n equals a,t,g, or c
  SITE (738): n equals a,t,g, or c
tacaacgtcgtgactgggaaaaccctggcgttacccaacttaatcgccttgcagcacatccccctttcgccagctggcgtaatagcgaagaggcccgcaccgatcgcccttcccaacagttgcgcagcctgaatggcgaatggcgcctgatgcggtattttctccttacgcatctgtgcggtatttcacaccgcatatggtgcactctcagtacaatctgctctgatgccgcatagttaagccagccccgacacccgccaacacccgctgacgcgccctgacgggcttgactgctcccggcatccgcttacagacaagctgtgaccgtctccgggagctgcatgtgtcagaggttttcaccgtcatcaccgaaacgcgcgagacgaaagggcctcgtgatacgcctatttttataggttaatgtcatgataataatggtttcttagacgtcaggtggcacttttcggggaaatgtgcgcggaacccctatttgtttatttttctaaatacattcaaatatgtatccgctcatgagacaataaccctgataaatgcttcaataatattgccaaaggaagagtatgagtattcaacatttccgtgtcgcccttattccctttattgcggcattgagcctgtctgtttttgctcacccagaaacgctggtgaaagtaaaagatgctgaagatcagttgggtgcacgagtggngtacatcgaactggatctcaacagcggtnagatcctcgagaggtttcgcccccgaagaacgtttttc

SEQ ID NO: 5232 - DNA, 878 bp, Homo sapiens
  SITE (741): n equals a,t,g, or c
gaaaaccctggcgttacccaacttaatcgccttgcagcacatccccctttcgccagctggcgtaatagcgaagaggcccgcaccgatcgcccttcccaacagttgcgcagcctgaatggcgaatggcgcctgatgcggtattttctccttacgcatctgtgcggtatttcacaccgcatatggtgcactctcagtacaatctgctctgatgccgcatagttaagccagccccgacacccgccaacacccgctgacgcgccctgacgggcttgtctgctcccggcatccgcttacagacaagctgtgaccgtctccgggagctgcatgtgtcagaggttttcaccgtcatcaccgaaacgcgcgagacgaaagggcctcgtgatacgcctatttttataggttaatgtcatgataataatggtttcttagacgtcaggtggcacttttcggggaaatgtgcgcggaacccctatttgtttatttttctaaatacattcaaatatgtatccgctcatgagacaataaccctgataaatgcttcaataatattgaaaaaggaagagtatgagtattcaacatttccgtgtcgcccttattcccttttttgcggcattttgccttcctgtttttgctcacccagaaaacgctgtgaaaagtaaagatgctgaagatcagttgggtgcacgagtgggttacatcgaactggatctcaacagcggtaaaaaccttgagagttttcgnccccgagaacgtttttcaatgatgagcacttttaaagttctgctatgtggcgcggtattaatccctatttacgcccgggcagaagcactcggtcgccggatacactattctagaatgacttggttgagtactaacca

SEQ ID NO: 5233 - DNA, 150 bp, Homo sapiens
cgtcgtgactgggaaaaccctggcgttacccaacttaatcgccttgcagcacatccccctttcgccagctggcgtaatagcgaagaggcccgcaccgatcgcccttcccaacagttgcgcagcctgaatggcgaatggcgcctgatgcgg

SEQ ID NO: 5234 - DNA, 845 bp, Homo sapiens
cccgtcgttttacaacgtcgagactgggaaaaccctggcgttacccaacttaatcgccttgcagcacatccccctttcgccagctggcgtaatagcgaagaggcccgcaccgatcgcccttcccaacagttgcgcagcctgaatggcgaatggcgcctgatgcggtattttctccttacgcatctgtgcgggatttcacaccgcatatggtgcactctcagtacaatctgctctgatgccgcatagttaagccagccccgacacccgccaacacccgctgacgcgccctgacgggcttgtctgctcccggcatccgcttacagacaagctgtgaccgtctccgggagctgcatgtgtcagaggttttcaccgtcatcaccgaaacgcgcgagacgaaagggcctcgtgatacgcctatttttataggttaatgtcatgataataatgggttcttagacgtcaggtggcacttttcggggaaatgtgcgcggaacccctatttgtttatttttctaaatacattcaaatatgtatccgctcatgagacaataaccctgataaatgcttcaataatattgaaaaaggaagagtatgagtattcaacatttccgtgtcgcccttattcccttttttgcggcattttgccttcctgtttttgctcacccagaaacgctggtgaaagtaaaagatgctgaagatcagttgggtgcacgagtgggttacatcgaactggatctcaacagcggtaagatccttgagagttttcgccccgaagaacgttttccaatgatgagcacttttaaagttctgctatgtggcgcggtattatcccgtattgacgccgg

SEQ ID NO: 5235 - DNA, 15696 bp, Homo sapiens
gacctttggggctgcagctggctgagcgccgaggggctgcggaggcagtgaccttcttaactgagccaccccacgccctgctccgggcctgcctgcatctcccacctcctccccagcgctgcctgcccctctcggagcctggggtcactcagaccaccagccaagagccttcccttgaagtccccaagcaagcactgcaattaggaaagagaaaaagcagcgtgcccagcctggaagggcatctgtttgccccgctagcaacccttttatatctagcagggctcttccagtcctgcagcacgggcccccagctatcagcggtgcaggcagtgctgtggcatcccaggctccgggcagctccgttctcatgctgaaagtgggtctccggccttagcacacacaccttgagggtcttaagaaccacattccctcatagtagaaagtactagaaaaagcgacactgccatcatcatcccaaggcaggctgctactgcctttgctgacccccggggtggcctcacggtggggacaaagctgccaggagccacagcagccacagctggggctttgcaccagcctggcttgagactgagcagtttgcagggggtggggggtgcaaaaaacaagcaaacaggctgctgctgcctccagctgcccaccacaggcctgccccaggcacctggggctctgaggcccctggggaggctgggcccagcagctgcccctggagaacacagacaaaggacttccccgcagggaactgtgccctatggagggatcagacagggctgggaacagccacagaggctgcgtgcctatggcacagcccttcctccgccgcacactccccctgggtcctcaggcccacccaagcgccgggctgcagaggaagcggggctggggaggctgcaggcatcagagacactggtggtggcggacccggccgccgggccccgtgctctcaggctagcccaggtcgtggaggctggcaggctcaggtcgggtgtgagacgtgccgtggctgcgctcagtccagcggggaggagccgttcagcccggcctccccaggaagccatatccccactcacccggtaagagaaccttgtcgtcccctttccatgctctcctaggacacgagcccaggaaccccagacccagggggaggaagggtggaggggccccaggggtcaccgtgtgcaccaggggccgtgaggggccggggcattcagctcagctctgaaccggggaagctggcacggcaaggactgcctcaggtgacgggccgtgagaggggacgggtcaggagccttcccaagccttctcctcagcccgacacccatggccatcggaggctaggatgccagacacagccatttgcagaaatcaggcacagtgactgcagctcacgtccagccaaccaagcatggggccgcagctcaggaagtcccttcccgccacaccacagcctaattcttactgggacggaggcaactcggctacgctgggcaggacgacaaacacgagacgccactgtggaatgagcaacttcggagcacggggtgacttgcttgggaccgtgcccacgtgacagccccttatgcagaggaggaaagagaagccccgagtgggaggggaacctgtccaaagtcacacggtgtgtgggtgacacagctggggtgagtcgaggctggcccctgaggcccatgctccctgaacgctggagaccactgtcggctagcagcggctctcagggaaggcctggtctccaccctcccagcctagcctcgcggaccctcgtcctccccacatcggacctgctcacctgcctggaccctgggctgccagatgcaggaagcatcaaaccccccagcctcgtgggtgcggggcagggcgcaggcagcacagcttagatgccctggtttgtccctcttgtctcctgggaagagcttgctcccgcccagctctcctgccactggcctttcagggttgggctgggcccagagtgccttttagtcgcttctcacggtggcctgatggctcaacccagtcccaaacgggcccagtgacactgccgcctgcgccccagctcaggcccccactgcaccagcaatgctagaaaaccaagccaataaaagtgatttcttttttcattaaaaaaccatttatagtcatttcatgttggttggaaatcacagaaattaggcaggaaaaaaaaacccaagggaacaaatacaaacagcacagcgttccccacagttctctgctctgctctcctgcgagccggggaaggagaggggcagcctgagctcgggcgggggctgggcctggctgcccgcggctcagctctcctcgtccagggcctccgagtccccccgtgccctctcgcgctcctgccggtcgctcccaggcctgtccaggtcgggaccctcccgtacgctgctggtgggaacagcaaaggcggtgtgaggatgccctcccgcccctgccctgcctgtagggcggttgggtgggatgggcaccgaggagtgtacccccgttgtggcacctgaggctcgagtgccgccctcctatctgcctgtcttctgccactagagaccacaaccatctccagggtccccacgctggcgccagccaggcatagcacaaggcagctgctgggtaagtgagtgactccactgagccttgtaccagacagcagcccacagtgatgggcacaggcaccgtcagatagccgggtgcccgtgctcggggcctacctacctgggccaccctggaggctcggcaagaagccaccttcccaggaggccaggggcaggcagctcaaagccctggagctgcctctctgtaggggccgccggaagtgccagccagcggggccctggggtcagctgtgaaggtgggaggcccgagtaaggacgacatccctgggacccatcccagagggactggcacaggaggagcggctcggacccagggtgcgcgtcacaccgctgccgctcaggagtccaaaccccacggcccgggacactcactcgtgcaggtcttcagaggagccacaccttggcccctcctccgagtcccgaccctcctcgtgctccttgtcctctgcgctctcccccttctgtgatgtggcctcgccattcactggggctgagagatctgggtgggacagaggggtcacaggacactgctgggctccagctgggcaccccagaacccttgcctgtcaaggactggaccaggggccaagctgagcgccgtgggtgacacatgcccatccacctggaccccagcacctgctgtccagtctgcaagctcctgacatgggatgctgcagccagccccagcccgagccacactggcctgcagaactgggggcccaagaaatgagggaacgtgggcagccctgagaaaagcccacagcagcctgggaaagacaaaggaagacaaggtcgggcacgggggctcacaatcccagcacgtgggaggccgagacgtgaggctcacttgagcccaggagttcaagaccagcctgagtaacatgccagcaaccctgtctctacaaaaaatacaaaaattagcacgtcctggcagggcgcagtggctcacgcctgtaatcccagcactttgggaggccgaggagggcggatcatgaggtccagagattgacaccatcctggataacacggtgaaaccccatctctactaaaaaatacaaaatattagcctggtgtggtgttgggtgcctgtagtcccagctcctcgggaggctgaggcaggagaatggcgtgaacccaggaggcggagcttgcagtgagccaagatcacgctactgcactccagcctgggggacagagcaagactccgtctcaaaaaaaaaaaaaaaaaaaaaaaaaattagcagggcatagtggtgtaggcctacaatcccagctcctcaggaggctgaggtggaggatggcttgcgcccaggaagtcaaggttgcagtgagctgtgattgtaccactgcactccagcctgggggacagagcgagaccccatctcagaaaaaaaagaaaaaagaaaaaaaagacactagccttcggctgccccctgggccgcaaagccccatcccaagctcgcccatcccatctccaaagggctgctctgagcacctgtaatggggccatgtcagcccagtagccccacagccagcagccccgagggtcacacctcatctcctgtcggcccaccaggcaagcaagggcacctgaggcctccgcccccgagcctccaccgactgcctctctgaacaatgcccccactctttgcccccgctgcacagagccacccccctctctgggcgtcccagggtgggagacggtggaggcgtgtgctgtcatgcactgtccccgtcacccctctggcgtgagccccaagttacctgcatgctggctgcctggcacacggtaggacctgaatgcccctcactggctgccccagggattaaagccgggtctgcacggagaccccaacaggacatgacactctggcaggtttggggcagagagtagagctgtactccccttctggaatgttctgcaaagcatctgtttcttcagctgaggagactgaggtacagggcccaccccacccgcccctcaccggtgctgggcttgtcctccgccttctcctggggggcctcctccccggccagctcctccccggccagctcctccccggccagcttctcctcggccttctccttctccatcccagccttgttcactttctgcaccgcctcgatctttgggccgaggacccgcgacttgagccgggtatagacttctgctgccttctccattacgtccttgttcgctttgtaacggcgaatctggccaccaagagaagaggcctggctcacccaagtgcagcggccctagccccggctctgaacccctcgccccagcaatgcgcccctcccgcagcccctcccgggagcacagctctgtgcagcaggcatttctttttttttttttgagacagagtctcgccctgtcacccaggctagagtgcagtggcgcgatctcggctcactgcaacctccgcctcccagcttcaagcgattctcctgcctcagcctcctgagtagctgggattacaggcgtgcgccaccacacctggctaatttttgtatctttagtagagatggggtttcaccatgttggtcaggatggtcttgatctcctgacctcgtgatccgcctgcctcagcctcccaaagtgctgggattacaggcgtgagccaccactcctggcaagcaccaggcatttctacccagcagcccacggcctcctcgctgacccagggctgtcccgacaggaacctgctgggggcctgggctcccgggcaggcacttgctcccagctcccccgactgcaccctgcgcctctgattcccccgccataccttcttcaaggtggccaccacgtctgtgttcttctggaggatctgagaggtcacctgcagggttcccagctcctctagggcattcaggcacctcttcacgtcctgcagggtggggtgggagtgagggagacggcctggccaagggatccccaggggtcccagggccccgatgggtggaggaagacatcctgggctctccttgaggggagctgtatctgcagaacagctcccctcagcccccgtccagttgacggggaactccagggatagccagatacttggggtcccaggtacgtgggggttggtcctgggggcctccacacaccacctgccgggaaagctgggtgctgcatgtcaggaccagctcccccagggcccttggccaggagaccccatgcgctcactagcaaccggaacagactcctggcccacccaactgcaggaccccggctttgcctcagtttcccgagacatctaagggagcctggcagggaggtggcagcggggactgcttggctcacaggccctgagggtcttaccgggctgtcgacctttagggcaaacttgatctcactgtgcagcttctgcagcttctcctccacggagggctctgggccaggagagagagcaccgtgtgggcccaggcagggccacagggggccagctgttcaagggcaggagcctgagagcctctggaggatttgtcatgggggccccaggtctgcaggctcagcccccacccctggaggcaccgccggccaggccggccgaggatgtgctgagcaccctctctagggacaggcgggacaggccagccacgccacggctgtccccgttcccctcagtgaactcagtgtgggcagtgctgggcagccaggcctcacctttcttcttctctaccttcctgtccatcgagaagccctcggaccgcttccgggtccgctccaccttcacgggcctgtggagaagtgctcccctcagtcgggccccgtcaccggcactctgccactgaggggctggcgcctgaaggggtggacccaaacccactgcaaaggaaacctttgggaggccctgggagctaagccgggaaacgggaggcggggaggccctgccacagcctaggcctagggcagaccagggcagccacaggctcgagctgcccaaagatacaagccttttcccgagttctcatgaaatcccaggattcttttcctcgttcacatggccaagggctggctttgtctaccagagtcagcgagctaggaaaaggccctcaagggtgacacgcgtgcaggagagaggcccattgctgaggctcggtgccatgtgctgctctgtaccccgccactgccataccggcctgccgaattctcatgggcaggtttgcccactcaaggccatttagaaagtgggctgggggaccaagcacggtggctcacgcctgtaatcccagcactttgggaggccgaggcggggggatcatgagtttaggagatagagaccatcctggccaacacggtgaagccccgtctctactaaaaatacaaaaaattagccgggtgtggtggcacacacctgtagtcccagctactttggaggctgagctaggaaaatcgcttgaacccaggaggcagaggttgcagtgagctgagatggcgccactgcactccagcctgggccacagagcaagcccaagactctgtctcaaaaaaaaacaaaaacaaaaacaaaaacgtgggctgcagccaggcacggtggctcacacttgtaatcccagcactttgggaggctgaggcgggcagatcacggggtcaggagatcgagaccagcctggccaacatgatgaaaccccgtgtctactaaagcaacaaaaattagccaggcgtggtggcgggtgcctgtaatcccagctactcgggagggctgaggcaggagaatcgcttgaacccgggaggcggaggttgcagtgagctgagatcacgccattgcactccagcctgtgcaaaagagcaagaacaagactccatctcaaaaaaaaaaaaaaaagtgagctgggagacaggctctgtctgcccaccacagggggaccaagatgcaaacccctaggccggggtgcagtttctccctcctcctctgcttgtggacattggggatggactgttctctgggatgggtcatcctgggcactacagggccctcagcagcgtccccagcctccacccgctccatgccaggagcaccccccagtcatgacaaccacagatgtccccggacgtggccgtgtctctggaggcgggatcgccctggaggagacccctgggctgggcaaagatcccactcccgcagcagcgattcctacgcagcccacacaacccaaggaccaggaacttcaaccgggtccggctccaaggctgaactcagaggtggggctgcccctgtgaggggtgagggttgtggggtgatgcggggtgcggggcccccagggtgtggaggggcagagcagggctcacttggcttgttgcttctcctcgggccgcactctcttctccttctggccaggtttcctggcgggctctgtgcttgaggactgcggcttcttcgctgatttcttggcctatagcagtcaggaagggcgcgctggagcagtgggaagaggggattacccagacccctagcccatcccactaccaggagatgcagctcgaccctttctgtcgccctccacactgtttgaaggtgctggggcaggatgggagaggagggaggacccagtgtccggtcctgagtggatcgtggggttcttggagcccaggccccattcagtggaggaacagcccccttcactcctcctgcccagcagtcctgggctgtggctgaaacgcctcctgcaccaggagttcggtgccctttctgtgatgaagggagtgacagagagagaacacggcgctgttcgtgctttccccaaagaaggcaggcctggctgaggggcaccagcacgtgggccccaggcactcagtctaggtgagactctggattcaggccacattgcctgaatctccacaagggtagagggcgtgacagggcccgcagcaccacacgtggtataggagagtcctgacagtcaccaccctaggaggcctcctacctgctcccacgctcacctgcaagctgtaccccatggcagccagagggcacccgagagcacccgagtgagggcctgtccctaccctgtccagtgccctccatggctcccacctccctcagggtcaaagcccaaatcctccctgcagcccacatggccctacccggcctgctctgtccgttccccaccgccctccttttccctctctcccctcctccctccactccagccccagaggccacctcgctgttcctccagcacgccaggcgcagtcctctgggcctgtgtgtgagctgcttctcctgcctagaatgtatcccctcccaggagtcttcgtagatcccctcccttcattcggagcctattttttttttttttttttttttttgagatggagtctcgctctggcccaggctggagtgcagtggcacaatcttggctcgctgcaacctctgcctcccaggttcacaccattctcctgcctcagcctcctgagtagctgggactacaggcacctgccacaacgcctggctaatttttttgtatttttagtagagacagggtttcaccgtgttagccaggctggtcttgatctcctcacctcgtgatccacccgccttggcctcccagagtgctgggattacaggcgtgagccactgcgcccagcccattcggagccttttacttaaacccaaacgcaagcctttggagtctactcacaccttcagggtctactctatttaaaagagaaaccccccaccccactttactcttctccttagcaccgaaaactccggacagcacgcactaccctcatgtcatctgtacagctcctccctcctttgttttgttttgagacagggtcttgctgtgtggcccaggctggagtgcagtggattgatgacagctcactgcagcctccaactcctgggctcaagcaatcctcctgcctcagcctcctgagcagccgggactatacaggcgcacaccaccacgcccagctaattttttaaggtttttatagagacagggtctctctatcttgcccaggctggtctcgagctggactcaagtaatcgtcccacttcagctgcccaaagtgctgggataacaggcgtgagccaccaagcccggccccctccctcccatgaatgtcccctcctccagggcaggagtttctgggcccacgcactgctttcttgatgggtcccggaacctgggatactgcctcctacctagtagatgctccataaacgtgtggagtgaaggcagggactcccggcgccctcccggctcacctctctctccagctcggcctcgggctcggagtcagaggaggacgggggaccccggccccggcccttgcgtccccgcttcttgacgggctcatcgtcctccctgagctcgtccccgctgctgccgccgctgccccgctcagcctccccgcggtcggcccgctcgcgcctccgctccttctcctccttctcctgctcccgcaggcgccgcagctcctcctcctgctctcgccgccgccgggcctccagctcgcgcctccgcgcctcgtcccgccgcttccactcactgatgcggtccacctcgtcgctgtcactggaggcggagggggcggttggggacctccgttcctccctcaggagcccgccctgcccctcagccgatggaggagccgccagaggggaccccagccccagcacccacctgtcactgctggagctggacggaggccgttcaggcttcggtttccgccctcgcggcttcgggagaggcttctccgctacaggaagaggaggagggggtgaccttcccttccagggctccaaggtgaccaggggactgcctgggagcgccccggcaggggccaggccaagagatgtgcgagcacgagggccctacctggcttcctgcccctcggaggcttcttcacagacacatcggagtcggaggaggaggaggaagaggaggaggaggacgccgaccgcgccatggccaccggctcaggcttggccccgtccgaatcggccttggagtcggagtcggaggctgatggcgccttctggggagaagcagggacaggcgtgagcatcaggagccccaccgtgagaagcggggcgcaccaggccagaggaggctcccgcacccctgcagccgccaggctctgcgggcctcggctcagggcccggctccgaatcccctcccacccacaaaacccacctccaccccaagtgaaaaccgggatcccaggcggccctgggcacgccgggcagctgctggcccttcccctcatcttcctcagtgaaccgggtacatcagaagcccgggtttcccagtggggacatctttttctttatgcaaaatcttgtgcggaggccacatcagacaagctgccgtgctctaccgcctccacccgagtaccctgccaaacacacacgccacacacagacaccacacacacaccacacacacaccacacacagacaacacacacaccacacacacacacagacaacacacataccacacagataccacacaccacaccacacacaccgcacagacacagacaacacacacaccacgcacacaccacacacagacaacacacaccacacagacacagataacacacacaccacacacagacaacacacacaccacacaccacacagataacacacacacaccacacacagacaacacacacaccacacagataccacacaccacacacagataacacacacgcaccacacacaaccacacacacactacacacagacaccacacaccacagacaactcacacgcaccacacacacacaccacacacacagatacacaccacacagacaccacacacacaccacagataacacacaccacaccacacacaccacacacacacagacaacacacacaccacacagataacacacacagaccacacataacacacagaccagaaacacacaccagacacaccatagacacagacacaccagacacacaaacacccaacacacatacaccacacacaccacacaccacacacagacaacacataccacacaccacagacaacacacataccagacacacacaccacacagacaacacacacaaacaaaacacacaccatacacagataacacacagacaacacacataccacaaaccatacacatggacacaccagacacacaaacacacacaacacagacaccacacacagacacacaaacacagacacatagatacatgaacagtatgcacacatggacacacaggcacacacacaggcaccacatatactcacataggaacacagaggcacaacacatagacgcagaggagaggtacagcacacacacacacaggcatacaggcacagggacacaggcaccagaaacacacacacaggcacgacatgtgcacacacgacacacacatcacacatgcacaatctacacacacactgcacacatacacacctacatggtcacaaacatgcatacacacaagtacacacacacacatgcacgtcgacacacgtgcacagagacagaacacacacacacaatccgctcatatacacactggcacacacctctctcctctcttctgtgtccctctcgcgctcttgctttctcactctctcactctcatgcaggcgcgtcaggactgcttccctcccttctgatgccagcatcccagaatgcccctttccaaaccagatggtgggctcctggaggcagtgcggccataacgaggtgccacgctcagggcagaggcggtcccctcgggtaccctgcagtccgtgtcccaccccctccagaaatggcccgccctgccctggggacagcactggagaccgcagaggtgccccacgagtgggcatgggaaacaaagtcaagtgcacgctaccttttttttccgtccccccagagggcccctccgtggcgcccggaccgctgctttcttctcaggtgtgaagtcctgggggagagaagtgagctgaactggggcccactggcagccaccacgcttccctgccatcccaaggagccactggcccacctggtcgctggtcttctccgactcagatgagctttccgagttctcctcttcggatggggacacgctggcctgatccaggtcgctggaggcctttcgggctcgtttcgagaccgacatctggaaggggaacggcctgaatgctcagtgatgggaaggccgggctcctggcaggaagcccccagctgactgcccaccacccacgacagctgagctctggaacctctctggcgggccaggaaccctctgagaacctgatcaaaccagggatcttgaaccttgaggacattatgcttggtgaaagaagccagtcacaaaaagacaaactcttataggaggtccctagggccatcagactcacagagacagaaagtaggatgaggggcaccagggctgcgccggggggggtgggggggtgggggggtgggggggtgggtggtgggagtgagtgtttcatgggacagcatttcagcttgggaagacgagaaagttctggagatgatggtggtgatggttgcacaaccacgtgaatgtgcttaatgctgctgaacggggcacttaaaaatggctaattttggccaggcacggtggctcacacctgtaatcccagcactttgggaggctgaggcgagcagatcacctgaggtcgggagtttgagaccagcctgaccaacatggagaaaccccatctctactgaaaaacaaaattagctgggtgtggtggcgtatgcctgtaatcccacctacacaggaggccgaggcaggataatcgcttgaacctgggaggcagaggttgcggtgagccgagattgcgccatcacactccagcctgggtgacaagagtgaaactccatcccccacccgccaaaaaaaaaaaagagaaaaaaaagaaataatccttccttggctcagaaacccctcatatactacaggtattttttccaaattctctctgttctttgcattttccaagttatctactataaatatggcttatcattttagaatcagaaaataatacaaagtacacgtgactctatcaaaagaatttgctgctagaatctggtcctttgtttctacacccaaatagtgagaaatggtcaaaaggcaggacagagaatatacccaggagaatggaacacacacatctgcacaaaactctgtacagaaacgttcacggcagcctgatctggaatggcccaaaagtggaaacaacccaaatggccagcgacatgtggatcaacacaccgtgttccctccacacaccggaatctgacccggccaggaaaaggaagggaggcagccaggcgcggtggctcacgcctgtcatcccagcactctgggaggccgaggcaggctgatcaggaggtcaggagttcgagaccagcctggccaacatggagaaaccccgtctctaccaaaaacacaaaattagccggacgtggtagcgggcccctgtaatcccagttactcaggaggctgaggcaaaagaattgcttgaacccgggaggtggaggatgcagtgagcagagatcatgccattgcactccagcctgggcgacagaactagagtccgtctcaaaataaataaataaatgaaacgaatggagctgacccgggctgcagtgcggatgcaccctgaggacgtcacgcttggtgaaggaaggcggacacaaaggctatgcagtgtgtgaccccatttctatgaaatgcccaggacaggcccctccacagaggcaggaaggggatgtgtgggtgccaggggccagaggaggggatgcggaggatcagctgatggggaccaggtttctttttggggtgacggaaatctcctggaataatggtaatggttgcacaattccgtgaacacactaaaaaccactgaggtgtatattcaggaaggatgaatctcatggtgtatggactataactcaattttttttaaatgcatactgaaaaacaattatattaaagaaagggaccaggccaggcaccatggctaacgcctgtaatcccagcactttgggaggccgaagcgggcggatcatgaggtcaggagatcaagaccagcctggccaacatggtgaaaccctgtctctactaaaatacgaaaaattagccgggcgtggtggtggatgcctgtaatctcagctacttcggaggctgaagcaggggaatcacttgaacccaggaggtggagattgcagtgagctgagatcgtgccaccgcactccagcctggcaacagaatgagactccgtctcaaaaaaaaaaaaatatggtggtggtgcccataatcccagctactggggaggctcaggcaggataattgctggaacccagtggcagagggtgcagtgagccaagatcgtgccactgcactcccgcctgggtgacagagggaactccatctcaaaaaaaaaaaaagaaaggtggccaggcgcagtggctcaagactgtaatcccagcactttgagagaccgaggcaggcagatcacctgaggtcaggagttcaagaccaacttggggacctggtgaatccccgtctctaacaaaaatacaaaaattagccaagtgcggtggcaggtgcctgtaatcccagctactagggaggctgaggcagaagaattgcttgaacctgggaggcggaggttgcagcgagtcgagatcacgccactgcactccagcctgggcgacagagtaagaccttgtctcaaaaaaaaaaaaaaaaaaagggcaggagagcaagctgccaggcgagacatcagggcaaggggatgaagggccagcccaccttggtcctcccctacctttagcgcaggcgtcttcctcttcaggccactgttgtcgctactcttgtctgagtctgagtcgctctccatcctgtcgctggcagctgtggcggttaccgctgtgacggccatgaccccccggtcctcatcgtcctcgtcagcgtcactgccgtcggcggggttggcctcgggggcctcgctgtcggaggagctcactggctgtggg

SEQ ID NO: 5236 - DNA, 4408 bp, Homo sapiens
gggccaaaggtgctgtcggcggaacaggggagctacttcgttcgtttaggtgacctgggtcccagcttccgccagcgggcatttgaacacgcggtgagccacctgcagcacggccagttccaagccagggacactctggcccagctccaggactgcttcaggctggtaagagcttccccctgctgctgccccgtccccagggcacttcttagaacccctgcccaggactcacccagctgcagatactgactgagcacctaggagatgatgctgtcagcgtcaccaatggtcatggctctgtactcatggggcttgcctcctggcaagggggacggagctagatcagatccttaaagacagcgggtaggctgggtgcggtggctcacgcctgtaaccccagcaatttgggaggccgaggcgggtgggtcacttgaggtcaggagttcgagaccagcctgaccaacacagagaaaccccgtctctactaaaaatacaaaaattggctgggagtggtggcaggcgcctgtaatcccagctacttgggaggctgaggcaggagaatctgggaggcgaggttgaacccgggaggcggaggttgcagtgagccaagatggtgccactgcactccagcctgggcgacagagcaagactctgtctcaaaaaaataaagacggtggggacacaaagacagcaaaacaatctgtgtgcagagggggatgtgggctgggcaggaaggccgtccctctgggccctgtcctgaccgatggggagacagctctgcaaagcccccaaaagcagggacaggacagcaagctaccggggagcaagctgggtgtgttcggggaatggaaaggcggcgctgtggctgggtaaagtgaagccaggatgggatccagggagcccgcagggcctggggctgcaacgcacgcaggaaaggacccaacgcaacatgactcggatgcatccaggggtcatgcaccctggccagagtcgtccacccctcccactggccccgctctcttcctctggcctaggttctcccctttggcaatgtggacgttggggccggatcgtgctctggggtgggatcatcctggtccctgcagggagctgagcagcgtccctggcctccagtctccccgtccccagtcctgagggccaacatttcctctagaagctgttgtgcagcccgggaggcagaaatctcacaggactgctctaggggtttatgttttggagacagtgagacagggtcttgctctgccacccaggctggactacagtggcttgatcatggcccactgcagcttcaacctactggggtcaagagatcctcccacctcagcctcccaagcagctggacaactggcatgcaccaccacgcccagcttagtatttgttgttgtatttttagtagagattagattttgctatgttgcccaggctggtcttaaactcctgggttcaagtgatcctcctgcctcagcctctgggtgcacactaccaaacctggttaaattttttgtagagatggggcctccctatgtagcccaggctggtcttgagcttctgcgctcccgcgatcctcttgccttggcctcccaaagtgctgggatgacaggcgtgagccaccgtgcccagcagtcacaggttttacatgttggtggacagcagtcccaccccggcgggccgtgagaaaccttgagatgccgccctcggtcaggattcctggcgtgcagcctaggccactgtgttttccatcaacatccggggtttgtgacaagccgcagtttgagggtctaacccagggttctcagtgtggatgacctgcctccaggggacactagtccatgtctggggacatctgtggttgtcacaactgggggaagcccctggtggagagtagggacactgctcagcaccctgcagtgcccagggtggccccaccccagagaaccatctagcccccgtgtccacagtgccaagggcaagtctgtcctagggaccctcaggacacctcatgtcactgtggccacccccagatgcacagtcgctgccgtgcctctggcacgcggtacaatggcgcagttggaaggcgttcctgtaaacgccatggaggaatgaaggaatgggcccaccctcgcagcacgctgcaagcggctgatcacaaagcattttcccacctttgaatcctcacagcaaagtagcctgggccagaactcagcccaggcactcttcagaaggggagaaggaggccacaggaagagaagagctttgctcagggccacacgtgaaggatgctgggctgggaaatgggatgtggtgtgtgactcatcatgtctcacttgttcctttaagtgctactgaagaccctggatatccaggcctgcccttggggggtggggggcgccatggttggggaagacaattcacagatgaatatatagggcgtcgcgttggatgatgcttggaaaatggaacatgtaccaggataaggaagtggctgtgctggggctggtcaccctgaagaggggacacttgaagtcaggtctaaatgacagagagggagtgcgtcagaatgggcaggagtgtgatctgagcggagggcacggcccgtgcaaaggccctggggcaggactgtcccggcatgttggaggaataggaaggaggcctgggaggctggagccgagtgaggaggggatggggcaggttgggccggacctgggcttcgaccccaagggagttgggagccctggagggctctgggcagaggagcggcctgatccaaggtgggtttcatttaaaaggatcactctgatgggggaggtcaggccaccgggtgggggcgagggccagaggagacagtgggacgtaaacccaggcaagtgctgccgggcctcaggagtcacgctgtggtggtgagaagtagctgggctctgggtgtttcgaagtcagagctgcccgggtccgatgtgggaggtgagagaagaccccaagagacccctgaggcttgtaacctgagcagacaaggagagcaggggggctgaggggaggccgggcgggttgcagagtggatattaggagcctggccttggacagggtgaggggagatgcctggtgggcaccgaggggacgcgtctgcatatgcagctggcttcaggtctccagcactggcgcggcgagggctgggagggcgacagcagtctggagtcgatattttgacggcgtgccgcatccctaccagccattgagatgatgaggaagatggggccctgtggacagggtggggcgtgggtgccacgtgctggggacacagcaacaacgaggacagagtcctgagtgttcccctgccaggggcggataaacaccaagtcaatgaacaccaaagccgcacgctgtgctcccgaggagaggggcagatgtgacgggagggactggggctgccacaccatgggccaggaaggtctcaccaagggtcacctggagctgaggccgaacgcggaccttgtgaagggcccgggaagcaggctcccggctgagtgggcagtgtgtgcaaaggccctggggcagaagcctgctggagtggccggagggcagaatggagccagtgtggcctcagtggagacagcagtggggtgccatgggagatgaggccagaggtgtcccaggggccagcccaccaaggccatggtgaggagctgggttttatcttaagggtactgggcagccacaggtttaggggtgaggagtgacacgaccccacagacactgtgttacgtgcactccctgatgacctcatggggaagtttgaactattgcctctttctgcaagacaacacgcccactgtggtacaactgacttggaactcgtggcctttctcccaggactgtgaatgtgcccaggtccctgggggagggggaggtgggggttgtgaaaggtcatttgccaagaagccatcatttccccactgtactctctctccagattgaaaaggcccagcaggctccagaagggcagccacgtctggaccagggctcaggtgccagtgcggaggacgctgctgtccaggaggtgggtctggcacagggctagggtccccccaccccgcccatgggtctccactcaccttgcgccttcctcccacaggagcgggatgccggggttctgtccagggtctgcggccttctccggcagctgcacacggcctacagtggcctggtctccagcctccagggcctgcccgccgagctccagcagccagtggggcgggcgcggcacagcctctgtgagctctatggcatcgtggcctcagctggctctgtagaggagctgcccgcagagcggctggtgcagagccgcgagggtgtgcaccaggcttggcaggggttagagcagctgctggagggc

SEQ ID NO: 5237 - DNA, 385 bp, Homo sapiens
tttttaagtcattcaattatcaggaggaagaagccaagctaggacaagacctctgggcttctaccatccaggcactgctatttctcctacactcaaaatgcccgctcaggcagtgacagccacagaaatcacaaacacctatctgatgcttcttatgtgccaggcacgtgaccgggtcacacactgagccaacgtttgctgagcagtcatgagtgtcgggcactgggccgggggcatcaagaacacagaagtgaccgtggcatctcccttgcccctgggagctggttttctagcgggagaccctgaacattgccatttaaacacagacaattccaaatcgtggtgacaggcaggaagaaaacacgggcgtatggttgtaaggatt

SEQ ID NO: 5238 - DNA, 833 bp, Homo sapiens
gaatatatttgtggtttccttcagctcgatgtctgaagattctcacaggttcagggactattccaagtttgcaacctgtgtgtggattttgaaacaaatacagacaacttatgagacggtttctttgctgggcttcttgcttgacacagttttctgaaacatggctctggcaggcttttttcttccatggacacattgctgccgtttatcactgaagttcctctgtggagttaccaggagctaatatttggatgatgtacttttcttgcagaaaatattagcaaatgttgcagaaactgtgctttaaaaacttttaaaaggggaatggattcccagtttaaaaataagcaaaagaaaggataaacatgatttcattgatggtgtgcaactgctttagaacatcagatattttgtgatgtgaaatgggatgatactctattttacaaaatgtgtactgcttatagaaaatgtatttactgtaccactaagccaaacttaggtgttgctttgtttccttaaaatattttttgagtcgctgtggctgccccacagatgatgggggagtaggcattctttctgcccagagcacttgttctcttcctccacccttttggttgttattgtagcatcttgactttcagcttaacacatcccaacttaagcagaagcccttttgccttctctctctttaaaactagatccatagaaattatttttattacagtaatagggcaagatagttttatgtcatatataaactggaattatgtagtgttagtagtagttatgtctcctgaaaggaaccagttgattataaagaagaaaagttaggg

SEQ ID NO: 5239 - DNA, 833 bp, Homo sapiens; identical to SEQ ID NO: 5238

SEQ ID NO: 5240 - DNA, 358 bp, Homo sapiens
tgattgaaactttaaacccttcccttaagttcccctaaaaacctccctgtgcctagtaaggttttgcatgtgtgaggagggtgaaggtatttggaccttggagaaactttgcaatttgaaatctgcctatgcagttgtacaccagaaatgaacatggtcaatgccatattgtgctctttgtctttttcttctaccaagattcctcacccctaggagacgttggttaatataggcatttcggtttggttaatctgatcatgagtgcccgtgagcatggcatgaggcatgattgaagcagttataaaaatttggctcagagttaagccctataatttgttttaaagaattacctcttcag

SEQ ID NO: 5241 - DNA, 147 bp, Homo sapiens
ggtcccagctactcgggaggcttaggcaggagaatggcgtgaacccaggaggtggagcttgcagtgagccgagatcgcgccactgcactccagcctgggcgacagagcgagactccatctcaaaaaaaaaaaaaaaaaaaaattgtg

SEQ ID NO: 5242 - DNA, 141 bp, Homo sapiens
cagctactcgggaggctgaggcaggagaatggcgtgaacctgggaggcagagcttgcagtgagccgagacagcgccactgcactccagcctgggtgaaagagcgagactccgtctcaaaaaaaaaaaaaaaaaaaaaattt

SEQ ID NO: 5243 - DNA, 183 bp, Homo sapiens
aatacaaaaaattagccgggtgtggtggcgggcgcctgtagtcccagctactcgggaggctgaggcaggagaatggcgtgaacccgggaggtggagcttgcagtgagctgagatcgtgccactgcactccagcctgggcgacagagcgagactccgtctcaaaaaaaacccacaaacaacaaa

SEQ ID NO: 5244 - DNA, 162 bp, Homo sapiens
agctacttgggaggctgaggcaggagaatggcgtgaacccgggaggcggagcttgcagtgagccgagatcccgccactgcactccagcctgggcgacagagcgagactccgtctcaaaaaaaaaaaaaaaaaaaaaaaaaaaaaaaaaaaaaaaagaacaaa

SEQ ID NO: 5245 - DNA, 193 bp, Homo sapiens
aaaaattagccgggcgtggtggcgggcgcctgtagtcccagctactcgagaggctgaggcaggagaatggcgtgaacccgggaggcggagcttgcagtgagccgagatcgcgccactgcactccagcctgggcgacagagcgagactccgtctcaaaaaaaaaaaaaaaaaaaaaaaagatcagaaaaaaata

SEQ ID NO: 5246 - DNA, 153 bp, Homo sapiens
cccagctactcgggaggctgaggcaggagaatggcgtgaacccgggaggcggagcttgcagtgagccgagatcgcgccactgcactccagcctgggcgacagagcgagactccgtctcaaaaaaaaaaaaaaaaaaaagaaagcagtggggcc

SEQ ID NO: 5247 - DNA, 203 bp, Homo sapiens
ccatctctactaaaaatacaaaaaattagccgggcatggtggcgggcgcctgtagtcccagctactcgggaggctgaggcaggagaatggcgtgaacccgggaggcggagcttgcagtgagccgagatctcgccactgcactccagcctgggcgacagagcgagactccgtctcaaaaaaaaaaaaaaagaaagacatgtaaa

SEQ ID NO: 5248 - DNA, 150 bp, Homo sapiens
ggcgcctgtagtcccagctactcgggaggctgaggcaggagaatggcgtgaacccgggaggcggagcttgcagtgagctgagatcgcgccactgcactccagcctgggcgacagagcgagactctgtctcaaaaaaaaaaaagaattggc

SEQ ID NO: 5249 - DNA, 142 bp, Homo sapiens
cccagctactcaggaggctgaggcaggagaatggcgtgaacccgggaggcggagcttgcagtgagccgagatcccgccactgcactccagcctgggcgacagagcgagactccgtctcaaaaaaaaaaaaaaaaaaaatgga

SEQ ID NO: 5250 - DNA, 105 bp, Homo sapiens
  SITE (81): n equals a,t,g, or c
acccgggaggcggagcttgcagtgagccgagaccgcgccactgcactccagcctgggagacagagcgagactgcgtctcanaaaaaaaaaaaaaaaaaaaaaaaa

SEQ ID NO: 5251 - DNA, 142 bp, Homo sapiens
cctcagctactcgggaggctgaggcaggagaatggcgtgaacccggggggtggagcttgcagtgagccaagatcgcgccactgcactccagcctgggtgacagagcgagactccgtctcaaaaaaaaaaaaaaaaaaactta

SEQ ID NO: 5252 - DNA, 368 bp, Homo sapiens
ggcatgggcaaggacttcatgtctaaaacgccaaaagcaatggcaacaaaagacaaaattgacaaatgggatctaattaaactaaagagcttctgcacagcaaaagagtctaccatcagagtgaacaggcaacctatacaatgggagaaaaattttgcaatctactcatctgacaaagggctaatatccagaatctacagtgaactcaaacaaatttacaagaaaaaaacaaacaaccccatcaaaaagtgggcaaagtatatgaacagacacttctcaaaagaagacatttatgcagctaaaagacacatgaaaaaatgcccatcatcactggccatcagagaaatgcaaatcaaaaccacaatgag

SEQ ID NO: 5253 - DNA, 4704 bp, Homo sapiens
tattattatactttaagtttcagggtacatgtgcacaatgtgcaggtttgttacacatgtatacatgtgccatgttggtgtgctgcacccatcaactcgtcatttagcattagatatatctcctaatgctatccctccccactccccctaccccacaacagtccccggtgtgtgatgttccccttcctgtgtccatgtgttctcattgttcaattctcatctatgagtgagaacatgtgctgtttggttttttgtccttgcaatagtttgctgagaatgatggtttccagcttcatccatgtccctacaaaggacatgaactcatccttttttatggctgcatagtattccatggtgtatatgtgccacattttcttaatccagtctatcattgttggacatttcggttggttccaagtctctgctattgtgaatagtgccgcaataaacatacatgtgcatgtgtctttatagcagcatgatttacaatcctttgggtatatacccagtaatgggatggctgggtcaaatggtatttctagttctagatccctgaggaatcgccacaccgacttccacaatggttgaactagtttacagtcccaccaacagtgtaaaagtgttcctatttctccacatcctctcagcacctgttgtttcctgactttttaatgatctccattctaactgttgtgagatggtatctcattgtggttttgatttgcatttctgatgatggccagtgatgatgagcattttttcatgtgttttttggctgcataaatgtcttcttctgagaagtatctgttcatatcctttgcccactttttgatggggttgtttgtttttttcttgtaaatttgtttgagttcattgtagattctggatattagccctttgtcagatgagtaggttgcaaaaactttctcccattctgtaggttgcctgttcactctgatggtggtttcttttgctgtgcagaagctcttcagtttaattagatcccatttgtcaattttggcttttgttgccattgcttttggtgttttagacatgaagttcttacccatgcctatgtcctgaatggtattgcctaggttttcttctagggtttttatggttttaggtctaacatgtaagtctttaatccatcttgaattaatttttgtataaggtgtaaggaagggatccagtttcagctttctacatatggctagcaggttttcccagcaccatttattaaatagggaatcctttccccattgcttgtttttgtcaggtttgtcaaagatcagatagttgtagatatgtgacattatttctgagggctctgttctgttccattggtctatatctctgttttggtaccagtaccatgctgttttggttaccatagccttgtagtatagtttgaagtcaggtagtgtgatgcctccagctttgttcttttggcttaggattgacttggcaatgtgggctcttttttggttccatatgaactttaaagtagttttttccaattctgtgaagaaagtcattggtagcttgatgggaatggcactgaatctttaaatgaccttgggcagtatggccattttcacgatattgattcttcctacccatgagcatggaatgttcttccatttgtttgtatccccttttatttcattgagcagtggtttgtagttctccttgaagaggtccttcacatcccttgtaagttggattcctaggtattttattctctttgaagcaattgtgaatgggagttcactcatgatttggctctctgtttgtctgttattggtgtataagaatgcttgtgatttttgcacattgattttgtatcctgagactttgctgaagttgcttatcagcttaaggagattttgggctgagatgatggggttttctagatatacaatcatgtcatctgcaaacagggacaatttgacttcttcttttcgtaattgaatgccctttatttccttctcctgcttgattgccctggccagaacttccacactatgttgaataggagtggtgagagagggcatccctgtcttgtgccagttttcaaagggaatgcttccagtttttgcccattcagtatgatattggctgtgggtttgtcatagctagctcttattattttgagatacatcacatcaatacctaatttattgagagtttttagcatgaagcattgttgaattttgtcaaaggctttttctgcatccattgagataatcatgtggtttttgtctttggttctgtttatatgctggattacgtttattgattttcgtatgttgaaccagccttgcatcccagggaggaagcccactagatcatggtggataaactttttgatgtgctgctgtatttggtttgccagtattttattgaggatttttgcatcaatgttcatcaaggatattggtctaaaattctcttttttggttgtgtctctgccaggctttggtatcaggatgattctggccacataaaatgagttagggaggattccctctttttctattgattggaatagtttcagaaggaatggtaccagctcctccttgtacctctggtagaattcggctgtgaatccatctgttcctggactttttttggttggtaagctattgattatttcctcaatttcagtgcctgttattggtatattcagagattcaacttcttcctggtttagtcttgggaggatgtatgtgtcaaggaatttatccatttcttctagattttgtagtttatttgcatagaggtgtttatagtattctctgatggtagtttgtatttctgtgggatcggtggtgatatcccctttatcattttttattgcgtctatttgattcttctctcttttcttctttattagtcttgctgtctatcaattttgttgatcttttcaaaaaaccagctcctgaattcattaattttttgaagggttttttgtgtctctatttccttcagttcttctctgatcttagttatttcttgccttctgctagcttttgaatgtgtttgctcttgcttctctagttcttttaattgtgatgttagggtgtcaattttagatctttcctgctttctcttttgggcatttagtgctataaatttccctctacacactgctttgaatgtgtcccagagattctggtatgttgtctttgttctcattggtttcaaagaacacctttatttctgccttcatttcgttatgtacccagcagtcattcaggagcaggttgttcagtttccatgtagttgagtggttttgagtgagtttcttaatcctgagttctagtttgattgcactgtggtctgagagacagtttgttataatttctgttctttgacatttgctgaggagtgctttacttccaactatgtcaattttggaataggtgtggtgtggtgctgaaaagaatgtatattctgttgatttggggtggagagttctgtagatgtctattagttccgcttggtttagagctgagttcaattcctgggtatccttgttaactttctgtcttgttgatctgtctaatgttgacagtggggtgttaaagtctctgattattattgtgtaggagtctaagtctctttgtagttcactaaggacttgctttatgaatctgggtgctcctgtattgggtgcatatatatttaggacagtttgcttttcttgttgaattgatccctttaccattatgtaatggccttctttgtctcttttgatctttgttggtttaaagtctgttttatcagagactaggattgcaatccctgcctttttctgttttccatttgcttggtagatcttcctccatccctttattttgagcctatgtgtgtgtctgcacgtgagatgggtttcctgaatacagcacactgatgggtcttgactctttatccaatttgccagtctgtgtcttttaattggagcatttagcctatttacattcaaagttagtattgttatatgtgaatttgatcctgtcattattatgtcagttggttattttgctcattagttgatgcagtttcttcctagcctcgatggtctttacaatttggcatgtttttgcagtggctggtactggttgttcctttccatgtttagtgcttcttccttcaggagctcttttaggacaggcctggtggtgacaaaatctctcagcatttgcttgtctgtaaagtattttatttctccttcacttatgaagcttagtttggctggatatgaaattctgggttgaaaattcttttctttaagaatgttgaatattgccccccactctcttctggcttgtagagtttctgccaagagatcagctgttagtctgatgtgcttccctttgtgggtaacccgacctttctctctggctgcccttaacattttttccttcatttcaactttggtgaatctggcaattatgtgtcttggagttgctcttctcgaggattatctctgtggtgttctctgtatttcctgaatttgaatgttggcctgccttgctagattggggaagttctcctggataatatcctgcagagtgttttccaacttggttccattctccccgtcactttcaggtacaccaaacagacgtaggtttggtcttttcacatagtcccatatttcttggaggctttgtttctttttattcttttttctct

SEQ ID NO: 5254 - DNA, 2523 bp, Homo sapiens
atttttataccattttacaggtgaggaaatttaccaagtttaaataatttacccacagtcacagtaaagtccccaacctcaggtagtttataatgaagtggaggagacaagatgcataaagaagtgactattaatagtaattttaaaacagctattacaaatcagcataaaattatatgccatgcagttaacgaatgtcctgaattaaaaagagtgtctctactgctggaggcttcaataattaaacaaaataatgtatgttaatttgaacacagtgcatgatgcgttattatatttacttctattattattaattatggataagatgtggatgggtgcagagagagagtaggaagaggtacctcgtatatagaatctggaaaaaaaaggtagaattgtggacgacagtaggggtggccagaatatagtttgtatagcatagtgataggagataagattagactggtagattgtagctttatcttagaaggctttgtatgtcatgctgaaatataactgagccttccacaggctaaatggctaaattcgttgtgcggcattccatcctctgcttaagtggcttctggtgacagggctctcacagaaagcctcattaggaacagatttttttcctttggaggatttttttatattaggaatcaccttttattgaagcaaatccatctcactgtagatttcactccttgaaattaggcaaacaatgtagttacatagagtgaatctgcaggtcagacatttgaggatggctgtcatgcttctctaggttttttcataacctgggctactattaccagttccttcacccaaactatattaagcttgacactgaattcctctcttttaagtcagtttgtctggcagctctcctggaattaaattttgattctttcagatgactacacattaaatggtgatggattgggttttgttatttccagactatatatttttgtttcatctataattcctagcattgcttggtcataattttttttcttagaaccgtgattatatacattattaattagttttaaaaatcaaatccgcaagggtaatttaatcccagaatgaaaatgacctctatataagtatttcaaaaatcatttatttgtaatgagtaaaaatgttgaaaataaggcttacttttattatttgaatatggtaattatgtaattatccttttaatatgttaaggttatattctgtgccttagagtatgctaagcactttatacataattatcttatttaagcctcgtagaaatcttatgagcaaaatgttactcggtacacttaaagtacaggtaactgaggcttagagatgtaaaataatttgtccaccacagtgcttttaaaagatgctcgtaaccactatattgtaatttcaaaccctgattccattaatgctttttgttgtgttgcctttactgataattgtgttcaatattcccatgagggaggcagtctttgactttttatttatgataaagattattaaagtgcttaaagttttttattgtatagcgtgttttatcatcaaacaggttttagttttttaagttaaactgatcaaaaataataaaagctgatggctctatgacacttgcatttgagagaacaagaatagggagcaatatttcaagaaaatcattcttactgtttttcaaaactgtttagtgtcagagatgccccaagaccactcctaggtttattgtttcgatagaaggacttacaggattagtatatagttgcactcctgactaagatttattatagcaaaagaatacacagcaagattagcaaaggaaaaaggtgcatgggaccaagtctggaggaaatgagtctcgaactcctgacctcaggtgatctgccagccttggcctcccaaagtgctgggattacaggcatgtgccactgcacccagcctgaaagtattacttttaagaattgttattatactttacttgaaagaaataaccactgctatagtattatatcataccaaagcatatattttataatttgggctacctagaattattattttttttttggaaatgatgttatatgtagttataaatcacaaatgacttggtaataaaggccatatgatcttcaaaaccaaactggaactagcatagataagacctgctgtttaaacaggtaactcttggttgagagaagataatggcagtcttgtctcttttttccctttattatgaatgcataacactgggtgttctgttaggcaagggttgtttcttgtttattgttttgtggccagtgcatagcacaaccaacgtttggcatatagtaggtgcttaaatatttatgaatgagtgagtatgtgagtagaaggagtaactgggctgggaatgatggctcacacctgtaatcccagtgctttcggaaactgaagtgggatgattgcttgaggccaggagttcaagaccagcctgaggagcatagtgagacccctgtgtctacaaaaaaaaaaaaaaaa

SEQ ID NO: 5255 - DNA, 2523 bp, Homo sapiens; identical to SEQ ID NO: 5254

SEQ ID NO: 5256 - DNA, 186 bp, Homo sapiens
actctcaggagccttctccgcagttggcttcctcggtagcttccacacggagcatgcccgagagcctggacagcccaacctctggcagaccaggggttaccagcctcacagctgcagctgccttcaagcctgtaggatccactggcgtcatcaagtcaccaagctggcaacggccaaaccaaggag

SEQ ID NO: 5257 - DNA, 931 bp, Homo sapiens
gttttgattcatcatttttatttgactcactagcagccatctgttagttacaatttaactttcaaggatctgcgtaatttgttttttgttaatgaagtgctataaacagcattatgaaggttttctcttttaatcttgaaaggaaaaaaatccgtctctaaaaaagcaatcacaaagaagaggaaaactgtcataaagtcacctactgtaccagagtttcaggtaaatgtttcaactttgtctcgaaatttttcaattttttgtttcagtgttcatatcattcctcgagagtttggctgaattccaagaaactgtagcacacttacttgtaatgaaatgtttctgacagtgacttttctccctgcaagtgcagatgtaaccaagatttaatctgctagtatttcgtaatttttacctctatttttgtcttttaataataaaaacccttttttatatcttaatctctactagtacatttcctagaagcagtttaatagaaataatatatatatactatatagtatatgtgtgtgtgtgtgtatgtatatatatataatacataaaagcaaatgtgtgaatgaaactcttccaagaacaaatcataatttggagatggtaatagtgcctagatagttcgttttcatttatttgggcactgtagaaataaatggtagatttattaacttggaaaacaaatctttcaactcttagctgtatatgatcttcagagagaatattaagtaaaggttaattgaaatggtctttaaacatttctgtggaaagaaaaagtaattatctgtactgccatatgattaagtgaagagttttttatttgtagctaatactaagcagagaatctcaccctaattaatgcttttattttctattttataaaagatgtattttcttcaataaacactttctttaaaaa

SEQ ID NO: 5258 - DNA, 931 bp, Homo sapiens; identical to SEQ ID NO: 5257

SEQ ID NO: 5259 - DNA, 931 bp, Homo sapiens; identical to SEQ ID NO: 5257

SEQ ID NO: 5260 - DNA, 1062 bp, Homo sapiens
tccacctcagcctcccgagtagctgggaccataggcacacaccaccatgcctcgctaatttttgtattttttgtagagacagggtctcgccatgttgcccaagctggtctcgaactcctgggctcaagcaatcctcccacctcagcctcccaaagtgctgggattataggcatgcatcaacatgcccagcctgttttttgttttaatctgttattgagtaaggtgcaatttgtggctccatatacagggacaggttgcaaaacaggtactgagccgtgtgtatccttcaggtccaagcagcttctaaactgtgtctatctctgttcaggtccctggaactctcctgggcagcaagctcacaagagaccgacctctgtggccttcgaagcgggttgctgttagacacaccttttagaagctacattcatagtatctcaaaagacagacataaggggtactcggtatggccaccactcactcccacaacacagccaccatttcccacccagaatttcctgtgaaatgtgctcattttaaaacagcacacatcctgagaattgcaaagttgggcatagagatcaatacaaattagacttctttttagatacgctctacgctctgcagagccctctggggtctccaagggctgggacctgctggataaaactggatgaaactaagttgctgcttctttggtgcccttgaatggactttcttggctgcagtgacgttaggtccgcttcctagccgcgtgctgctctgccatcggggatgctaaagtcggggagggccaggaagcctttctttgcttggaagtttttgtttctccttcgcctgctaggttgggataatccgttgggaagtctctgagcgtctttaaacataaaatctagtttcaaaggtttaaattcccaagttgccccctaagttacatgttgcttaggcttggttgctatctgtatggtataaataattccatttagaaattaagaaattatgggctgcatttttgatgccagtggctctgtagtatcccccaaccaccaaaaaaaaaaaaaaaag

SEQ ID NO: 5261 - DNA, 1062 bp, Homo sapiens; identical to SEQ ID NO: 5260

SEQ ID NO: 5262 - DNA, 124 bp, Homo sapiens
atggagtctcactctgtcacccaggctggagtgcagtggcgtgatctcggctcactgcaacctccgcctcccaggttcacgcaattctcctgcctcagcctcccaagtagcttggactacaggc

SEQ ID NO: 5263 - DNA, 512 bp, Homo sapiens
gtctttggacatgctgtcttgtgtggctgagacgtagatcaagagaaatttgtaagaaagacaataaggtacaaaaatcgccgaagctaatgtcaagatggagataaatagatctatatttgccatatatggtagtaaaagaaaagtctgtgcaaatttgctcgacatttatggacttctatgattcatctaccagggccagcagctccagccaagagatatagaatgtcttcaactgtatttctttcctaaattgtttcattacaaagaagccatgttgtgtattcagaagaaaattccaggaccgcatgaaagtcactatttgggaacaggcctgagaaagcttgcttagaggaattccaaaagtattcaaaaggcagttattgaccaaacacataataattctctaagcatcaacaattttccatagatccaagctcacatatacagcgtattttctgtggctagtcactccagaaatagagggttctctgctttcttgactgattgac

SEQ ID NO: 5264 - DNA, 512 bp, Homo sapiens; identical to SEQ ID NO: 5263

SEQ ID NO: 5265 - DNA, 128 bp, Homo sapiens
tgggatggagtctcactctgtcacccaggctggagtgcagtggcgtgatctcggctcactgcaacctccgcctcccaggttcacgcaattctcctgcctcagcctcccaagtagcttggactacaggc

SEQ ID NO: 5266 - DNA, 5823 bp, Homo sapiens
ttgacataaataaggtagtagtttaaagggaaagtaatgattagcaaaacttatgaagacaggagcgatcaacgcacattaaatagtgtgtaaattacctaatcctaggcttgctgaatcttcagacacgtatatacataatatatttttgtgtcacaaaccagtcactctgtgttttctatatgaagagaaaataggtttgtgttaagaaatgatctctgaatgttcaagaaaataatactatgggcttgcttacatgggtggaagagcaaagaactcctcaaatcataaatgacaggactaagttatttggacgagaaaacaaacaaactcaaaatgacatttatgagagcttatgaagtgaatggatgatttggttgtgattctgtaaaggtaatgaattggaaagacagtgtttcctcttctgcatgtctaaggtacacagcaagcaggagcagattcctcctcataagcattcactccactcagagccatgtagccagcacttcgtcctgagttttatctctcagttttaaccacatatttttttgctagttggctttttttaatatttgaaaaattatatattattttttcccattgaatttttgaaatgttttcattaagttgaggtataacatatatatatgttatatatatatgttatatatatatgttttatatatgttatatatatgttttatatatatgttatatatatatatgttttatatatatgttatatatatatgttttatatatatatatgttatatatatatgttttatatatatatatatatatttttttttttttttttgagacagagtcttgctctgtcgcccaggctggagcacagtggtgcaatctcagttcactgcaagctttacctcctgggttcaaatgattctcctgccacagcctctagagtagctgggactacaggcatatgccaccacacctggctaattttggtatttttagcagagatggggtttcaccatgttggccaggctggtctgaaactcctcctggcctcaagtgatctgctcacctcagcctcccaaagtgctgggattacaggtgtgagccaccgagcccagctgaggtataacattattgatatggtttggctctgtgtccccacccaaatcttatcttgaattgtattcccataattcccacatgttatgggagggacccagtgagagataatttgaatcatgagggcggtttcctccatactgttctcatggtagtgaatatgtctcatgagatctgatggttttatcagatctttctgcttttgcatcttcctcattttctcttgccaccaccatgtaagaagggccttttgcctcccgccatgattctgaggcctccccagccatgtggaactgtaagtccaattaaacctctttttcttcccagtcttgggtatgtctttatcagcagtgtgaaaatggactaatacaataaattggtaccgagagtggggtgtttctgaaaagatacctgaaaatgtggaaacaactttggaactgggtatcaggcagaagttgaaagagtgtggaaggctcagaagaagacaggaaaatgtgggaaagtttggaacctcctagaaacttgttgattggctttgaaaaaaaaaaatgctgatagtgatatgaataataaagtccaggttgaggttgtctcagatggacatgaggaacttcttgggaacaggagcaaaggtgactcttgttatgttttagcaaagagactggtggcattttgcccctgcccttgaaaggatgatttagggtatctggcagaagaaatttctaagcagcaaacagagcattcaagaggtgacttgggtgctgttaaaggcattccattttaaaaaggaaacagagcataaaagttcagaaaatttgcagcctgacgatgcagtagaaaagaaaaacacattttctgaggagaaattcaagctggctgaagaaatttgcataagtgtcaaggagccaaatggtaatccccaagacaatggggaaaatgtctccaggacatgtcataggtcttcacagcagtccctcctatcatagacctggaagtctaggaggaaaaactggtttcatgggccaggcccagggtccttatctgtttgcagcctaggcacttggtgccctgtgtcgtaggcagaaggggcttgccttgtctcatatgagactttggactatggacttttgggttaatgctgaaatgagttaagactttgggggactgttgggaaggcatgactggttttgaaatgtgaggacatgagatttggaggagcaagaggtggaatgatatggtttggctgtgtccccacccaaatctcatcttgaattgtattcccataattgccacatgttataggagggacccggtgggagataatttgaatcatggggggcagtttcccccatactgttcttgtggtagtgtataagtctcacaagatctgaaggttttatcaggggtttccgcttttgcatcttcctcattttctcttgtcaccaccatgtaagaagggcctttatcctcccaccatgatcctgaggccttcccacacatgtggaactggactacgtccaattaaacctctttttcttcccagtctcgggtatgtctttatcagcagtgtgaaaatggactaatacatatatatataaagtaaaattgactattttcagtgaataggtctttgagctttgacaaatgcctccaagttgttataaccaccaccacactcaacatatagagcagaccaggtgttgtggctcatgcctgtaatcccagcactttgggaggctgaggtgggtggatgtcttgggcccaggagtttgagaccagcctgggcaacacagtgagacaccattcctaccaaaaatacaaaaattagctgggcatggtggcacacatctgtagttccagctacttgggaagctgagatgggaggatcacttgagcccaagaggcagaggttgcagtgagccaaggttgtgccactgcactccagcctaggtaatagagcaggactctgtctcaaaaaaaaaaaaagatataaaacagtttcctcactcccaaaatttccctattcctcttgttagcagcttctactcctactcccaaactctagcaaaccactgatttgttttttgtacctatagttttgctaaaatatcatacaaatgaaatcaaacagcatgtagcctttttagtatggcttctttcacttgttataaaataataaaaattcatttatgttgctatgtgttttaatagttcattgctttctatttctgaatagtcttgcattgtatggatgtcctacggttgtttatccattagccagttgaagaacatttggttgttgccagtttgggtgattataaacccactctaaacattcatattcaagtttttgtatgagcatttaagttttcatttctttgatgtaaaatcctaggaatgggatcgtgggctctatatgataagtttattttaactttataattaaccaccaaatttttccaaagtgaaatattatcttgtactgccattgacaatgtatgagagtccttactgctccacatctttgttagtacttagtattgtcagtttttgttttgcttttagacattttaatagatgtctggtattaactcatttgcactttcttaatgactaataatgttgaatatgtgcttatttaccatccatacgtcttcttttataaaatatctattcaactcttttgaccatttttaactgtattgtttttcttattgttgagttttgagagtttggatatgtcctagatatgagtcctttgtcagaaatgtgttttgtaaatattttctgccaggctgtagcttgcattttcagtctcttaacagtgtctttcacagaacaaaagtttttaatttttctgaagtccagttttacctatttttatttatgcttttaatgtcatatctaagaaatatttgcctaacatagggtcacaactatttaccctatgttttcttctggaagtttcataggtttgtgttttatatttagacctatgatccatttttagttcatttttatagaaagaacaaggtgtgagtcaagatttactttttgtatatcaatgtccaatcatttcagatcaatattgaaaagactatactgtctttactgaattacctttgaccatgtatgtataagtctatttctagactctctattctgcccccatttatctatgtgtctgttctttcatcaatgtgacactgtcttgattacttaggtaagtcctggaatgcaatattctgagttctttaactttgttcttctttgtctgctttggctattctagtgcctctgactttccatatacattttacaaacagtttattgatatttattttaaaaatcctaaaggagttttgatttggatttgtggaatctctgtatcagtttgttcagaattgatatctcaacaatatttagtctttgtgttaataaacacagtatatgtctctatttaggtctcctttgattttttcaagagtgcttgtagttttaagcatatgagtggttcacattgatagtatctaagaatttcatgtttgtggtgttactgtaaatgacacagtgttttaatgtttgtcttcagttgcccattgctagtatacaaatttgtatattgtctttgtatcctgcaatctttctaaaactcactcatgagttctagtagctttgtagtagtttcctgaagattttaagtctaaaatgttaaggaaaaaatacattttaaaccaagaataaaaattctattgcatattttaaaatcaggattgcaaggacaaagattgtctctgattatgcagttctatttacaggatgatataggtggcttagcgggccaagctttgactctcaaacatgtgggtgttgaatccttatccacttgctgctgcatgtgatctgagatgccttgactacgttatgggcttttccatcaaagtctatgctttaacaacagaaagcatcttccagacatatcatagggatgagcaagtacaattcatgtgaaatcattcagagatataaagttcaggataataatactagtgtcgtccagaaaaatcaggaagtcttctcttgtagagcacatgacctgtcatgatatagcccgtagcaggattcgtccatacatacccccaaaggcattaccacatcaccgtggaataaggctgcaatactagacaccacagtgctcctgataagggcccggcttgtataaaaatggttagagtggcaggaagttgttataactggaataattcttatggcagctatgtctccaaaaatattacgaagcaagaaaaacatttggctggaggtgtgcgaactgagattctcagggcgtaggagctgtgtgtagaacagaggccaaaggagtagtcatacccggggtggatcaaaggaagaagcagaggaggtagacagatggaggtggcttggctacaaagaagtgtggagtttctttcccttcctcttgagatccaccaagacacagatttccagctttgcaaaagcagaaagcaggcagaaggaagatctccagtccgcggggaacggcagcacttttaaaactttgagattgatgagtggttaattagaccctcagccactcctatggtaagtcatgatggatgccaagacagcagtaaggggttgtgattttctttgttttcttccttgtgcaccaaagacacagagatggagctggtctcttgt

SEQ ID NO: 5267 - DNA, 355 bp, Homo sapiens
gagccaccacccagccttttcattgattctttaattgacagttaatagacatactcatgtcccttatatctaaagttataaccaaagcttttaacttcttctcggattgtccttatctagtaatgaactagtcaggaccccaacaatgagcaggtggcaggctcaaggccatttacagaggatttgtttctaacagtgctcattgcaaaggtgcaggcaggacagggggtggccacgaggaacggtgcacagtgcaagagcccagggcttgtagtggcacagctgtcactaccatgagcccaaagggacaggccaaggaagagagtgccagagcccaggaggagagaggagcctc

SEQ ID NO: 5268 - DNA, 36192 bp, Homo sapiens
cttcctcagttcccttaaagcacagcccagggaaacctcctcacagttttcatccagccacgggccagcatgtctgggggcaaatacgtagactcggaggtaggcatccgtgggggggcgccggctcgggcgtgcggggagtgtccgcttctgctatctgcctctccaaatatcccgactgctgccctggccccagccctctctccacttcggagcactcctctggcgttggcaccgctgaggaatgggcctgggcggggaggtgaagagaagccaggaatgttttatgttttcctaatggagagggggcctagggagcccctgagctaggaggacacggaaaaggggattggggtcctgagattgggtctgttgggcccaggacgcgttttctggatgggtctaggatgctcccttgtcgcgggacccccgcggtccggccctgcctgctgggggttcgaagaggtggagtgcagggtggaggtgttatttacccgagtcctggggacagtccccgggactctccgccaggcgcccagaccggcaggtcccgcaggcggcgcgcggtgtgtttgcactttccaaagttcttgaaccatctcaagaactccttctgcatcttggcgtctggcaggggtgttccgagagaggtagacctcccctccccaaactgccaccatcacttccaacgccctccacgcgctggagctctgcccgggtgtggaaacctcgtcttccaacacgtagctgcccttcagccacccgcccgcagcctgggagtgccctgagggtgggtcgggggagctgcgcaggtgagactgagttctaggacatttagggggtctggtgcctggctccgccaaaaatggggactttcgggattgtgatcatcacggcggattgagcagggagagccgtggagggacaagagagggccgaggcagggtggggggcgcgggcaggtgcgagggggatgcggccaagaagcagcgataaagggaacattccacgggtcgggcggctgctgttggatcttagataaagctggaagggattaccggggcaggggtaatagggaccggggacgggaacgcgaaacaggtgaagcgctcagggcgagagcgactcggcttagggagtccgggagaagcctgcggctgccccctcgccgccgaggtcctgcgggtcctgcgggtcctgcgtgctgagccggggcgtgcgcgggcgggggccttcggaccgcgcggcggggcctgccctgacccctggcggcgggcgggggaggcaggcgcgccctgcagagtacagaggggtgtggtgtcctctgcgagatcctcttaaaaagctggctacgcgcaggcggtttctgtgcacggagccgtagctgtcggagcggttagttcgatttcgagctcgaggtttcccccgccgccaggctgacttctcatcgcttgtttttctttttgcatttttcctcccaccgccgttgccgccctccccgtcctggccgtccgccctccgccctctgcagggacatctctacaccgttcccatccgggaacagggcaacatctacaagcccaacaacaaggccatggcagacgagctgagcgagaagcaagtgtacgacgcgcacaccaaggagatcgacctggtcaaccgcgaccctaaacacctcaacgatgacgtggtcaaggtaagccaaggcgaccaacagggaagggctgggacagctctcctctggcagttagcccgtgcatccttctttagcattgccgtgtacgcacaccccaccccgccccctacacgcgcacacacacacacacacagagttttgtgggtttgatgtgtgggagctcccgcagtcggcagaaacgttacatctcccttcccccatctccccccaatagttagttcagctgaaattcagctaaagtgagttttgtagaagttcctataactacacttttatcctagcaaatgagcctattgacctcagcaacagacggcccatactccttgggacggtgagatggttcctatccattcccaggttgaaagtctagtgacaggtccccactgcacgtggcattaagacagtcagataattgtgtcaggtcttgtgctgaggatgagtcagaatacaagatgggcatgttcccccaactaaaacgatgggaagtgattttcttaaaaatactacagtggatggaaatgcctaggactaaagacaaagaaaatacgtacttattcatatacatatgaaagttactttaactagactaacaagtcacttgtgcacaactaagcaaatttacaaaaccaaaaacaatgtatgcctcttggtttcttctatctatggacacctgcacttagatgtggaaagctgcttctttagtagctacctgggtcagcctgccctgagctaatggcacattcaggttggagttccttttcatactttcaggatgtgcttggtgagattaaaaataattggactgggttattggccagacttagatctgactcagtggtcagttttaaattatcattgttattagattttgacccttttagccaatctagtgggaggaatttattgcctaaacacatctggattgggatatcatgggctagagccatccttggcaaagggttttctctgagaaatggagggctaaggaaaaatcctggctcagggactgcagtgtgaagatctactcctatacaacccccagcaatcaatgaggcggatgagcaatttccacccaccacgcctgctatctatggatgggaggagctatagttcacaaaccgtttacattcatgaataatatatttcaaaaggggaaacagtttaatctgtaactggaagggaaaaaaaaactgtcagaattgactcccttggcttcctggagtaggaaaaaggaaaattggagcatttgcagctttttttgactagctggattatggaatatttaaaagcaacagcaacaaaagtaccttataaactagaaaatagaattgctaaaaaactatttactaaaaacattaccttaaagggagaggatatttgtgttttcccccacccccacccttctcatgtggctttgaacaagaaggagagttgccaggaaaagaggcagatttcagagagggctggcttcactggatcctccctgttgttccactgcactgtgagtgagattccctggagcaagcgaatctcccgggatgagtcagagaggccaacagtgtggatgtgggtctccacacatagcatgactaagttgagaaagaaaggccccactgggaaaagagacttcaacacagatggaaaaaaaacataacaggcttggaggaaatagcagtttacaaaacagcatttcaaagagcaagtgtggggatcctcaaattaaagaaattaaaagaaaaagctagagcaagctcctgctagcctaaagaaaccaaaccctgactacttgctcatagaactgtgagcaaaacaagacagtcaaaccaaaaaatccacctagaaaagaatttggcagtctcactcagatgcctggcctagaggggacttcagagaatgccctacagagagacaccaagactacaaatgcaaattctgcccaaagagtgcctggccgatgaacagggtcctatctacatcttatggagactcctattttataaatatgtatcctcaagtccaagcacaaacaaaataacagaaacagggatgattctctcccagtttccatgacagtaaataataaatttccctaaattttactttcaacaacatagactttttttatttttatttttatttatttatttatttattttttgagacggagtctcactctgtcacccaggctggagtgcagtggcatgatctgggatcactgcaacctccacctcccaggttcaagcaattcttctgtctcagcctcctgagtagctgggactacaagtgcacgccaccatgccgggttaatatttgtatttttagtggagacggggtttcaccatgttggccaggctggtcttgaactcctgacctcaagtgatccactggtcttggcctcccaaagtgttgggattacagatgtgagccactacacctggccaacaacacagacttcttaaaaaaatcatgacaataattttgggtgcttcttaaaagcacccaaagctttactgctaatgcatggtagcttaaaacttcacataataagaaagaaccagtggccaatggaatctactgttaaaggtacccaatcaagtaaggaaaagttggtcctaaaagcaagcagccctgtaaaagctgctctgtccaatatggtaatcactagccatttgtgtttccatttaaatttcaagtaattaatatcaagtaaaatttaaaattcagttccttagtcacactagccacgttgtgagtgtgcaacaggtaaagctagtggcacagacatagaacatttccatcagcacagaaatctctattggacagtgccagattagggtgttctctgcattgtaaaagcatccccttgccaagttaaagaaaacaacaacaaaactctagagaagaaatgaaaccccagtttcatttctggagaggaaagaaaactcatgtgtggcatgagtttatattcaagaaggtgcagcattattacctattttactagtaataatgacacacattatagtatacaatccagttccaataaaattaatttctcatcttactaaaagcttgctgctccacattatgagacaatttacccaaatatagacatttacccaaaaatattaagtagcttgtgaatactttttaaaatttcctttaattaaagtggtcacaaactcaaacccttcattctccctctgagatttctgtgtcatcttttgttcacattgttattcacatgtttattatgtacttattttgattttctagataaataaaatggcttcaaatctataattctgataaaattagccatcaattaatttatttattaaacccatgcaatatgctagattagatgctttgctatgtaattcctacaataaatcctagcaatcacaaagattacagttagtgagacgacatgcacacaggtaaaaagtgtttttaaaaaatacatacatacaaccaaaacagtaagtcactgctacatggaaactgattggtcctttttcctttttttttttttgccttgactgccaggaagcagtttcaaatctatagctggattttaagtttcattaattcatgttcccacatatggttctgtattttcacttcccccttttaactgacatactgtcttatgtgatctctactgtaagccttctcatcattttggaaacagaccaaatataatatatatgataaggaatcaaaagtaaatacagtagtgttgaatattgcataacaaaaaggtttttaaatagggaatggtatcaatatgaagtgttagggagacccagccatgaaaaggatagcagggtcagagaaggaggatgtattgcagctggtttaatggagaatggtatgaaggaggtgcagtttgaattgggtcatggaggacagatggattgcaaatagctggggcaaaagcacaggaaggcattctaaacgagccaggcatggagacaagaatgtctcccacaagggagttgtagtagctcaatcagactgggatttgagatttcatgtggcagagtggtaggtgataaaggtgaaaagactgatcatagtaaaatgcggagtctgtaaatccagcactcatgataagtttggacatcatgtcaacagtggacagccataaatgactgcaagcatcggtgtggtataatgaaggtgacgtttttgtaaaatgactctggtgaaggtacagaaggtaatgaaaagtagccagtctagttgagcagaaaagagttcagatgtaattgcatcatggtccagatgtgaaatgaagacaatgcgaagtggcattgtggatcgaaacatacatgcacaaaatgacagaattttagaatttgaagggatcatcatggttaccaggctggcctccaattcctcttttgtaatattaatagaaattaagggctaacaagtttaaaatgttatccatctttttacatagttactgcccaaagtgaatattttgaaatgtatcattaaagaagaatagataagattatgtgattcaccatggactattgtcatgagaggaaaaatgtgtttagatgattctgttagcactgagacaaatcaggatatctgaaaggaggtctttgttgaaaaacagaaatatgcattcataacttgcttttctaaaattggaatgtaatgattcttaaatatgcacagacacaaatttttctttaacagtcaagaaaatgcacgcaggtgataatcagatcagttttggttatagtacaaaggtttaatgcctccgtgatccctttcaacttgaaagcattctagagcaattggtgattaatatcagtataacagtcatttataaaattattatttatttgatatacatctaatcaaagcataagatttatttttattattattattatactttaagttttagggtacatgtgcacaatgtgcaggttagttacatatgtatacatgtgccatgctggtgcgctgcacccactaactcgttgtctagcattaggtttaaaagatcagattgtctcggcaccatgttaatatctttttctgttggcattagtattagttttgcttgtgtatttgtttaggagatagcttcacaagttggtgattgatattctaccatgtatgaagtcatgcgtggaattcagaatccccagcttgtaaaattgcattatgatcatctttagtgggaaattgttctcagaatactgagcaaaggatgataccaaaatggcagctattattcattcttaagcatatgaaatgctttcaggttcaacccaaaattacatacattttaaatgcttactaaaagagtcttttccctcctccatctattaactgcaatcaaaaaacttcggttttaactgaacatgatttcatattatttattaaaatttaaggcaaggtgcaccaagtacccttgaattatgaaaagcttcatgatgtgggatattctttcagttaacggcagggttggctacacttttaaggggttcaaagtaggaacagctgcaatagtgagctgcatctggaaagtccagtaatttgaaaaaccacctgtttatgtatcctgcccactcaagtccataaaataacagacactttcatattccaaatgaaactgctttttagtttgccctacttttaaacataactctttgtgatggaatgaccagaaacagctggtctctaagaggacagggctatgtgcgctcacctgcggggttggaccttccataatccccctggctgtggggaaagttgagggctgctgtctttatacaaagatggtttattccaagatacacacactcttcttccacaccctggagaccttgcatatttagtatcttctttaccataatctgaggccctagagaaaaagatttgcaaactatacttgttttaaaacaactttctaaaaaagacactctcagcccctagaaattatgcctaacacatagatgctcagaggcaacctgttgtagtgcaagaggattgtgccaagattagaaaacaaatatttgcaacttttgtaactgtcttctctaaaacttgaatgtggtgattctaaagtaaagaccgacacaaaattctttttctttagcagtcaggaaaaggcatgcatgaagtaatcagatcaggtgtggtttcagcataatggcctaatgctttcatgatctctttcaactggaaagcgttctagtcccactggacaccaaggaggaagaagggacggaaaatattaggcccataggtttatcttcctcagtagtccacgagatttgagcttatatgtagggagcaaaattgtttgtctaaaagcagttaataaatgccccaaaaaggctgggcgcagtgactcactcctgtaatcccagcactttgggagctcaagattggtggatcatgaggttaggagagcaagatcatcctggccaacacggtgaaaccccatctctatgaaaaatacaaaaattagctgggtgtggtagcgcgtgtttaatcccagctactggggaagctgaggcaggagaatggcttgaacccaggaggccaagattgcagtgagccaagattgcgccactgcactccagcctggtgacacagcgagactccgtctcaaaaaataaaataaataaaataaaataaaataaaataaaataaaataaaataaaataaaataaaataaaataaaaataaaatgaacgccccaaaaatattttgggcaaactattttgtgtttcttttctttatttatttatttcttttgagacaaaatcttgctctgttgccccggctggagtgcaatggcacaatcttggctcactgtatcctcaacctcctgggctcaagcaactcctgagtaactgggaccacagggatgtgccacaattcccggctaattgttttagccaggatataaatgctgcctacatagagtttgtagctatctccttgactttctttatgcagattccttcacaaacttttgatggattcctttaccaaattctactgtctgttaaaatcttctatctttatatctttagtccaaacaacacgtcatttataaaccttaaaattgtttctgggcaaataaacaaggcaaaataggaatatatatttttaggcaatttacttctgttttggtctcataaaaaattgtaattaaattgtagaaaatatttcaattcctctttaatatcctctcctcacatactggctctcaacttctaatcctcctattgaaacattgattgggaggccaaggcaggcggatcaactgaggtcaggagtttgagaccagcctggccaacatggtgaaaccctgtctctactaaaaatacaaaagattagctgggcatggtggcatgcacctgtagtcccagctactttggtggctgaggcacgagaatcgctttaacccgggaggcagaagttacagtgtgccaagatcaagccactgaactccagcctgggcgacagagtgagactccatcacaaaaaaataaaaataaaaattgaaatttgcagcctttttaaaaccccatagcctctttataaacccaaaagcactatcaaatttggcgaggtgtcaaaagaatcagaggaatgtttacaaatacagatgcctgggcccacctcagatatatatatatatatatatatatatatatatattttttttttttttttttttttgagacgatgtcttgctctgtcacccaggctggagtgcagtggcatgatctcagctcactgcaagctccgtctcccgggttcacgccattctcctgcctcagcctcccaagtagctgggactacaggcgcccgccaccacggctggctaattttttctattttttagtagagacagggtgtcaccgtgttagccaggatggtctcaatctcctgaccttgtgatccgctcgcctcggcctctcaaagtgctgggattacaggcgtgagccactgcacccggcccagatatattaaattagaatatctagaggtggagcctgagtatctgtatttttcagagtttcaaatgatcgttcttcaaatgattacactgtgaagtcagatttagaaatgactgtacccaaggttggctaaaagatacacaccctggttgattctacctgaagagagcaaataagatacacagcaaagttgtagatgttttccctgccagtagaatacttgcgggttaggccatttaaaaccctgccagagagttttgaaacactgtggagggctcccaaatcaacttgctcaatggttctccatcccttcaggctacttgggcttaaagccaactgcaagcttagagcctcagagtgacctaggaatggggtgaccatatattctaggttgtctcatacagactagccagcactactcagccgcaagtaatagcatccaggcatgctcagaagtgtcccatttggaggaaaaaaacaatattgtcacaaatgaattggcaatggcctgtctctgattcttatacctggaatatactggaagtccctactcatgctattttctagcagaataggcaaaatttctacattccaggcatgtcaggcctttccctgattcctttctctaatgtcactcgtctgctgtcttttatcacagccattaaactgcaccctaacttaaagaggatcccttatgttccaatctactcatccctcagatctttctttctctgaaacacagggttaatgagactgacatccttccatcacatattttctcagctactcagtaaaagatgtaaatgtttaaaatagtttaaactatttttcagttagtccaggaaacataaaatggcatgcttgcacataaaccattgtttagggtgggggaagtgtttttaattttgccttaaaggaaatctgcatgatccacaggctatgcaactaccaagggaattagttggtagaacagaattacacctgcacagaatacaaatttcctgcctttcatgggaactatgttgatgtttcagatatgaaatacatcttgttttctttattgaacctcgagaagatgtctcttgttggtcattatttcatggcaggggaagtacatattcctaaagacacaaccgagtttccctttaaccatcattagttgggctggccattaagaaccagacgcttttattttcaaagagacttaagttttgatgttgtacatatgtgcctaatattctatctcatagcaatttaaaggtgacgttttaaaaagctgcattcagtgtataaacttctcctgatcccagcaaggatgttgtgatgattttatttaaaaaggtaagttgtgtctagatatggcagtgggtcatctcatgcatggtgcagatgtcaaacacaattacattttcttatttgcaatgactaaaaaaagaagctgagcccaagcagtgagaaagtaggagattgggaggacaagaagcaaaggaaaaaagtaacatgagcaccgttctccctgtcctgccacttgctccattatggactgggctgcgatatctcatatcccagctccacaactcccaacaaccatttatgtgcatggtgcttccatgtgtgatgacccaatcaggctcaggtgtggactgagtagttaaattataacccttgtctctgaagagtttagggcttagtggggaaacagacatgtaaacaaacctgagtgaggtcatgtaatcaaaggacaggccacagtcaaccacaaagaagagagttctcagcagtctccaaagccgaacatatgtttaccaggaacagggtcccagcagagggagcaacaggagcaaccagagccttgaggggtcgtggcctgttctgggcaccagcagtggatcaatgtggccagagccagggatactagcagaagccagagcagcagggccttccttgtccagcaaaggcatttgtctctttgtaggccacagcgacccacagagggctttttaggccagaaaaaagccattaaggccgggcgcggtggctcacgcctgtaatcccagcactttgggaggccgaggcgggtggatcacgaggtcaggagatcgagaccatcctggctaacaaggtgaaaccccgtctctactaaaaatacaaaaaattagccgggcgcggtggcgggcgcctgtagtcccagctactcgggaggctgaggcaggagaatggcgtgaacccaggaagcggagcttgcagtgagccgagattgcgccattgcagtccgcagtccggcctgggcaacagagcgagactccgtctcaaaaaaaaaaaaaaaaaaaaaaagccattaaaaagggagtcatgtctcttgttggtcattatttcatggcaggggaactacatattcttaaagacacaaccatttcctcttaatcctcattagctgtgctggcaattaaaaaaccaaaagtttttactttcaagaagatttaaataacttctgagggtgtacatatgtgcttaatattctgtctcacagtaatttaaaagtgaagttttgaaaagctgcatcctgcgcttgtcagaaccatgtctgatgagatatcccctttaaagggctctcggtgcaatggggcaaatcaagggggtttgtgcaagtgggagtgagacaggagatggggtgcttcttccagcactccctataggctgactgagtgacaaagatcattttactgacacctccaatggccctatgagatgggtactattattattatcaccatcatattccttttgcagataaggaaactcaggcttagcagattgccagaacaacacaggcaggaagtggtagagtcagggtttgaacccaggtagtgaaactccaaagcccggattcttaaccactgtcctccagtgcctctctgtaataagtcatgatcccagaagccattggtgtggccacaatatggaaagagatgacagtgtcctcacactgggtgagcagcttatggtgattccagacatgatctctgttgggagtgacaggtctgagcttctaggatcagaccctagatcttggcaagtggtttgaggaaagagaaggaccaatgtaaaaccccaggcttcaaggaatgtggatgctgggcagggaggattaagccccaaagaccagaaatggggtacacagggcaggtgtggccagagtagaactagagtagaacttccagtgactagaaatagaaccagacacgttgcagtggtggataaggtagaatcgcttaagtctttaaagtgcccctgatcacccaagttggccagagaccctggggtggggctgattctgtctggatatacggggaggggtaagcatgaggaaaggaagcaggtcctgacaggtactttgcactaaacagctccttataaggttctcaatttgcctgctcaatttctacagacatttgtgggaccacaccagtacattgtaaaagcaggaaacaattgagaaaaacctgagttttatgttggtaggagaaatgcctatggaatatggcaaatcgtttctctgagacttcctccctagtaattacatatttgttctcaaaaacaaatgccagaaggaagaagcagatttaatagtgcattttacaaggcaccattaatctctaagaagaacaattaaaatgtctcagcaatcatggttcactgtatatcttttctatcttcttagaagtaatatatggctggaaatgggcataccaaaatatgtcaaggaagtggaattgcgttcattagatttcaccactaattattttagttagcttcacagatctctcttccttgcttgttcttgagagcgaggctttttagtaggaagagaaattgtctaaaacgattaataaccacaaattcaccaaactattttgggtaagtccctctatttctctaggtctaaagctaggaataagagtcattctcatataatgtactgtcccagaaagggcattatattagtctgttttcacgctgctgataaagacatatccgggattgggtgatgtatttaaaaaaagaggtttaatggactcacagttccacatgcctggggaggcttcacaatcatggaggaaggtgaaaggcacatcttacatggtggcagacaagacagaattgagagccaatcaaaaggggaaaccccttataaaagcatcagatttcgtgggacttatcactaccacaagaacagtatgggggaaccgccaccatgattcaattatctcccacaaaatgggaaaattatgggaactacaattcaagatgagatttgggtggggacacagccaaaccatatcaggcattcaaccaatatttgggaagcaccagccctgcaccaggcacggagcacgtcatgagtcctgccgtaccacagcctgcctgacagacctcagtcatcctctggagcttgcctctgacatctggacctcctcagaatcagcatctcttctccttgcccccgccatcctttgtttttatctctgctgtggcattcatcaaagccttccaactatcctgcgtcactgtccttcagtgtcctctctcctctcccttccttctcaccccactttgtgcctgtatccttcaagcagagcaatggcaccctcacttctgtggctgcccagtgccccatgcagagtcagacatcagaaaatagatgctgaattcagttgacactctgaaattctttttaaagtaagttaatgtgtgctttgaatgaaaagacactgggattacattattgagtgtctttcttcctttgccacttttgtccctattggccatatttgaaaatcttgttggaaaaaaaaattcaagaacttaataaataaattcaaaaacatttagtctatttacttaggtgaagagaaaactcattctaatatgtgtgtatatttaaaatatttgttatttagactttttttttaagtctccaggttgaggaggacacaaatatatcctcctaaaccttccagtaagcaagctgtggcatccagatgatctcctgggtcatgggggataaggctaatctcctaggtgtctggcagacaggacaggcaaattcccagaatgccaaaatataccatctgctgctgtttggcattgcccttaagtccagagtgtggaggctgggggtgggtctctggctacaggagaagtcccctggcaagggaggggtgaaaggagtgcctgttgaaccccccatctatccccgcactatggcaagattgagaggaatgactagatcagggaatggcccgaaagaaaaatccaaaacctcccaaccctggacaaggccacagctttgagaaaccgaagcctctgcttccttctctttggctttactgcttctagatgcaaatacacagagctctgagattttgtgtgctgggaggtgataactgttaaccctctattccaatagcacagaaatttctctttgcctcagaagtggtttctcatagatctcagatctcttttcaggaaaaagaaaaacaacaacaataacaacacattaatgactctgaaagagtcagacaccattaattccattattggtgtctgtgccaagtgaaatgaacgtcagctcttttcccagatatgtttccttcttttgcctcctataataagagatgattttactgtaataatataagactcatcaatttgactccaaatagctttcctatcaacaggctaagtgtaaaataccaggatcattattcagttgagaatagatagaactaggaagtagccatcaaaaaagaatgatgaggtgcattgtggatttggggtgtaacttggtatctaacatacagccagaatcacagtcatagcacacttaatattttatcagaaacttgcgtgaacaagttaagaggactctcaacttaaaaatgacaccaattgcaatgatcttgttaacatttgtgatgaaaataatagcaaagtgacttagacaaattacaatagcccataaaaataagataaagtttaacacaaagtaagatgatgttaaaagacttgaaataaaacagatatgttaagtaggcaacacataggtaagcatataaaaacaagaagataccaggatagagctgtcatttttgtgggagcctgtgatgtggaaaaccaagatgcctggtgagtataatggatatggaaaccccccttgtaataattccacagttccaaggggccaaggtctccaggttgagtcactattgtaaacacacccatagatgaatccacatgccatacctccttgagtaagtggggactcaaactaggtctgtcaattgttccagaaaattaagcatctaaataatttaatgataatttaaaagaagcacaatgaaatatttcaaggaatgtcacatacaagattctgtacctcttctgctttggttagactcattcagaataggttcctgctttgatcttaagagggaggtagagattctggagaagccctagggaagagcaaaaggaaaggaataaggagccaagaggaaacccagggtaaggctgaggagggactgtttcgtgtaggtgatttattggaagggttggaaggaaacatggaatgacaattacctttggttattgtcaggttagtatgagacttacaagaaaagcactgctcagacgcaattaccattcaagataagaaataataggaaaggctagcacacttagctttttatttaaaaaagtgttaggtaggctgagcacggtggctcactcctgtaatcccagcactttgggaggccaaggtggatagatgacttgagcccagaagcttgagaccagcctggacaacatggtgaaacctcatgtctacaaaaaaatacaaaaattagccaggcatgatggcatgcacctgtagtctcagctacttggggggccaagaggtgggaagattgcttgagcccaggaagtcgaggctgcagtgagccatgattgtgccactgcatgacagcctgggcaaccgagtgagagcctgcctcaaaaaaaaaaaaaaaaaaagtgttaggtgacatgagagaagatcttccaagtaataagagtggctaatcccaggaatgtgtcaccagaggttattttgtaatagtcgtgtgttaaattccttatttgtctatataacttctcaaatccttctgcctctacagttatagtttaactggcgcataacagccttcacacacagcctcataattaaacatagacatacatatgaacactttcccctatgccagcaggatacttggtttgtttaggggcaaagaggaattgatgtggcgttgtttcaatcagtggttgaaaatgcaagtggtaaacattgaaaaatagaacactgcaaaaggcatgcattgtatataccaaaaggtcagcatgaagcattatctgtatggcaagcctgcccatccactccctcctacacgttgcatattcacacagttttgcagcttgtataaacccctattgtgatagaaactcatgaaagagtgtggtctctgcgaaagctggctgttctgtgaatttagaccagtggttcttcaccctggctgcaaatcatctggggaacatttaaaaacactgttttaaacaccccaaccctagaaattctgatttaattggtctgtggtggggcccagaactctgtattctttttttaaggctctcaggtgctgctaatgtatagctaaaattgggtctggtttagactctcagaatttcttaataattaaacactttatcatgacaagactttcaggaccttaaaggccacagtggggtagttatcatttcactaggtcctcatctggggaggtccttggcatttttactggaatatatttgtcactcaaatttctattacaaaaaattctttcttgcacactgctttagcaactacatgagatatactttgtacatagcacaaatctcatatcacttatgtaatccagctctgtggttccttcctttcctttgcctgtttatttttaattcttcccaagaggaagcttagccagttagaacaccagagtatcatccccctcccccttttcccacctgagttcatggcttagacatactaggaatgaagctgacaacatgcactagtttttttcgaaattatgcagcaaaattcccaaagtgcgagtggccacagagatcttcacagggcccagggacaggcagacatcattctttctccagttcctggcacagaaaagagaccttaggttactgagaagataccagtccctcctcagagcagacaaggaaactgagcctcagaatgaaagactgaatttcagtcctttcttgaacatggacctccagggttatattgggccttggaaaaggcacttacactctggactgtagtttcttcatctataaaatcaagaggcagaaacagacaatctctaagttgcctttatttataaaattccgagattctagttgaccagtattcatacaagagttgaagcctgtaagagtgcagaaagcccacacaaagagacagtggaagacctctcatcagtagtatttttattaccctcttcctaggttttaccagtcaacatcctcactgttaatatacagaccgtggtatttaattaaatcatctttgaaatactgagctatcaacagatggcatgctgaatgcaaaaggaccacaaataaatatttggtactgaagaagatcaagagttggagttcatttcccattctgatctgggctcagaactctgtggtcttccctctaatcatccttgccaccaaattggctgtatctgttctaagatggatcagaaaatcagttccaaagttggctacaaactttcaggtttgggttttgttttgtttttttgttttgttttgttttgtttttgcaaccagccaattcatcttagttcacatgacagagaagtgcataattacttgcaactttagttagagcagtggccttaagaaggtctagctaaataaaaagtgctcagactttctgagtgctgacagttgtcaaattcacctagttcacatggccccatttctatcgtttgttttgttttgtttttgttttttaacagcccatctgtgagcaataggatcagatgactaagagctacagggcagaaacactgttacttagagtcaaattttcccattacctagctgtaaagagtttgtttctctctgactcatataaagtttaccatttaggcccctgcatgattttaattccatcacttaacaccccagccatatgattctgaaggtaaacatgaaggcgtttgaattccagaccacctaaacattcttaaggaaatcatcatctccacgggcagagctatgccaaaatctgtaggttttaactcaaatttcatgataagcaaaaattgaattaatttgtcttccattttgttcacctttttgccaaaattatgcctggattagaataaataaattcaatcaatgaatgcaatcactaattcttacgccagataataacacattcagaattctcctttccctgggagattttatcaggttagtgttcttgtaaacaggagaaagagaaaaatataacttagtaaatagcagtattcactaattcattcatttattcaacaaatattaatttactacctactacattccagggagcttagagtctagtatcagaaataataaccacacacacacatacacacacactacattaaataaggatgtgataggctagatgaaataaataaataaataaaaggtccaggtgagaaaagaaggtgggggctagaaagaagtcattgaagaaaaaacatttaggttaaaacattatgaataacttagagtgagccaagtgcagagtgctgaaggagtgctccaggcaaaatcaacagcaaatggggagtccttgatgtagaaaagggtttgaggaattgtcctgggagaaatactcaagattccagtctgaattctagaggttagtgatttagagaggcaagtacgaaaatgacttcctctcttaccttaaaagtaagtgcaccatagaaggaaatcacccttccttggtaataattcctgagtgagcctgagaagccagaggccatctctattttataggcactgtccccttttcagttacccatggctagctcattgaccttgtcctggtcgtttcctcatttcacttactccatcctcaaaacgtagacgcttcataaatattgtataaatgaatgaactcacaaagtcacagtacagcaaggcaaaagtgcctgcaataaacaagcattctaggctagaaatatttctcaacttcaaattgtgtcttattacattgtattccgattttctagagtggtagttctcagtcaagggaaagtttttcttcccttccaggggatatttggcattgtctggagatagttttagttgtcacgatttgggggatgcttctggctcaacttgggtagagaagcggggatgcttataatcatcctacagtgcacaggacagtacccccacccacactccagtaatgaagaatcattagacctaaaatgttaatggtgtccaggtagaaaaaccctgttgtagaggttggggactgcgtcttgacagccacattatacagtgtatcaaacaattctgtataatgggctgtaattatccttgcctagattttgcaagaaccctagtgtgtatctttttcctcacttgccaagcaatgttcaaacctgcagagatttatttcattcattttctgtgtgtttagtaaacagactagaagcactggaggaaaaaatattccagcaatgaggtaagacgaaagctattagtaaccctagtttaacttagctgaatagtaggaaacaacctctaccgtgaggaagtgtattgtagaaactgaaaagacgctaatgatgtttaaaaagctgtagttcaaacaaatgtgcatgcagaccaatgggtagactgaaaatgatgaagacatttccgtttcttgtgtctttgatagaaaagaaagagcttttattttctttagtgtggcaatcattcagatttgtcccatgacatgcccagaaggttgaagaataacaaactcccaagtgtaaacacagaatttagcgaagaatccaggcctctggatgaatccctgtaattgcatgtttggataaaataagattttcatacattaaacaaggtaggatttttctatctgggacggaactttcaacacttggaggggttgtagttatttctcctcaaagatggcaaacatgagtgccccgagttatccctcctctctgttcaagttcgctaactaatcacccagtatccatgctatcgctggcccttctgtggcctatttttatactgttcactgttcagtgtcacttgtttggtaacactcaacatcaacatgtgctaccaaattgacaccagaggacaaaaaagaatcaagatatgtacagcctgctttgtactgagccagctgccactagatgttttttgtgataatgaacacgtgaggccatgtggacgcgagagatggctccgggttccctcagacggctcacagccagctggtctgcagtgcggttttagattccgatgtgggaaccccataaaaaagaatatgcaggccaggcgtggtggctcatgcctgtaatcccagcaatttgggagcctgaggcgggtggatcacctgaggtcaggagttcgagaccagcctcgccaacatggtgaaatcctgcctctactaaaaataaaaaaaaaaaaaattagtcaggtgtggtggcggatgcctgtaatcccagctacttgggaggctgaggcaggagaatcgcttgaacctgggaggcagaggttgcagtgagcaaagatcgcaccattgcacttcagactgggcaacaagaatgagactctgtcacaaaaaaaaaaaaaaaaagtctgcaggctgcataaagaggtatgaaaatgttccagaaatcccaaatcctatccctgaggttcattttggtgagggaatgtgtgtgcattttctagggcttccctaaaaaagtatcacaagctggatggcctaaagctacagaaatttcttggggacaaatttcatgattctggaagctagaggtccaaaatcaaggtgtcagcaaggctatgctttttctgaagcctatagggaaggccttccttgtctctcctagtttctggtggtttgctggcaatgtttggcattctgtggattgcagctacataactccactctgcctccatcattaatggccttctgcctgagtgttttcatatgaccatcttcatataaggacaccagtcatatttgatgagggttccaccctactccagtatgacctcatcttcactaactacatctgcaatgaccctatatccaaataaagtcacattctgagtgtctggggattagaacttcaacagagcttgttgaagggggcacaattcaatgcataacaggatggaaactagaaacgggtatgtttttatcagtgtagaaagatttagcttaatttttcaaagtgtaataaaaaccccaggaaaactcatactccctcctaagaagagcaaaagatggagaaacccgatggttaccttcaaacaaaaggaaaggaggaataagatgaaaaggaattaatccaaagcaaagagagtggcttatatggaatgttggtgcaactttctctgacacatctgtgcactcatcagctggggcatcatctccctggggtacatttggtcactgtgtgcctcatggtaataaactccagaagcctcattgacttgctagagatgagctcatccttcttgcttgcttaatggcaaaatacaaaataagcagtcactgacatggaacgatttcaggaatgccaaaaggttctccttttccaaaatatctcttccatcttcccaatactgttactgacatcactaacacctctccacttccggttgagacacctgggccagagctcctgatgtggcaggcagtgccctaaacgttttgcataaattaactgatgcccagagcaacaaccctaagatataggtactatcataccgcatcttacagataagaaacttaggcacaaagaggtttagtagtttagatgagataaccctgatgagcagagattcgaacccagcctccatgctattaaccaggacatcatattgcctttcatacatgctcttcaaaggcaacacagtaatcgattatcacactcactcacatctgattgtcacatttttcagatctgctctcctagcagagaatgaagcctaaggtatccttgtttctcaaagtgtcctccccagaccagctgcatcaaaatgaggggatgaggtgcaaatgcctggaccctgcccttggagcactgattcataatctcaagtcccaagaatctgcattttaacaagcatccccagaaatttcttaagtatactaatgtatgggaaccactgacactaaagaaatggaataaggggaacgtacaatgttacagtaaaccaggaaaagccagaaagacatgacaacacagtgaggactctggtagccaatggtcagtcaaatgcccaggggccctggccagaagagagttaggttgctgaggagtaagagtgatgctgaatgtggaggcttgagagcagaaggaagccagccagctatatcctcttgcttggatcacacaccctttccttggtggaaatggttatttgcagagttagagaaggcatgttttacagtttggatggcaggtatggatgtagacaataaagagcaaccagagtccatgggttcagaaatccccatgtgtttctgtttgaatgagacgcttgcataaacagcacaaggagtttggggtggggttaaagagaatggtgtggtatagggagagctgaatgaggaactgagagagcaaaatcctgtgtttggttcaatcactgattacaacctccctgaggctcggtctcctaatctgtaaaatggggggaaataatacctgccttgcaggtcctcacacacagggcatgatgtgaatccactgaggcatatagcactgtgtaacatgagttattgctattccaaggcccgtaaaaggctcttgccttggaatatatctgccacaccaatgcctgcagtccattaatgacacataaaggacactggagataacgatgtcccttgttctatgcatccctcccacccatgccagaaaagaaaacacagtcacctgaagtcattctaaagagtatgcctgcctcttttcctgcacagacacatatacacagacacgcacatacacagaccatgcacatacacacacatgggaaaacatgaggaaaagtggagacaagaggcaccaaaggacaaagtcacttttgtcgcctgtcccttccccagcagggctgggcctgggctgcttctcctgcctcctccctgaagccccctcctcatcatattccagtgcgtgtccaccactttggggccaggtctacacaactgcagtgattcaggtcacgggagaaaacccaaacaagcacaaaacatgcttcaacctatattttctaaattgtttttctttaaaggtgaagacttctgagcttgaattatccccttgtcagtgggctttccatgctgtccaagtgacctaagtgataatcaacctccatttcattttgagaatggttgtggtattttagagctatggtgaataagaaaatcatttaaaataaaatgatttttatttatttattgtttttatttattttatcttaaatgaattttaaatcatttaaaataaaataatgggataaaagaggatgctaaaaataataaatatatatgtatcaaagtgtgcttgtaataccaggcaaagaattaataagagataatattatggttggtgaaatgttatgtatggctacatcctttcaatgagcatttatagttcctttaaaatatgcctactgaagaaatatttacatgctaattaacatgtgcatagtaccactaggtattatagaggataccagatgtttgtagtagacacagaccttgccctaagtcctggtcttgatgtagtcactttttagtcactacaggtgactacatttagtcactacaagtgaccttccttcaatggggaaataaaggactttacaaaagacgtagaagacaattcttaatataaaagtgatttagatcttcacaagtttgtgaagagaagcagatgagtgaaatagaacactatcaatgtaaaatattattctgaggcctctgtaatgactgggaagcaacaagagggaggtcatttcagagagagaggctctaggttccaagctggatgctcaggtcagtgactgcaggtcccctccacacccatcaccccacaccctaaccctcttcagttgctcacaaaggtagataaatacccacatttttgccctcttccatcttgaaaccctggaaacccttgcttccgccaggggaggttacttagtatctgtcaccccaagggaaccaacgtcgaagcccaagaataagagtcaatactcctaccagaggtttacatttttcccaggggtctaggtggatattcctgggaacccccgtcaacacaggcatctacagtacaatccaggcctcctgttttcagcaggggctgcaagagcactgcagccttttccccagaggtgtcagtttggcccagtaaagattgcccctgagaaaacacatgggcaattagagcaaagttcctatgttctggtaacatttaattgtgctatttctcaacctcctctgcacccacacactcacacacaacatttattccactgacttcaaaggaagctcaacgtgttaaaaatatgtgtgggaacaaagaagggagtttgaaattggtctaaactctgtataactgggtttgacacgtacattaggattttacaagtatgtatttaatctttttttaaaaaaagcgtttacatagggttcagaataatgacaataaatcaacatttctattgtccatttgtgtgttttcatagtaaataatgctcatttatccttaaccagtaatacatacttatgggcttaaattagcaaaagcctctcaaaaagtagctccactcatttatccaccagtgtccagatgccatccagcacatgaggagctcccagaaaggagcagggaacaaactagggctgtcaggagtggaggagaaagaatggcatatgcaaaaaggagctgtaattaaatccaagggaacatggcacactctagtcttttgcacgagacaaagggcaatcctggtaaaaatacagatccccaggccccaccccaaagagtctgatctgattctgaaatggggccggagaatctgcattttaacaagcaccttcaccaggtgatccttttgctgagaacccctgagaaatgagaaccctgtgctagtgctgaatggagcattatattccagagttgaagtttggtgatcagttttccagatggagctggtccttggtgcatacctgggtataaatccaagccaattcaggtatatgagctgatatttcaaccgaaacactatctatagcctaaattttttctaatattctgtttggtatgaattctagaaagttgtaaatgctatatttccttctcatctatttctggactttgtcccaagaccaaatcccagggcatctgatagacattcattgcatacatttttctgtaaacatgaaaactgaattgtctaatagaaaagggcaaggaagtagaaaataagaaatcatcatcagaagtggtttgttttggaattatattgtccagctgcataacaaatcacccccaaaattgagtcgcttagaacaacaaacattgatcctccacagtttctgtgtgttaggaatcaaagtgatttaatttaatggttctgctcagggtctctcgggggctgcaatccaggtctcaggctgggatcctttcaaggctgagctggggaaagatccatgtctaagctcactcacatggccgatggcgggattcagttcctcttaggctgtcagactgagggcctccgtgtctcagtggttttagccagagccctctctcagttcctttccacatgggcctctccacagggcaactcacaacatggcagctggtttccagtagagcaagcgagtgagagaacaagaaaggcaagcaaggtgaatgtcccagtcttttgtaacctcatctcagaagtgttaacccatcacttttgccatgttttattatttagaagcaaatcactaagtccagcccacaattagagggatggcattacacaagggaatgaacaccagcagacagggtcattgaaagccatcttagatgctgtctatcgcatctaagtgtgatttttccagatgaaaagaatatattaatttgtttcagtcttagtcgatgtgccatcccatttgtgctttgctaaaacttgtatcaatgtaaagcaaacattttctgatacaatttaggtagtgtattgtggtaatagagaccagtagtgttgaaaagatatgttgaggtcagaaattaagctcatgtttctaaaagaggagatatgtacaactactatgcaagccaacaggaaagagtgttttaagaatgctttctgctacaggtaactaaaaacctaaacagctgtggctttaaaataaaggtatatctaagtcacataagcaaaagtctaggggtgggcagctgctggcattgcttcagtagcttgataatggcaaaagcagcatctcttctatttccttggccttctaatcatgcatgtcacctcacaatcacaacataggcaacacctcatattctaagcaagatgaaaagggcaaagagtcatgccatatgcctctgtctcttttcataaggaagacaaagcttccctggaagtcccctctagcagatttcacttagatctcattggccagaactgagtcacatgcctgccttaaaccaatcactcaccaagaagactaacattatcatggcaagtctaaaccaactgtgactcatctctgaaatcaaaggattattaccattacccgaatccatcaggatcctgttggcagagaagtgggactgtaaattttgagcaggcaacaaacaagtcttctgtaaacttcttatgtgttgttttttatgtgttctatatatccagtagaatcacaatttccaataacagtctaaaaagatattttccaatagaaacagaatgtgtaagatcattacttatgaaatcccaaatgtacttaaggtttccttcttgaaaattccttattcaaaataaaatgtccagattttgaaacccagaaaagattctatattttaaaaatcctgtgcacatgtaaactgtttttcaaatattgccttcagatacattgaacagaatgaaatcttctgagatttactacatcagccaagtattatcaaaacaaacaggacagattgcttttcttgacgtctgctgcttgatttgtgttaactcatgtttctgaaattgtagtatcataagccaatgctgcacaaaggtatttcatgtcatttataaaaatctagtaatgtaaactgttaactccttataaagcatctgttgacacacaaaaatatcactgaagtgcatttatgcctttcttctttaggtctgcataatacttccctccagaaggccaagttgttccataaattacagaacagaaagttggttgtgggaggaatagctcaacctcatctgaggcatcccactctaagaaactaatggcacctacacctcttgggcattgagtttttaagcccatttttaattcttgttctgctcatattctaagtgagcacataaagtgctgctccaagcaagaccagcccttgtagaagggcaagtgcagtcagtcccctaggaaacgggactggggagtgatcgtttcaatgagagataaatcaaactgatgctaaacatgaacaatgagcccattagagattgtgagaaagaggcatcatcatccactcaacaataggcctgtgggacctcttgatagcctgaggatgtttaatttcaggtgcaggtatccagaatgtagcagctagactgatcaaggatgtgtgatgacagcaagcagtagtggaagagcccaggagagttcctaagcctgaattgcaatcctgtgctgccataaaatgggaagatatacttggtccagtcatctgacagctttggtcatcaatttctctatctcatatgtgactctattgctttaagaatccctttagctttaaatatctatgaatctgctgaagcagctgtgctttgattgatgtggatctctgaactcccttaaatacaaagaccaattatttagccgagctttgttggattcagtgcattctgaatacatgtcaaaatatacttggatttgtaaaaaatattccttcctgtttttttcaccatagatagatgtacaaaaatgtccgtgttcacaccgtggaaaggacatttctcataaactcacacagagatacctttcaagtcaatgccttagaaagcaatgagagatttaaaggagacctagagatatgaatggagtaggcagagaaggtatgtgaggagaatgatgtaacttcctagggaaaaagtatgaagcacaaggctggacatagacctgggaatcaggaaattagagttctaattgcagcttttccattgattcacttgggatcttgagaatatctgtctcattttaatcattctgggccacagtttccatatctgtcaattagagtaagagtccctggctgggtgcccaggattgtgagaacataccattcagagccataaaaatgcaatcagtaccaataatgtactagtaccagtacctaggatgcaaaacatcctagatactaggtgtcctaacttaaagtggaaacattaacaagagtaattctttgaatcatcaaactgggaatattttaggaagcatatctatctgggtgaaaactaagcaaataagacaattgtaaaggcttgtgatctcaggaatacaaaggcaaaaatgcgcagacttgaaatatgacaagttctagttttgtcacttagcatctctgtgaccttggataatttcttaacccccggcagtattctcatctgtaaaatgggaataatgacatgcacttcagtggtttgtggtgaagattattacaaatagaaattagctcttttgagccactggtggggtttaaattcccagcccttatgtgctttgcagctgttagttcctcttattacaattgtctatttaaaaacctagtcacagcccggtgcagtagctcacgtctgtaatcccaacactttgggaggccaaggcaggagaactgcttgagctcaggcgttcaacatcagcctaggcaacatagtgagaccctctcatctctacaaaaagcaaaaaattagccagtgatgcatggctgtagtcccagctattctgagggctgaagttggaggattgcttgagcccaggaggtcaaggctgcagtgggcagtgatcatgccgctgcactctagcctggatgacagagcaagaacctgtctccaaaaaaagaaaggaaggaaggaaggaaggaaggaaggaggaaagaaaagaaagaaagaaagaaagaaagaaagaaagaaagagagagagagagagagagagagagaaagaaagaaagaaagaaagaaagaaagaaagaaagaaagaaagaaagaaagaaagaaagagaaagaaagaaagaagggagggagggagggagaggagagaaagaaaaaggaaggaaggaaggaagagagagagagagagagaaagacctagtcaccaaaagcaagagattttttaaatgctactattttttgggcatttactaatcatattgctatgctctgcacccaagctaagtaatttaaataaattatctcatgtactcctctaaaactaattactgctgtgtaaatggaggtagaaagaaactaagctttatttctgcctctattgtttctttaacctgccttgcttcctttttcagttgcacctaattggctgtacttttagttttctttaaaactgccttaaatttcaaagactaaagcagcaataactaactgaatatatttatataacatgttatttttgtcatgttgctttccacccctggagacctgctctaaattcacttggacgtttgaggataaatcatgctcactagcagtttctgaaaatgcagtttcactgaaaatgcaggcatccagaaatttagtaagcaacttaaaagaaagtgtaagaatctcctatgtattcattgaaaaataatttgaatttatgcttagaaaaatagaattattattaagaaatcttacacactcatgtttttaaatatcttcactaaggaccaattgtgtatatggtgtaacactgtcctcaaagaacatgccgggagaattgttgcagttaccagagggttaaatttggcaaactcttttttattaacgtgccttttaattatgaaatagcatactcaccttagataaaatttgaaaaccatttttgtaaagtggtacaatattgaagaaagttgataactttcagaccagatttaagcctcaaatctacctctcttttacctggacaactcattagcatttctgaacctcacattttttctataaagtgagaatactatattatagagttgttgtcagttaaatgagaacagtgtctgatcacaactagtcaacaaatgttcacaactcttcccctcctaggaaaagaatctcaaggcagacctgcttcgggtctgctctgtaaagaggtaggaatcctctgctcccggtaaattgcttcctaaccttctttggtaatagactattttttaataaaggtgatggatcatttcccattatacactcaaaatgtgtgtccatttcagggcagtcatggatgaccattgcccatcttttgaccccagattaagaacacctgctgtagtattttaattctgccttcaaatcctcttacaaaacaaagacatctttaaaaaataaaattctttaggtgtcttgcagttgaatgcaggaaaaccagagccccttatttttgatagttttgggaagaatgcagtgtcagaacacaaacccataatagacaaataatttgcacagaaacttcataaaagtattgacctgatttgccatgtatttgccaccttttaaaacacacaactaaatgtttaccctgtgtctagatccaaatgggtgaagaaaaatgagtgacaatacatctacttaagctcacttacataattgtggccatgccgtttttttcacattacattattagaacattggacaataagtcaagaaacagaatgttctacaaaataaactttaaaaattggtaagcatcatgtgctttttccagaagacattttattttgttgaatcaaaggtggctctttggcactgagtagctccgtggagtcatggcagtcctcattccctaatcctgagcctgcctgagtcgctgctgtcagtcatccacttgttgggatttcaaactgcattaaatcccctcctatagctgtcactgccaagcagttgcactggctctgtcctacctttctgttggtaattctgtttttaatcctgtgcttcagtgtagtttatataaatctttacagagggataaaacttcctgtaattaattgtttgggtgaacatgtacctgggagagctattgggaaaggggccaaatttgcattccagctcctttcatccccacccttgagctaaccaagtcctgtggattcttcccttagcatctctggaaccttcttttcttttcttttttttatgaccacctttccagtcctggcccttcaaacttgagtgacagcaacagtctccctgccttgagtctctttcctccttctcccagtgtgcatacggttgtcaaactcatcttgataaactactgcatcgattgtggctacactcccctgctcccacatcttccatagaccccactgtctgtaaaataatattcagtctggcctcaacctgtctttccagcctcggtgacacaggtctattctgcctgagacacttactatgacacccttgcttgttcctggggctttgacacatttccaacgtcccattgttcttcctctccaaatcagccaattgcccaagccctgctcaaatctcccacctcatgaagccttcttgatgcctcccagcacaccatgatctaatttcctgaagtaattatgctaattgggcatttgaagaattgttaaccgattatcaactaactgccccttaacattgcatgtgtagttgtcttcaaaggcagttaaattatgtcatgttccttacattgtactgagtgcctcgtatccttatccatgtttgggggttttactttaagtcaagaaatttaatcacatccatttggttttctctagagctgtagttctcaaccttttgtgtggtagagaaacacctagagaacatgtttaaaaatatcctgggttccacccttgagagataataaggtccaaggggaacccaaatatctgtgtttcaggtcagcttattggctcatcctattataccaactcctcagaaggccaaggtgggtggattccttgatctcaggcgttcaagaccagcctgggcaatatcgtgagactccatctcttaaaaaaaaaaaaaaaaaggattagccaagtgtggtggcatgaacctgtggtcccagctacttaagaggctgaggcagacagattgcttgagcctgggaagtcgaagctgcagtgagccatgatcatgccactgcactccagcctgggtgacagagcaagaccctgtctcaaaaaaataaaaatgaaaaaaatctgtgttcccaagttccaagtgatgctgatgctgctggttgcctttaagcatctcacaaagaacgaactcataaatgctaatacagtatatgtctatggatactgaatagtgggttttttttctcttttcttctattctgtgctcatgttgtgtcacttcttccttttagattgactttgaagatgtgattgcagaaccagaagggacacacagttttgacggcatttggaaggccagcttcaccaccttcactgtgacgaaatactggttttaccgcttgctgtctgccctctttggcatcccgatggcactcatctggggcatttacttcgccattctctctttcctgcacatctgggcagttgtaccatgcattaagagcttcctgattgagattcagtgcatcagccgtgtctattccatctacgtccacaccgtctgtgacccactctttgaagctgttgggaaaatattcagcaatgtccgcatcaacttgcagaaagaaatataaatgacatttcaaggatagaagtatacctgattttttttccttttaattttcctggtgccaatttcaagttccaagttgctaatacagcaacaatttatgaattgaattatcttggttgaaaataaaaagatcactttctcagttttcataagtattatgtctcttctgagctatttcatctatttttggcagtctgaatttttaaaacccatttaaatttttttccttacctttttatttgcatgtggatcaaccatcgctttattggctgagatatgaacatattgttgaaaggtaatttgagagaaatatgaagaactgaggaggaaaaaaaaaaaaaagaaaagaaccaacaacctcaactgcctactccaaaatgttggtcattttatgttaagggaagaattccagggtatggccatggagtgtacaagtatgtgggcagattttcagcaaactcttttcccactgtttaaggagttagtggattactgccattcacttcataatccagtaggatccagtgatccttacaagttagaaaacataatcttctgccttctcatgatccaactaatgccttactcttcttgaaattttaacctatgatattttctgtgcctgaatatttgttatgtagataacaagacctcagtgccttcctgtttttcacattttccttttcaaatagggtctaactcagcaactcgctttaggtcagcagcctccctgaagaccaaaattagaatatccatgacctagttttccatgcgtgtttctgactctgagctacagagtctggtgaagctcacttctgggcttcatctggcaacatctttatccgtagtgggtatggttgacactagcccaatgaaatgaattaaagtggaccaatagggctgagctctctgtgggctggcagtcctggaagccagctttccctgcctctcatcaactgaatgaggtcagcatgtctattcagcttcgtttattttcaagaataatcacgctttcctgaatccaaactaatccatcaccggggtggtttagtggctcaacattgtgttcccatttcagctgatcagtgggcctccaaggaggggctgtaaaatggaggccattgtgtgagcctatcagagttgctgcaaacctgacccctgctcagtaaagcacttgcaaccgtctgttatgctgtgacacatggcccctccccctgccaggagctttggacctaatccaagcatccctttgcccagaaagaagatgggggaggaggcagtaataaaaagattgaagtattttgctggaataagttcaaattcttctgaactcaaactgaggaatttcacctgtaaacctgagtcgtacagaaagctgcctggtatatccaaaagctttttattcctcctgctcatattgtgattctgcctttggggacttttcttaaaccttcagttatgatttttttttcatacacttattggaactctgcttgatttttgcctcttccagtcttcctgacactttaattaccaacctgttacctactttgactttttgcatttaaaacagacactggcatggatatagttttacttttaaactgtgtacataactgaaaatgtgctatactgcatactttttaaatgtaaagatatttttatctttatatgaagaaaatcacttaggaaatggctttgtgattcaatctgtaaactgtgtattccaagacatgtctgttctacatagatgcttagtccctcatgcaaatcaattactggtccaaaagattgctgaaattttatatgcttactgatatattttacaattttttatcatgcatgtcctgtaaaggttacaagcctgcacaataaaaatgtttaacggttaaacagtca

SEQ ID NO: 5269 - DNA, 36192 bp, Homo sapiens; identical to SEQ ID NO: 5268

SEQ ID NO: 5270 - DNA, 3119 bp, Homo sapiens
atgtccaaatcactacttgtaggattttctacatgaacttttttctaggactttggttactatacatattgtatattttaagaattctttatacaattttaatatactgcaatactgcagtttttgacaatttggattccatttggtatatgaatttttgcattcattattgaataactcttttaatatttttgagcaatgattatactgctttaccttgtgtcactttttttttttttaggaaaaactcatgttccagtatatttctcttacagagtgaagtcattacagcactgtatttctgtgttgacatttgttggcagtgtgctaagtaatgttttttaaagcacaggcttgaggactatggtttacatcctgttggaaacattccaaatgggacttgtgtattatacccaggaggctctcatatataccatcttggcatctgtactgatgaataagttataatgaacagttaaaaatgctcattgaaaattaaataaaacaaaaaggcagttatttcatgcttggtcaaaaacatcaatacctttccaattaacactgagaaattaaggttaagattctccttttgtactgggaaacaggctggaggactatggtcctcaagtttagaccaagaggactatggtctcaaggttcaccatgagaaatgtgttgaacattttagtatgctctattgtataatttttttggagggggggatggagtttcgctgttgttgcccaggctggagtgcaatagcacgatcttggctcaccgcaacctctgcctaccgggttcaagtgattcttgtgcctcagcctcctgagtagctgggattataggcatgcaccaccatgcccagctaattttgtatttttattagagacagggtttctccgtgttggtcaggctggtctcaaactcctgacctcaggtgatctgcctgtcttggcctccggcgtaacactttttaagaccagtgtaacagaaagagaatgtagccattctagccaccgttaaaagatacacagtgaggtgttgtgttttgtttttttaatgatgaaaagttacacattttttggagagaaaagtcttagctgaaggtaaatcaatggaaaaatgaaatttatttttaatattactactatatgaattatctttttttaaacttgtagataaaagtgttccagtaatcagaaaatcctcaagaaaattgacttcattatttggaaggaaaattagtattttttttaatattatatggaccatctgattatattttatttattcatctatttatggtatgtatgtataattctatattacactgtcaaatataaaatattgttatatgagtagaaatcacttaaattttttttgtgtttgtgaatttgaaacagtgtaagaaatcacttttaagaaaacatttttagaactccctcgtttttttttttttctttttgaaacagggtctcactctattgcccaggctggagtgcactggcgtgatctcggctcactgcaccttctgcctaccgagttcaagcgattcttgtgcttcagcctcctgagtagtcttttactatagggcctgcccccgccatgcctggctaatttttgtatttttgtagagacagggtttcaccatgttgcccagtctgttctcaaactcgtgagctagagctactcgcccacctggatgtcccaaagtgctagattccatgggtgagtcaccatgcttggccacattttagtattctaataaacagttggtcatcagaactttaaaatggtagcctacagaaacatacaattttgaatttaacagagtttcagtaaatatttccagaattaatgaagcatgttagctttaattttttcaattgtgagagaagtacatttataaaaattaagaggttaagaggttatagttataagggaaaaaacttctgtatcgattaactcctaaaatatcagtaccagcatggaattatagcaccaccttgtggttaacatgccagtattttaccttttgttaaaacaagtgatttcccatcaaacaggataatattttttcccttttgaaaaattcaattttaaaaagaaacatttttgaagttttcttatggaagatagaaaaaaagttaagtctctttctaccctttctttttttctttatatagtgcagatatacacacagagaagggacttaaaacatttctaatctcctagtttatatacagtgtgcaaaatataagtaagtatatattgaaaatataaaatatttcatatatgttatcaggtggaaatttagaatccaaattttcttaaactttaataacttgtctaacaactctctaatagggactaaaaatcaactcaatatatcatacatttacacttacaaagagtctttatctagacaacataatttttggaaaaataaagcaaattcaactttattggagttattggacagatcagcaaattgttattttaaaaagttttcttgtttaggcaatttggtaagtggtttctagttataaactagccactgttgattaacttgagaaggtgaagcaggggagttctgaagagattacctagagctacataaccctaagttaagtaaaattttcactttcattcttttcattctctcataaactggttgaaaaaacactgtactaccaacaaaggtgtcagttggttgtgctgccctgtctatgttatgctctgaataggtctcggtaaagattatatggaaatactataaagaatacataaggtaaaatactagtcagaaagggttcagaagaagttagcatcaactgtatgaaaattctaggtaaagctaagtactattgagttggaaaaaagtaattctatcatgtttgcttgttttcctgctactgtttttaatgtgatgttgtaatatattttaaaaataaaacttgaaaacgttgggactttgtttcatgccattcattactcataactttagataactgatacactcttcaggaagcataaaaattaatataaccttctcaattttataaactacaacactttttgagctcaaataacattgtaactttgatttttacttttta

SEQ ID NO: 5271 - DNA, 216 bp, Homo sapiens
aatacggtgaaaccctgtctctactaaaaatacaaaaaattagccgggcgtggtagctggcgcctgtagtcccagctactcgggaggctgaggcaggagaatggcgtgaacccgggaggcggagcttgcagtgagccgagatcgcgccactgcactcctgcctgggcgacagagcgagactccgtctcaaaaaaaaaaaaaaaaaaagaaaagaat

SEQ ID NO: 5272 - DNA, 1542 bp, Homo sapiens
ctgcctcatctcctcccagagtgtgccggggcagataacttagttgttctgagagaggtgaccccctctcagtgtccatgagtcccagatgaattggccaagtcctagaaatagaggggctgcagagcggggaggaagaggtcccaatgaccagcccttgactgccaccgtttgtcactggccccctggccctgttcccgtgatcccagtcagatgccacatttttataataaaactagggctgagcaggaaggcgctggcaggagttcattaccttgcttattttcaaactcttcctaacccttctgtcctggttgttgtttgacctgaaagatgaagagaacactgctgtcttctgtcatctgtctttctgcttcacctgcacagggccaagccccgtggcagtgcccagcggtcactggggacagtgctgaggttacttatcctgagaaacccttgcacggcctgtcccgcagagaaaagacagcccttccgggtccctggtttggtctgagtcgtgggaaaggaccctagggcatcacaatcgcagcctgtaccctgcagctcacagagtcaatcagtttggttttatttgcatttgaacagaaaccttgagaaaaagaaagccaatttgtttatcttctaggggataaaaataggcaagtgtggcagccctgtggccacgcaggtcagacactgcagcagtgacactggggttttattaatcaataggatgtagctcacttgttctgtccttttaaaaaaaaaagcccaccctggagaagagatgcttggcccagctcctacacaagggcagcagtcatctccggtccagggagctcttctggaggtttttgcaagtagattctagagaactgagagaacaagaagtcttccccactctgggcacatggaatcttcattcaaagagtttggtttgaattgagagctctcagttttgcatatcaggtaactatgatgtgaaaagatgaagcggcctctttacctctcagagtcagcccagaccctcttcgcctcccctcctctcagagaagctccctcgtccctttctcctccttttgactagagctagtgggtggagagagtaactgaacgggaatttcttagtgttattctctatcaataatatattttaattgtcagtgctatagactgggtggctgggggttgggagctggtggctcttgaaaatcaccaagtggcagaaaggaagttataggaagaacataaaggcttagtgccagtggtgtcaggtaatgcatattgatacctcaactaaaagaacatttggggctttattaaaattgactaattcttccaaagatagcagctaaaggaggacttagatgaatagaggagggaggaggcttgcaggacggtgaagccctttgcttccagctctctgcctgctcagccattgctccgtccctctgcagttagattattccttgcagatagcaatcaactggaaggaagtgtctgtgtctaatttgcatgagattatttaaaacaacaacaaaa

SEQ ID NO: 5273 - DNA, 856 bp, Homo sapiens
gggaaaattatcttcatttgcagccagcggctgacaaggcacacgaaccaccaggtttataaaattccgtagtgtaccagtgaccatcagcctgtgctgacatcgcagatgctgctttcttctctaatggctgattatgaactggttaaaacaatgtctttcccaccagggctccgaaaggggttccccttcctgtttagtcggagcgatcggcagtcactacacaggctggaacctgagaggcacaaactcagggcgggggtattctctgttgttgcctggcttgcctgttggtcctgtccctgttcttcttggaaggtgaaattatgggtaaagcagtccctttgcagcaagcaccccctctctagctccactctactgaccttcagcttttgtctttggaaggtggtacgtgatgcgctgtgaaccctggaagcattttcatccagcccaccaatctgttgagagcatggtgctatcagggcaacccggtggctcttcagacttcccagtggtgaggctgtgcctgcccttggccagctccactgtgtgaagagggtaaagaggggaacagctgcagttttaaatggggatagtcctcaactcctcagcacagagaagggaaaaaagagtccagggctgtttagaaaagttcgggcattttcctttgactagctgtggtagggcatgaaaagtttgaggggtggctgcagtcaactcatatgccagtatggtgcagggcggagctgtgctttaaagcattaatgtgcaccatctattagcccctaggcatggagtatgaggcaccatccttttgaagatgctgatcctcagaacctccttgtacttcatctac

SEQ ID NO: 5274 - DNA, 1044 bp, Homo sapiens
taagaccaacacatgggactgctatacatggttcttctcaaatccattgttttcttttctggtgtaagtgaagaattgaaggcttatggggtcggtctacagaccgttattgagttcctacagaatacccggttctgggcttggcgctggatcagtcaggccctgttgggtcttgcactcaaatgacaaacgtacaaggcttacaccgtgtgtcagatggcaatggtgaagcagcatcagggagttggggaggagaggtggactgctttttttattggagggaggtcaagaaggatgcctgaataaggtaacatttgagcagagtcctaaagacagtgaggggacaaatcatcagactagcaggggaaaaagaactccaggtggggggaacagcaacggcaaaggctgtgaggtagaaacgcaataacgtgtttgaggaataaggaggccagggtggctggaatggaggttagcaagggaatgagggtagggggcaggttctgcggggcttttgttaggatttctcttggaggaaaggcttattaccacagtgactgagagtgctgccattagcctatgaccctcagctgtcagcttgttcagaggtggcttagctgcagatggctggcttcccacatccgatgactgaccacagtagggatatgagggtctgaccatttctgcccaatgctgtccaactctgatgggccattccagttccaaggctccctgcgggactgatggaggctgttcatgggactgtatccctccctggcttctccctctgcccagttctcatgcctttccttcctttccactggtattgatcccaagggtacatgcttagtgccatctcaggactcagtttctccatttagtgtgattgaactacgtgcatttgccagccctgtagtcccagctactaaagaggattgcttgagcccaggagttcgaggctggaatgagctatgattgcaccactggactccagcctgggcaacatagcaagactccgtctctctaaaaaaagaaaaaaaaaaaagg

SEQ ID NO: 5275 - DNA, 286 bp, Homo sapiens
ctctctctctttttttttttttttttgagacagagtcttgctctgtcacccaggctggagtgcagtggtgcaatctcggctcactgcaacctccgccttccaggttcaagcgattctcctgcctcagcctcccgaatagctgggactacaggcgcccgccacctcgcccggctaattttttgtatttttagtagagacggggtttcaccgtgttaaccaggatggtctcgatctcctgacctcatgatccacccgcctcggcctcccaaagttctgagattacagg

SEQ ID NO: 5276 - DNA, 1982 bp, Homo sapiens
gggcaagtacacgtaccctgcactccgggaggaggccccaagggaacacgtggagagcttcttccaggtacttgggagtgggtaggctggagggccctggagtgaagggaagaaggccaagaaccagcagggaactcacctgacttctgtctgcctctctcttgccatccctcctgttctccctgcctgaccaccttcttgcagaagatggacagaaacaaggatggtgtggtgaccattgaggaattcattgagtcttgtcaaaaggtacagctccctgccctctacattaccctgacctggactcaggcctgatttagtaatgcagggaaaagcttctttgggaagaataccaccttcccacctcacccccatatttcaatcctattcctttgtgggaggcttaccccttccctacctcaggtctctctgggcatctccttcctctgtgcttttgaatgtccccgtctgtgactcagtgtccctctcactgtctctgataagctccttctctttctctctcttcaatctgcctcgctcacatcatggccacaggatgagaacatcatgaggtccatgcagctctttgacaatgtcatctagcccccaggagagggggtcagtgtttcctggggggaccatgctctaaccctagtccaggcggacctcacccttctcttcccaggtctatcctcatcctacgcctccctgggggctggagggatccaagagcttggggattcagtagtccagatctctggagctgaaggggccagagagtgggcagagtgcatctcggggggtgttcccaactcccaccagctctcacccccttcctgcctgacacccagtgttgagagtgcccctcctgtaggaattgagcggttccccacctcctacccctactctagaaacacactagacagatgtctcctgctatggtgcttcccccatccctgacctcataaacatttcccctaagactcccctctcagagagaatgctccattcttggcactggctggcttctcagaccagccattgagagccctgtgggagggggacaagaatgtatagggagaaatcttgggcctgagtcaatggataggtcctaggaggtggctggggttgagaatagaagggcctggacagattatgattgctcaggcataccaggttatagctccaagttccacaggtctgctaccacaggccatcaaaatataagtttccaggctttgcagaagaccttgtctccttagaaatgccccagaaattttccacaccctcctcggtatccatggagagcctggggccagatatctggctcatctctggcattgcttcctctccttccttcctgcatgtgttggtggtggttgtggtgggggaatgtggatgggggatgtcctggctgatgcctgccaaaatttcatcccaccctccttgcttatcgtccctgttttgagggctatgacttgagtttttgtttcccatgttctctatagacttgggaccttcctgaacttggggcctatcactccccacagtggatgccttagaagggagagggaaggagggaggcaggcatagcatctgaacccagtgtgggggcattcactagaatcttcaatcaacctgggctctccccaccccaccccagataacctcctcagttccctagggtctcttcttgcttgactcaatctacccagagatgccccttagcacacctagagggcagggaccataggacccaggttccaaccccattgtcagcaccccagccatgcggccaccccttagcacacctgctcgtcccatttagcttaccctcccagttggccagaatctgaggggagagcccccagagagcccccttccccatcagaagactgttgactgctttgcattttgggctcttctatatattttgtaaagtaagaaatataccagatctaataaaacacaatggctatgca

SEQ ID NO: 5277 - DNA, 1982 bp, Homo sapiens; identical to SEQ ID NO: 5276

SEQ ID NO: 5278 - DNA, 302 bp, Homo sapiens
gggccgggcgcagtggctcacacctgtaatgccagcactttgggaggctgaggtgggcagatcacgaggtcaggagattgagaccatcctggataacacagtgaaaccctgtctctactaaaaatacaaaaaattagccgggcatggtggcaggcgcctgtagtcccagctactcgggaggctgaggcaggagaatggcgtgaacccaggaggcggagcttgcagtgagccgagatcgtgccactgcactccagcctgggtgacagagcgagactccatctcagaaaaaaaaaaccaaagaa

SEQ ID NO: 5279 - DNA, 544 bp, Homo sapiens
tcagtttcgttccatgttttttatttgtgcactgggaaagaagtcttccctcccatcacatgagccacgtggtgagtcctctggaggcttgaagattatccccctccctgggagtcttgggccatggagggtgggggcggtgaacggaaggggattttgtctctgccctcagcctggtgccctctccttccaggaatgtcccagcggaattgtcaatgaggagaacttcaagcagatttactcccagttctttcctcaaggaggtgaggggacaaggcccaaggggaagcagttgtccttctctaggctgagggagggagggattctggaggagctgggaatgccaaggtgatggggggtatggggagctccttagagggaggaagtcctctcctgtgtggaagccaacttctccacactcaccctgcagactccagcacctatgccacttttctcttcaatgcctttgacaccaaccatgatggctcggtcagttttgaggtgagctgggcgaggtgggccagggaagcctgtttcctggagt

SEQ ID NO: 5280 - DNA, 544 bp, Homo sapiens; identical to SEQ ID NO: 5279

SEQ ID NO: 5281 - DNA, 302 bp, Homo sapiens; identical to SEQ ID NO: 5278

SEQ ID NO: 5282 - DNA, 14161 bp, Homo sapiens
tcacttttctaacaggcaaaggaaattttaacaaaagaatcaaatgtgcaagaggttcgttgccctgttactgtctgtggagatgtgcatggtcaatttcatgatcttatggaactctttagaattggtggaaaatcaccggatacaaactacttattcatgggtgactatgtagacagaggatattattcagtggagactgtgactcttcttgtagcattaaaggtatgattattgaaattcaatttttttttcaagatttaaaccaggcaaaaggcaagaatgacagtattgcatatcatctgttttatggtctgttcagtttatagccccttaaaataataattggttttacatctttttaaaggagaggtgaaaaggataacttctgtgtattcccgataaatgtatcattctctcgagtagtccatagctgaagtcttggaatcatatttgactttatcacttatccgttatattgagtcagtagacaagtctttttaaatccttgctttgaaaagtctgttgttcctgtctctttctattttcacacagtttatcacttcacaattcgattgttacaatagcttagtaactaatatttctgcctccaagatctgatcccccccaaatccacctggcatacgctggccgatgaaatctcttatttaacccttttatattgttacttcctgttgattgcctgttgcctatagaatcaaattcaaactccttgcctggccttctatagtctagtctgaatttttgcctgccagcggttggtagcataaactctggctcaaatcaaagtttcttcttattcagtgctctggactctgtttatttccatagtcgatttcccccacgaggttatcctgtccctgatttcttacctttctgccaagactcagctcaggtctcacttcctccatgtaaccttcaaccattttagccttattccttctgctctaaattactatgaggaaacttattctcccagcccttatttatgctgcaaaagtggcttattgccttctattacttattattttacatatgtccttagtgaggttagtccctcaacagcagaagccatatattacatggtcatgggtcacttaactgcaggcatacattctgagaaatgtgccattaggtgattttgtcatctttggaacttacacaaacctaggtggtatagcctactgcacacaaaggctgtaatggtatagtctcttgctccagccaacatcgtacatgtaatctgttaacaaaaatgctgcccagcacatgactgtacttgtgtagatctggcatctggctttatagcaccaaacttacgttagacacataacggatgcttagtaaaatatgtatgaattgaagtacatacttgcagcttttagcttaatttgcagaatccagtgctttttcgtatttcttatcagatgcattcctaactaaatagtcgcttatgttttttaatagaaaggaaactattaatacatttgaaatcttgcccagttttgtcaagggcctgtttttgtgttattattggcaaatccaatcttcctgtgggaaataaaaattgaaaagggaagaagttaatctgtagagtttgtctcagcttcaaacctgtgattttcactactcattcagcagtaagaagtcatagtgttctagaaagatttaggaaagtagtaataatttgatgatgaagataatagaagcaaagtatcagatacaagtttattatagtaatataagtattagttaaaggttctgatgagggttgtcgaaacctgatgaaaaaggatgattataataaacacgtcaaatgttaaccagtaagacctggttatgaataagcaagttttttattttgaaactgaaattaacatttaatatactggtggccaaaagcgccgtgtttaaaaatgggtcagagactggtgtacttcacatgacactagtaaaaatgtgattttactatgggttttactccttttcttccaggtgcgttatccagaacgcattacaatattgagaggaaatcacgaaagccgacaaattacccaagtatatggcttttatgatgaatgtctgcgaaagtatgggaatgccaacgtttggaaatattttacagatctctttgattatcttccacttacagctttagtagatggacaggtatgtatatgtgtgcttacatcttgggaggaggtaaatggaagcagagattgactattggtaagctggggtctagattcatatgacctgtgtttctgcatctcctcggccttttcctcctccttcccttatacttaaaatttcaaagcagggaagtggataagtttcacatacatttggaccagcaaattttcctgttgttctcagatatgtatgtaaatcttttaaccaaagaatatgctgtgctttttaagatatcgataaacattataaataaatgtttaagacactgatgtatagtactagcaaagcaagatgttatttaaaactatctctgcatatacatgcagtgtctgctggttaccatgaataacttttcatttctattttcatggtaactgcaaatgttatattgtgtattacaccttccctgagaagtgaatgcttggctgggcacagtggctagtactttgggaggccaaggcaagaggaccgcttgagttcaggggttcaagaccagcctgggcaatgtagtaagaccctgtctctacaaaaaaaaaaatttaaaaattagctaggcatagtggcgcgtgcttgtggtctagctactcaggaagctagaggtgagaggatctcttcagcccaggaagttaaggctgcagtgagccgtgatccagcctgggcttcagcctgggcaacagcaaaaccccatctcaaagaacaaaaaaagaaaatagaagcaaatgctatttctgcatttgctgtaacaagtagtgcagacatgtcatgaaacattcaaaagtataagaagaaattatgcaaatttcctatttcaatttctagagataatcactgtaagcatgaactgatttaaatttaaatataaaacaaaagccgggcaagttggctcctacctgtaatcccagcactttaggaggccaaggtgggtggatcacctgaggtagggagttcgagaccagcctggccaacatggtgaaaccccatctctactaaaaatacaaaaattagccggggatggcattgcatgcctgtagtcccagtcccagctacttgagaggctgaggcaggagaatcacttgaacctgagagagacagaggttgcagtgagccaagatcgtatcacggcactccagcttgggtgacaaagtgagactccatctcaaaaaataaaataaataaatataaaacatataataaaactccataattcttaaattatgaaagcccagagttgtcaagaatgtaataaattctctcttagactgctcgtgggaatataatttggttataactttccctgtgtaatcctgacagtcttttttctcagccatgattttggacactgccgtgattaatttgaaaggacgatactttgcctggacttgttaaaagaaaatgtgaatttaaaagatgttaaattttaattaaggttgtttttaattgttttgaagcaacatagtcttcattaataataaaattgctggacagaatgatttttaaaagacagcctatcagttttaatgaagtatctagtttttaaaatgggtgcgttagtagagcttttatatatttttcccttcctccttccttcctttctttctgaaaagttactagaaaagaaataatagtgaacaaaactgatctagaagaaaagatggaaggcacataaaacactaggaatgaaataaggcataattataactatgcaggagctcgtgtatcacaagaacaggtgcagctttagtgcactaagtttgaaaagctgaatgaagcttactatagtaaaataccagttattaaaattggcttgcagaaattcgtccaatataagtaaacaaccaatagcaaccaggtgtaaatagttttataggctaattctaccaaacctttaaggaacatataatttctgtgttctagaacttgggaaaagatggagagttcaaaactcacaccgtatgcctagtataacctcaatgccaaaccagacgtggcacgcacagaaaaataaaatcagaccaaagtcatttggaaaaaaaattcctatatttatgattcaaaactcagttattttataaaataataatattaagtggataaagaaacgccagttgtactatcagctaaacattagaaaccttctcatcaggccaggtgaggtggctcatgcctgtaatcccagcactttgggaggccaaggcgggcggatcacctgaggttgggagttcaagaccagcctggccaacatggagaaaccctgtctctactaaaaatacaaaattagccaggcatggtggcacatgtctgtaaacccagctactcaggaggctcaggcaggagaattgcttgaacccggaaggcggaggttgcggtgagccgagatcacgccattgcactgggcaacaagagcgaaactccgtctcaaaaaaaaaaaaaaaaaaaatcaaaatcagaaagaaaatgcttgttaaaacttacgttattctctctgattcagaatacctagagcatggacttgaaactaggtagtttacaaaaaacaaaacagaaaacatttgtattattccattttattttagaagtcctggccaatgcactaagcaataaaaagaattaaaacgtataaacattgagaagaaaaaacaaaaatagttttgcaaatgacttgattatgtacttagaaaatatgaaggaactgaaaatttattgtagccagtaacaggaatcagagtgtttgctgtaagagaaacaaaaaattgtatatatcagcaataaccaacagaagctgtaatgacagctgggtacagtggcatgcacctgtaatcctagcttcccaggaggctgaggcaggaggattgcttgggcccaggagttcatggctgcattgcgcagtgatcaaggctgtgaatagctactgctctccatcctcagcagcacagcaagactccatctctacagaaagaaaagaaaggagggaagtggggagggagaaaaaaaagaaagaaagaaatttaatggtaggtaccaaggatggggataccattgaccagagaaaaggaagggagggagggaggggaaaaaaaaaaaaagaaatttaatggtgggtccccaaggatggggataccattgaccagagaaggggtaaagaagaaaaaatgatggacaaaatatgtttaaatgttggcactatttggactgacacttttaaccattatttactctttgttaactgtttggagttagtaaaacaaatacattctcttttgttaattcatacatagatattctgcctccatggtggcctctctccatccatagacacactggatcatataagagccctggatcgtttacaggaagttccacatgaggtaaacttaatttaaaaaagaagaagaaaggaaaagaaaatataaccacattttgaggatgataaagtatgactgataataatttgtaacatgtacttatttttcttggccagggcccaatgtgtgatctgttatggtcagatccagatgatcgtggtggatggggtatttcaccacgtggtgctggctacacatttggacaagacatttctgaaacctttaaccatgccaatggtctcacactggtttctcgtgcccaccagcttgtaatggaggtatgtactttcctgacagaatgatctttatttcagattagtatatacttctgtaataaggcattatgacttaactaagaaacattcctcaccatttattacctaggtgaaaagaggaaaaacttgctggttttagcaagtagggaaagcactagtagaccagagcagaattataactcatttttgaaattgagacttagaaaaaagttacaaaaatagtaccccataattccctgtatgcttcattcagattcctgactgtaaatattttactatatttgctttatcattttgtgtctctcttcctcttcacccctcacactttcttctgaaccatttgaatatctgttgcagacagatactcctttactaccaactttctatgtgtattttgtaaaattaaggacacactgtcacataaccaccgtatagttatcacagttgggaaatttgtgttcatatagtactgttatttaatatgaacactttattcaaattttgctaattgtctcactaatgtctttaatagcaaaatttaattttttgtgcatactgtatgtgcatagtcgaatccaaagattaggttgtattcattctactttgatgtggaaatcctccgattttcattgttttccacattcttgacattttggaagagtaggagcattttatcttacagaaatatccctcagttggggtttgcctgatgttttccttgcagttagggattcaatgtatgcatttttggcagtcatgacatagaaagatggtgtgtcctcctccgtgcattgtatcaagtggtcctaaaatctgcttgtctcaatgctggtggtggcaactttaattgcttagttaagatgatgtctgccagatttctccactataatattaactgttatacaactactaagggaacataaacaacataatccctgcagaccagtagggagtggcttcaagatgtttagagaaaacttcgccagcccagtagaaacaagggagcatgataaaaaaaacacaaatttacatagtaaaaataaatttaattatatcagtgattataagaaagagactaaaattttagcctgaaagagactcttagattggataaataatcaaaatttagctgttatttgggatgtacctaaaacataaatgattggctggacaaagtggctcatgcctataatcccagcactttgggaggccgaggtgggaggatctcttgagtcttggagtttcagaccagcctgggcaacatagtgagacctcatctctatataaaaaaaaaaaaaaagtcaaaaagttagctgggcatggtggcatatgtctattgtcccagctactcaggaggctgaggtgagagggtcacttgaggccaggaggttgaggctgcagtgagctatgatcgtaccgctgcactccagcctgggcaaaagggtgagaccttgtctcaaaaaaacgaggaaaaagaaaaagacaccacaaactagaggtaagagttggaaaatggtatattggtatatcaagtaattaatcaaaatatcaaaaatatagctaatgagctggcgtggtggctcgtgcctctattcccagcactttgggaggctgaggcaagcggattgctggagctcaggagttcgagaccagcctgggcaacatggtgagatcctgtctctactaaaatacaaaaaattaacctggtgtggtggcacgcacctgtagtcccaactactcggggctgaggcaggagaattgcttgaacccaggagttggaggttgcagtgagtctagatcgcaccactgcactccagcctgggcaacacaggatgtgtgtgtgtgtgtatatacacacatacatacactaatgtatgtatatatatgtatacatatatacacacatgtatgtgtgtatacatatatgcacacgtatatatacacatatacacacgtatacatatatgcgcacacatacatgtatacatacatatatacgtgtatgtatatacacatgtatatacacatgtatacatatatgcacacacatatatacatatatacacgtatatatacatatgtatatacacatacattaattagcatgtatgtatacacactatatataatactatagctaataatatgaatgagataggctctaataaaaggtattattagaaataaagagattattgatgaaaactggcccagttctctaggaagaaagtattctaaatttgtatttacctagtaatagcttcaaaatatataaagaaaaaattggcataattcatgagggaaaattgagaaattaattatgattgtgggagaaattcagtacacatccttgccaagatttcaagcatagatacggcaaaacaacaattagcgagctgcatttaacagactcctaggcccacgaattgcacagtattctttacaggtacacaaactattaaagatggagaccttatatagtaatatagacgactacatttccacagagagtacctgtagtttttgagtttagttttttttaaatgtgtctgtgtcaaaatcataatattataatgaaataatgaatttgtttttatcctgcagggatacaattggtgtcatgatcggaatgtggttaccattttcagtgcacccaattactgttatcgttgtgggaaccaggctgctatcatggaattagatgacactttaaaatattccttgtgagtaactgtaaattttaattgtatatactttcagaaggaaaattttaaatgttaaaaatagaagatttctgtttctgaaattggatgaggagtatagcaaagcccctctccagcaaaaataaccattagctggagaacattatttttaaaaaataatttttcaaagcttttggaaattgtcctaagggcatacagcaggtggagaaacagttaattcaagaaaacctactaaatctcagtaataatagccgtagtctgtggcatttgagctatgacttgccccctccaactcctcccagatccctctcacagaaacgactacaggcgctctacgctgggttggtatagtcaggaggctaagggattccccctcttcatcagctcccagggctggggctgtgggttcactcccagagatcagatgccagcatatctcacctctcctagtctggagttacaaaagctctactcctggtagacacagtcaagcaggctgaggcccccttccctgccccagctcctggggcagaagctctgctccaggcatgcatggcagatgagaatgctgggtttcccaatgctgttaccccagcacctgcttataaaccaggtggtatcactgagcctgcactggcacagaagttctgctcaggaggaaaggcaggtcacagaagttcctcagctctgcctcagaggacttatcttacttaggtgatggagaattccaaatctgagtgctttgtggaaagcagtagatgtcatggtggagaccaattaagagggctgtaatagctcccatgatactaggagcaacatacaaaagagcagagcaacatgttgttcaacaaatagcaccagggaaaaagccaagaagagcccttctgggatcacagtcagccctgggggacaagaaggctgtgcacatgcactagccatacccactcaggagcagtcaagagtaggatgtggggtattcatataatattttcaagccacacatagattgtactgagttgaataatgtccccccaaaaaaattcatgtccacccagaacctcaaaatgtgatgttatttggaaataggatctttacagatataattattaaagatgagattgtactggattagggtgggcctaaatccaattcgaatgggattttagtaagaggaaaagaaacacacacaggggagaatgctgtgtgaagccagagattcaagtgatgcatctaccagctaaggattgccagagccatcagaagctagggagaggctaggaaggatttttcctagagccttcagagagagcgtggtcctcccagcatcttgctttcagacttgtagcctccagaactgtgagaggataaatccccgttgtataagctatacagttcggtaatttgttacggcagccccaggaaatggataagtagattgatcaacaaatggtgtaaccatcactagtatgtgaggcttaaacacaacctctcatcattgactgaacgacattcagttactctgatccaggagcacctcctaggtagtcaggctttaaaataaaatcacactcatccctgacagtctggcagaatatgtgcatgcccaaggttataccctctctggactgagtgcagtatgaagatccaactattagtccctggctgaatgggaagccaaaatataaactccttcagctttgatagcaatctgcaagtcacataacatttccggtggccattagggtgagctttaagatctaactggccaagggggcttaagtacaatctttgatcagtaagtggcttatgcctacccagagacagcccctcagtagccaggctgtgaaagattaaaagaagtaaaaacggtcaggcacggtggctcatgcctgtaatcccagcactttgggaagccgaggtgggcggatcacctgaggtcgggagttcaagaccagcctgaccaacatggagaaacccagtctctattaaaaatacaaaattagttgggtgtggtggcgcatgcctgtaatcccagctactcaggaggctgaggcaggagaatcgcttgaacctgggaggcggcggcgatcacgccattgcagtccagcctgggcaacaaaagtgaaactcaaaaaaaaaaaaaaaaagtaaaaacatccgagcagggccacaggggctgcacactatgggggaagtagactttacagttagttcagctaagtcactaaacaaaaataataaaccaccaaaaagacaagatcagtccccaaggacatgaattccagagctactgcaatatgttatctataatgtccaatttttcaaccacagattataagacatggaaagaacaaggaagtgtgacctctacacaggaaaaaactaagcaacagaaactgtttctcttggatagaacaactaggcaggagatgaaggcaggagaagacttgagcaacactgtaaactgactgtatacctcatgtctgtaaaacaacacccaacaacagcagaatactttcctctcaagtaaacatgaaacatagtcatatgctagactgtaaaacatgcctcaggcaatttaagaagattagattcttaaaaggatattctccaaacacaaggaaatgaaattagaaatcattaacatggctggatgctgtggctcacacaagtaatcccaacactttgggaagccaaagtaggaggatcacttgaggccagcctgggcaacatagggagaccccgtctctacaaaaaaatttaaaaattagccaggtatggtgccaagcacctgtagtctcagctgtatgggaggctgagatggaggatcacttgagcccagttgatcaaggctgcaatgagctatgatcacagcactacactacagcctaggcaacagagcaaagaccctgtctcagaaagaaaaaaacaaaaaaaaaaacaagaagatttgaaatcagtaacctatctttatacttgaggacctagaaaaagcagagtaaactaaacctgatgtaagcttatgaaacgaggtttagagtagaaataaacaaacagtagaaaatcattacagaaaaatcaacaaaacccaaagttgatgctttgaaaagccttaactagactggccaagaaaaaaaggagtaaagactcacattaccaaatcactagagaccttactgaaataaaaaggattataagggaatacaataaataactatatgccagcaaattcagtaactttgataaaacgtactaattcctaaaaagaaactactgaaactgactcaagaaatatgaaatctgaatgacctttcaaatgtgaaaatattgagccagcatggtggctcacacctataaatcccagctttgggaggccaagctgagaggattgcttgagactaggagtttgagaccagcctggacaacatagcaggaccttgtccctatttaatttaaaagaatataaataaatgagtgaaaaagttaaaactccccacaaataaaaggccaagcccaattggcttcattgatgaagtccaccaaatgtttaaagaaaggaattggccaggtgcggtggctctaaccagtaatcctagcactttgggaagccaaggcaggcagattgagcccaggattcaagatcagcctgggtaacatggtaaaaccctgtatctacaaagaatacaaaaattaacctggtgtggtggctcagcctatagtctcagctactcaggaagctgaagtgggaggatcacctgagcccagggaggttgaggctacagtgagccatgatcacaccactgcactccagcttgggcaacagagtgagaccctgtctcaaaaataaaaacgagttaatgccaatccttcacaaacacttccaaaaaacagaagaggaggactactgcattcattctgtcacacctgcactattatccttgataccaaaagtagacaaaggcaaaaacagaccagcatttgttacgaatacagatataaaattttccaacatacgtaccagcaacctggatctagcaatatgtaaaaagattatacaccatgagcaagtgggatttatcccaggaatgctaggttggttcaaaacatgaaaatcaatataataaaccatattaatattaagggattaaaaaacacatgatcatctcaatagaggcacaaaaataattggaaaaatccactagccagaaacactcaagaaaatagtgatattaggcctggcgcggtggctcacgcctgtaatcccagcactttgggaggccgaagcgggtggatcatgaggtcaggagatgagaccatcctggctaacacggtgaaaccccgtctctactaaaaaaaaataagaaaattagccgggcatggtaatgggttcctgtagtcccagctactcaggaggctgaggcaggagaatggtatgaacccaggaggcggagcttgcaataagccgagatcgtgccagtgcactccagcctgggcgacagagcaagactctgcctcaaaaaaaaaaaaaaaaaaagtgatattattattattattaaataatattaaacaattattgtttaattatttaaacttgatattatttaatctttaattatttaagcttttaaataataataacatttagaaattgttatgccaggcaccaaaccagacattctgtcttcttaaattttcaccatagccctatgaagcagttagttggaatgggagcatctgcagtgatttgcccatggccattccagccgtaagtgatgtagtcatggtgggaaagcaggactgctgtttctactacagtgtcttgttctttattcatttgttttctttgcaaagtcagatcctttatttgcttccttttttgccatttacagccttcaatttgacccagcgcctcgtcgtggtgagcctcatgttacacggcgcaccccagactacttcctataaatttctcctgggaaacctgcctttgtatgtggaagtatacctggctttttaaaatatatgtatttaaaaacaaaaagcaacagtaatctatgtgtttctgtaacaaattgggatctgtcttggcattaaaccacatcatggaccaaatgtgccatactaatgatgagcatttagcacaatttgagactgaaatttagtacactatgttctaggtcagtctaacagtttgcctgctgtatttatagtaaccattttcctttggactgttcaagcaaaaaaggtaactaactgcttcatctccttttgcgcttatttggaaattttagttatagtgtttaactggcatggattaatagagttggagttttatttttaagaaaaattcacaagctaacttccactaatccattatcctttattttattgaaatgtataattaacttaactgaagaaaaggttcttcttgggagtatgttgtcataacatttaaagagatttcccttcatttaaactaaattactgttttatgttgatctgcatatttctgtatatttgtcatgacagtgcttgcatcctatttggtgtactcagcaaataaacttttcattttaaacaaaaacattca

SEQ ID NO: 5283 - DNA, 767 bp, Homo sapiens
agaacatttcatttgccagtgtttaagcataaattctgtacttcagggccacctaatggtattttctaacttaattctataaatataaaataattggaataaagaaattcaaggttggcctatgaattggtgtaagaatgtttgttcacacaagaatttgcataatttgtgacttttttctttcattgacctttttaaacttgtgaataataagattattctttttaaaacacagaccttctgccttgaagatttgcctattctggacatttcatgtaaatggaattgtacattatgtgatcatttgtgactgacttcttgcacttaccataatgtcttcaaagttgtagcatgtatcagtacttcatttcttcatagctgagtgactattccattgtatgaatatgttatgtccattcatcggttgatcaatatctggtggtttctactttttggctgttattaataatgctgccatgaacatgtataaactggatttcatttctcttgagtatatacctaggagtggaactgctggattacatggtaattttaggtttaactttggaggaactgccagacagttttccacagcagctgcaccattttgcatttccaccagcagtgtatgagggttccagtttatccacatgtttgcaacacttattaactgtcttttttattatagcctttctaatgaaagtgttatctcgtggtttggttttcacatacgcttttataaggcacttttcaagtgtttttttccc

SEQ ID NO: 5284 - DNA, 473 bp, Homo sapiens
ttttttggggggacagggtctcactttgggttgccccaggctggagtgcaatggcccaatcacaactcactgcagccttgacaataaatcagttttagaatattttcatgatttcagtctctctcttgacctgtgttgattttcattgccaccaaccagccccaggcaaccactaatctacttctgtctacagatttactacttctggacagctcatatcagtggaatcacataaattgtttttgtgcaggtttttcactagcgtgtcctgaagttcctccatgtcgtatttaacagttcattcttttattcctaagcagcttgccatggtgtgaatataacacatttctctctatgcattcatcagttgatgtgtccatttgaaacatttaggctatttccaatttttagttattaaagtaattattgtcatggttgctcaatttggtaaatttaccaagaatctttaaatt

SEQ ID NO: 5285 - DNA, 1204 bp, Homo sapiens
ggccgcagccacagcttgcacgttgcgccgggtgtgtctgtgcgtgccagctgcatctttgcgtaccatgtgtgcaaggctgtgtttggctgagtgttcatgtgggccgtgattgtgggcatgtttctgagtgtctgagtgatgcctgctggtgtgggctggtgggtgtgtctgcatgtgcgtgtgtgtctggggagtttcaaaggagaaagagggactcaccatcacgctggctcagccttaaaaaggtaggacatcctgacacgtgctgcaacatggatggaccttaaggacattgtgctgagtgaaacaagccagaggcaaaggaacaaacatgtgatttctcccagatgaggtttccggaggaggcagatctgtatggacagaaggtagcatggtggttgccggggcagggggaggagagaatggagaattagtgtttaatggggacagagtttcagttggggaaggtgaaaaggttctggagctggatgatggtgatggttggacaacactgtgcatgcacttaataccactgagctggacacctaaaaatgcttacaatggtaaatttcatgtatattttactacaatttttaaaaaattggctgggcgtggtggcttatgcctgtaatcccaacactttgggaggccaaggcgggaggattgcttgagctcaggagttcaacaccagcctgggcaatatggtgaaaccccgactctacgaaatatacaaaaattagcctggtgtggtggcttgcacctctaatcccacctactcagtaggctaaggcacaagaatctcttgaacctgggaggtggaggttgcagtaagccgagatcatgccactgcaacccagtctgggcgacagagcaagactctgtctcaaaaaataaaagataaataaaaaaattagaggccaggtgtggctcacacctgtactctcaacactttgggaggctgaggtgggaggatcgcttgaagtcaggcatttaagacatgcctaggcaacatagtgagaccttgactctacaaaaaaattcaaaagttaatgagacatggtggcatgtgcctgtagtcctagctgctggggaggctgaggtgggaggatcacttacgaccaggatttcaaggctgcagtgagctgtgattgcatcactgcactccagcctggtgacagagtgaggccctgtctcaaaaaaa

SEQ ID NO: 5286 - DNA, 1204 bp, Homo sapiens; identical to SEQ ID NO: 5285

SEQ ID NO: 5287 - DNA, 1204 bp, Homo sapiens
ggccgcagccacagcttgcacgttgcgccgggtgtgtctgtgcgtgccagctgcatctttgcgtaccatgtgtgcaaggctgtgtttggctgagtgttcatgtgggccgtgattgtgggcatgtttctgagtgtctgagtgatgcctgctggtgtgggctggtgggtgtgtctgcatgtgcgtgtgtgtctggggagtttcaaaggagaaagagggactcaccatcacgctggctcagccttaaaaaggtaggacatcctgacacgtgctgcaacatggatggaccttaaggacattgtgctgagtgaaacaagccagaggcaaaggaacaaacatgtgatttctcccagatgaggtttctggaggaggcagatctgtatggacagaaggtagcatggtggttgccggggcagggggaggagagaatggagaattagtgtttaatggggacagagtttcagttggggaaggtgaaaaggttctggagctggatgatggtgatggttggacaacactgtgcatgcacttaataccactgagctggacacctaaaaatgcttacaatggtaaatttcatgtatattttactacaatttttaaaaaattggctgggcgtggtggcttatgcctgtaatcccaacactttgggaggccaaggcgggaggattgcttgagctcaggagttcaacaccagcctgggcaatatggtgaaaccccgactctacgaaatatacaaaaattagcctggtgtggtggcttgcacctctaatcccacctactcagtaggctaaggcacaagaatctcttgaacctgggaggtggaggttgcagtaagccgagatcatgccactgcaacccagtctgggcgacagagcaagactctgtctcaaaaaataaaagataaataaaaaaattagaggccaggtgtggctcacacctgtactctcaacactttgggaggctgaggtgggaggatcgcttgaagtcaggcatttaagacatgcctaggcaacatagtgagaccttgactctacaaaaaaattcaaaagttaatgagacatggtggcatgtgcctgtagtcctagctgctggggaggctgaggtgggaggatcacttacgaccaggatttcaaggctgcagtgagctgtgattgcatcactgcactccagcctggtgacagagtgaggccctgtctcaaaaaaa

SEQ ID NO: 5288 - DNA, 504 bp, Homo sapiens
caactgggaggcctcccttctccagacccatggggacaacaccacccagctactggttctataagctgctgtatggctctggctagcccattcagagaaagcctctgaaagtacaaggaaaaaaatcagtccaagagctgtgaacaattagtgagccgattacaataccaagaccacaggcagacctggaaggctaagtgagcccaggtgtgaagttcaagcttactttacttctgggccacttcctggctggtctctttccctggcccttatctttctcctggtctgtcttctcttctcaccccctttctttactctttcttccttctcctgcatcgtactccacccccactccagctattacacagaatcgcgagaatgttggattattcattttatttatgatgttttcttttttgtaaaaatagagacaaggtctcactatgtggcccaggctggtcttgaactcctggcctcaagcaatcctcgtgccttggcctctta

SEQ ID NO: 5289 - DNA, 332 bp, Homo sapiens
caactgggaggcctcccttctccagacccatggggacaacaccacccagctactggttctataagctgctgtatggctctggctagcccattcagagaaagcctctgaaagtacaaggaaaaaaatcagtccaagagctgtgaacaattagtgagccgattacaataccaagaccacaggcagacctggaaggctaagtgagcccaggtgtgaagttcaagcttactttacttctgggccacttcctggctggtctctttccctggcccttatctttctcctggtctgtcttctcttctcaccccctttctttactctttcttccttctcct

SEQ ID NO: 5290 - DNA, 332 bp, Homo sapiens; identical to SEQ ID NO: 5289

SEQ ID NO: 5291 - DNA, 5669 bp, Homo sapiens
ggatcaacaactgcgtgggaagccggaattattggtgaggggcacagaggggatggccggcacgggccaggcttgggggaatttggaagggaggggtctgtgggcaggggtcatcgtgttgaaagggtggagggtcctcttggggccgcgtccctgtcctgatgtggtggcgcttggtgcctgcgtgccccggcctcctgtctggctctggggctgtggtgcagccgtccctggacaagctcatccgcatagagtaagtccctggaggccccccgggggcacttgcggggccacgctggctgaggcctcctgaccacgctgtcctgggctgggctgccttctctccacccaggctgaggctcatccagcacaagggtggggccacggaagggcagtgggcacccagcgcagatgggcgagaggtgtttcccctgagcatggtcgaggctcacagatgagaggtgtttccctgagcacggtggaggctcatagacgagaggtgtttcccctgagcacggtggagatgcaaggaagagagatgtttccctgagcacggtggaggcttacagatgagaggtgtttccactgagcatggtggaggctcacaggcgagaggtctttcccctgagcacggtggaggcgcaaggatgagaggtgtttccactgaggatggtggaggtgcaagaacgagaggtgtttcccctgagcacggtggaggctcacagatgagacgtgtttcccctgagcacggtggaggctcatagacgagaggtgtttcccctgagcacggtggaggctcaagaacgagaggtgtttcccctgagcatggtggaggctcaaggacgagaggtgtttcccctgagcatggtggaggctcacaggcgagaggtatttcccctgagcacggtggaggcgcaaggatgagaggtgtttccactgaggatggtggaggtgcaagaacgagaggtgtttcccctgagcacggtggagactcacagatgagacgtgtttcccctgagcacggtggaggctcaagaacgagaggttgtttcccctgagcacggtggaggctcatagatgagaggtgtttcccctgagcacagtggaggatccagggactctcaaggccccgtgtgctgagccccggctgtctgcagcactgtattgtgaagatcaccagggaaaagaaccacgcctgctccccagctactctgtgctgacctgaaagaggccttggtgtgcgtgggagtggggaccaacgttgcctggtgtcacaggacgcaccgggcggtccctgccctgcctccctgccatcccgtctggagcacagcatgtgtccagagaggctgagcagcccggcagggacagagaggttgcatgaccgcacagcgagtccagaggctgcgtgagatggtaggggccggggagacccaccggcctcctcccctggagaagagcagctccacgatggccaaggtggggccagctcctctggctcatgctagccccaggtgccacttccttctggactcattctgctctggtgcctcgagctggctcaatctggcgggtcctggtggggaaggtgagggggtgagggcccacaggcaggtggcaaggagagggtctgccttcctcaggaggggtgctggagagggaccacgtgggtgccaagtgtagacaccgcctgggtgtgggaaaggggcatcaggagagcagggccggggtcatgggcgccctcagctccaggcagcagccaacgccggcatctgtgccaacctcgcttctgtcccttcatccgccagaggcggagagagcaacggcattgagagcaagatgaggaaagttgaggagctgatggcagagcccccgcgagggaggccgagctgatggcggagcccccatggggaggcccagctgatggcagagcccctgtgagggaggctgcatacttcgtagtgataagagaggaagggggacggaaagaaggcaggcggcgctggtgtcctgggaagactgtgagcgctggcctcggactctgcaggttaaacacaggcagcaggggcaggaggctgtgctaaccaagaggagaatgtccctgggtggctgcggggagaggaggccccgcgtgaatggctctgccccatcctgtgggcttttgtctctgtggtcttagagacccgccttctttcctggatgaagaggggagtcctgtccagacagtaggatgaagatgaggggtctttactccccacaagtgggctcaagcccaggaggactgggggcagggtagggcgtgtccgctgcctggaggggctgctgcttgggaaacctaagctgtgagagggaaggcagtatgagggagcagcagtcagggagccgctcatgcctggagccacccgtcacccctggattatccagaagactcttggagggaggaggagcgcggggaaggcagctgtgccctaactgcctcttcggaggactgcggcattcatgctctggcctccagttgaaaatagaaaaagggatttaaacaagcttaggtgaacataatacaatggaaaggattaaaggaggttaaaggatacttttaaaaaaatatcatcatggcagaaagaccaagggaagatggtttagtcaaagtatgttccaggaactgctgcccagaattggtttttgtggatggattattctctgcatcttttgagcaaagacgagagactgggagtggatttggtctcacgtctacagcatggacatcgcttttggctcagatttgcacgagacccttggagaaggggggactgcagccgaggtgtggccgggctcctccagggcctcctcagcccgagttccctttgggtgcagagatccaggtccctgagcctgcaggccctcctgggtgccacggcactctcgtggctctccccttccctggcttcagtgcctttgcccagcatggtgccatggagaccccagcacagaccatgctcagggccccccgagtggaccgagcccgcgtgctccttggctggtagggaggcctgtctgcatcaggtggagtcgggaggtgcgggcagaggccccagagctgtgacactggagacgccgtgtgaccctcatgctccgctggtaggcttgggcgagtcgcaccgcatctctgacctcactttccccactcgtgaaaagggctggttccccctcctcacaacctccttgttccttgtggggattaaaggcaatcacgtttgcaagaagcgctgcctgaattgtcgggcggtgtgctggtgggaatgtcccacggccacccctctccagcgagaggcctggagacctgggggggcgtcacaggacggcacagagacaggagcctgagcttccaggcgcggtcgggagcagggtttgaggccagcgttgggcggtggccaggcgccctcaagtggacgcccacactgacctgtcacctccaccctgcgggctccagatgccctgcgcgtccccacccctgcgccccccacacctgccctgcatgcccccgcccctgccccagatgccctgcgtgtccctgcccctgcctctgcaccccccacctgccctgcatgcccccgcccctgcctcagatgccctgcgtgtccctgcccctgcctccccgcccccacacctgtcccacatgccccgcatgcccctgccgctgtgccccccacgcccgcccctgcccaccccgtgcacaccccctgcccccgtgccccccacacctgcccctgcgcccccactgctcccacgtccccacccccatgcctgcctgtgtgtctcccggcaggttcttcttcagcactgtggcctcggccacagctggcatgctctgcctgatcgccatcctgctgtatgtcctcgtccagtacctcgtgaaccccggggtgctccgcacggaccccaggtatgaaggtacgtggccgccgctctcaaggggcctcatcctcgcctccagccgtctttccgggtggtagtatcgggtctggggtggtcggcccctcttgtcccagggagaggccggggcaggcagccccatgcaggctctgacctggcccgacggcagcagcccagtgttcatacagcccagcagcccccagcgcgcgggaggcaggctcggggagggcgctggccacgctgctctgtagatgctgccaggtcgtgtcaggcgagagacagtggggtccacctctgcccctgccctccgcagtcatccctgtagcacctgtcacaccatcctgtggggccatgtagttgtgggagggtgggggtgcccatcctgcaggagcagcccatggggagggagagtggaggcagcgctgagggtgctgggctgtaggctgcggtgcgctgaggcccttggccaagtgggcccggagcctgggcctcgggaaccgatgctcacactgagccactggagagacgtggcggtgaggactgtgggctccagaggcgagtccacgcctaacccagatcccgtgatgccagcatcctcgggaaatgggcctgtggctgtgacttaatatctgaggtgggagggtcgtgctgggatgtcccagggggcccaaatccagccacgagtgtgcttgtaagagaaaggagagacacagaggggaggtggcctcgtgaggatggaggcaggggtggagtcacacagccacagcccggggtcgccgggagccacaggagctggcaaaattgggaagacctccctggaccctgcggaggcagcgtgcccaactgtcctgcagctggacgtcagagccctgcctgcctcagactgcaagagtctgctggagaagctgcccccacccgccaccatttgatgtatttattgcagcagcgccaggaccctgaccaggaggacctgggccagagaagcccctcggggtgcaggacaagactgccagtctcagccccaggcatggctgcacccgcactgcacacagcccgggtggcgagacagggaggacttgcctgcccttgttccagaacattccggagccaacacggtgtgacatttttttcaaggatgagctttgccagctccacgtggaagtccctaaagctcctccttccacttcgaagcgtgactgatgcctccagggcctcacagccgcttctgaagcacttcctgaaagccagctccaccctggcgaggccctgacctcagcggacccaagcccaggacgatgcctgttgcgttcttctcccccagtagcaagtcaccttccccagcagcctccatgttgtctgggctctccctgtgggggatgccaggggagagtgagagagcagaggtggccaagatggcatgtgctgccttctctcctggaacatgctgcttccacagggcagtgccagtgtctccgtgtgaattcattgattgtggcctgagtgaattcctgggtttgctgttccagatgattctgcagggcttcaaaaccagcaaggccctgagcaaagctgctccttcttctcatgggctgaactcatcgtgatgtcactggctaaggggggcagcatggggtccagcccggcccaggcacatggagctgcggtcctgtcaggctgagtgtggtgtttgccttctaggatggccccgaggccaccagttccagagagggtctgtcacc

SEQ ID NO: 5292 - DNA, 5339 bp, Homo sapiens
  SITE (3656): n equals a,t,g, or c
ggatcaacaactgcgtgggaagccggaattattggtgaggggcacagaggggatggccggcacgggccaggcttgggggaatttggaagggaggggtctgtgggcaggggtcctcgtgttgaaagggtggagggtcctcttggggccacgtccctgtcctgatgtggtggcgcttggtgcctgcgtgccccggcctcctgtctggctctggggctgtggtgcagccgtccctggacaagctcatccgcatagagtaagtccctggaggccccccgggggcacttgcggggccacgctggctgaggcctcctgaccacgctgtcctgggctgggctgccttctctccacccaggctgaggctcatccagcacaagggtggggccacggaagggcagtgggcacccagcgcagatggacgagaggtgtttcccctgagcatggtggaggctcacagatgagaggtgtttcccctgagcacggtggaggctcatagacgagaggtgtttcccctgagcacggtggagatgcaaggaagagagatgtttccctgagcacggtggaggctcacaggcgagaggtctttcccctgagcatggtggaggctcacaggcgagaggtgtttctcctgagcatggtggaggcacaaggatgagaggtgtttcccctgatcacggtggaggctcacagatgagaggtctttcccctgagcgtggtggaggctcataggcgagaggtgtttcccctgagcacggtggaggctcatagacgagaggtgtttcccctgagcacggtggaggctcatagatgagacgtgtttcccctgagcatggtggaggctcatagacgagagatgtttcccctgagcatggtggaggctcatagatgagaggtgtttcccctgagcacagtggagactcatagatgagacgtgtttcccctgagcacggtggaggctcaagaacgagaggttgtttcccctgagcacggtggaggctcatagatgagaggtgtttcccctgagcacagtggaggatccagggactctcaaggccccgtgtgctgagccccggctgtctgcagcactgtattgtgaagatcaccagggaaaagaaccacgcctgctccccagctactctgtgctgacctgaaagaggccttggtgtgcgtgggagtggggaccaacgttgcctggtgtcacaggacgcaccggggggtccctgccctgcctccctgccatcccgtctggagcacagcatgtgtccagagaggctgagcagcccggcagggacagagaggttgcatgaccgcacagcgagtccagaggctgcgtgagatggtaggggccggggagacccacccgcctcctcccctggagaagagcagctccacgatggccaaggtggggccagctcctctggctcatgctagccccaggtgccacttccttctggactcattctgctctggtgcctcgagctggctcaatctggcgggtcctggtggggaaggtgagggggtgagggcccacaggcaggtggcaaggagagggtctgccttcctcaggaggggtgctggagagggaccacgtgggtgccaagtgtagacaccgcctgtgtgtgggaaaggggcatcaggagagcagggccggggtcatgggcgccctcagctccaggcagcagccaacgccggcatctgtgccaacctcgcttctgtcccttcatccgccagaggcggagagagcaacggcattgagagcaagatgaggaaagttgaggagctgatggcagagcccccgcgagggaggccgagctgatggcggagcccccatggggaggcccagctgatggcagagcccctgtgagggaggctgcatacttcgtagtgataagagaggaagggggacggaaagaaggcaggcggcgctggtgtcctgggaagactgcgagcgctggcctcggactctgcaggttaaacacaggcagcaggggcaggaggctgtgctaaccaagaggagaatgtccctgggtggctgcggggagaggaggccccgcgtgaatgggtctgccccatcctgtgggctttggtctctgtggtctctggtctctgtggtcttagagacccgccttctttcctggatgaagaggggagtcctctccagacagtaggatgaggatgaggggtctttactccccacaagtgggctcgagcccaggaggactgggggcagggtagggcgtgtccactgcctggaggggctgctgcttgggaaacctaagctgtgagagggaaggcagtatgagggagcagcagtcagggagccgctcacgcccggagccacccctcacccctggattatccagaagactcttggagggaggaggagcgcggggaaggcagctgtgccctaactgcgtcttcggacgactgcggcattcatgctctggcctccagttgaaaatagaaaaagggatttaaacaagcttaggtgaacataatacaatggaaaggattaaaggaggttaaaggatactttaaaaaaaatatcatcatggcagaaagaccaagggaagatggtttagtcaaagtgtgttccaggaactgctgcccagaattggtttttctggatggattattctctgcatcttttgagcaaagacgagagactgggagtggatttggtctcaggtctacagcatggacatcgcttttggctcagatttgcacaagacccttggagaaggggggactgcagccgaggtgtggccgggctcctccagggcctcctcagcctgagttccctttgggtgcagagatccaggtccctgagcctgcaggccctcctgggtgccacggcactctcatggctctccccttccctggcttcagtgcctttgcccagcatggtgccatggagaccccagcacagaccatgctcagggccccctgaggggacccagcctgcgtgctccttggctggtagggaggcctgtctgcatcaggtggagtcgggaggtgcgggcagaggccccagagctgtgacactggagacgccgtgtgaccctcatgctccgctggtaggcttgggcgagtcgcaccgcatctctgacctcactttccccactcgtgaaaagggctggttccccctcctcacaacctcattgttccttgtggggattaaaggcaatcacgtttgcaagaagcactgcctgaattgtcaggcggtgtgctggtgggaatgtcccacggccacccctctccagcgagaggcctggagacctgggggggcgtcacaggatggcacagagacaggagcctgagcttccaggcatggtcgggagcagggtttgaggccagcatcgggcagtggccaggagccctctctcaagtggacgcccacgctgacctgtcacctccaccctgcgggctccagatgccctgcgcgtccccatccctgcctctgcaccccccaccctgccctgcatgcccccacccctgccccagatgccctgcgtgtccctgcccctgcctctgcaccccccacctgccctgatgcccccgccctgcctcagatgccctgcgtgtccctgcccctgcctccccgcccccacacctgtcccacacctgcccttgcgtgccccctgccgctgtgcccccancgcccgcccctgcccaccctgtgcacaccccctgcccccgtgccccccacacctgcccctgcgcccccactgctcccacgtcccacccccatgcctgcctgtgtgtctcccggcaggttcttcttcagcactgtggcctcggccacagctggcatgctctgcctgatcgccatcctgctgtatgtcctcgtccagtacctcgtgaaccccagggtgctccgcacggaccccaggtatgaaggtacgtggccgccgctctcaaggggcctcatcctcgcctccagccgtctttccgggcggtagtatcgggtctggggtggtcggcccctcttgtcccagggagaggccggggcaggcagccccatgcaggctctgacctggcccgacggcagcagcccagtgttcatacagcccagcagcccccagcgcgcgggaggcaggctcggggagggcgctggccacgctgctctgtagatgctgccaggtcgtgtcaggcgagagacagtggggtccacctctgcccctgccctccgcagtcagccctgtagcacctgtcacaccatcctgtggggccatgtagctgtgggagggtgggggtgcccatcctgcaggagcagcccatggggagggagagtggaggcagcgctgagggtgctgggctgtaggctgcggtgtgctgaggcccttggccaagtgggcccggagcctgggcctcgggaaccaatgctcacactgagccactggagagacgtggcggtgaggactgtgggctccagaggcgagtccacgcctaacccagatcccgtgatgccagcatcctcgggaaatgggcctgcggctgtgacttaatatctgaggtgggagggtcatgctgggatgtcccagggagcccaaatctagccacgagtgtgcttgtaagagaaaggagagacgcagaggggagggggcctcgtgaggatggaggcaggggtggagtcacacagccacagcccggggtcgcccggagccacaggagctcgcagaggtgggaggacctccctggaccctgcggaggcagcgcgctcaactgtcctgcagctggacgtcagagccctgcctgcctcagactgcaagagtctgctggagaagctgcccccacccgccaccatttgatgtatttattgcagcagcgccaggaccctgaccaggaggacctgggccagagaagcccctcggggtgcaggacaagactgccagtctcagctccaggcatggctgcacccgcactgcacacagcccgggtggtgagacagggaggacttgcctgcccttgttccagaacattccggagccaacacggtgtgacatttttttcaaggatgagctttgccagctccacgtggaagtccctaaagctcctccttccacttcgaagcgtgactgatgcctccagggcctcacagccgcttctgaagcacttcctgaaagccagctccaccctggcgaggccctgacctcagcggacccaagcccaggacgatgcctgttgcgttcttctccccctgtagcaagtcaccttccccagcagcctccatgttgtctgggctctccctgtgggggatgccaggggagagtgagagagcagaggtggccaagatggcatgtgctgccttctctcctggaacatgctgcttccacacggca

SEQ ID NO: 5293 - DNA, 451 bp, Homo sapiens
agtaaggaaggggtgggcactgtgaccctggcacttagtaaggaaggggtgggtgctggggccctggcacttaggaaaggatgggtgctggggcccggcagagccggcaggcactgtgaccccagcacttaggaaggggtgggtgctgtgaccccggcacttaggaaggggtgggcactgtgaccctggcactaaataaggaagggatgggtgctgtgaccctggcacttagtgaggaaggggtgggcactgtgaccccggcacttagtgaggaaggggtgggcactgtgaccccggcacttagtgaggaaggggggtgggcgctgtgaccccggcacttaggaaggggtgggcgctgtgaccctggctcttagtgagcaaggggtgggcgctgtgaccccagcacttaggaaggggtgggcactgtgaccccggcacttagtgacaatgt

SEQ ID NO: 5294 - DNA, 1186 bp, Homo sapiens
tgccattctgccttgcctggccctctgccattctgcattacgcctgatttttggaagtgttgtggttttgagtgttggcagcccagtgtcacagaggaccatatcttagaaatgaccccaggtgagagctgtggctttcctgttctatttgaaggcggctgttttagggtgcagagggtccagggacacagcgtgggccatgaggaagggatggatgctgggactcggcagagccagcaggcgctgtgaccctggtacttagtgaggaaggggtgggtgctgtgacctcggtacttaatgaggaaggggtgggcactgtgaccctggcacttagtgaggaaggggtgggcactgtgaccccagcacttagtgaggaaggggtgggtgctgtgaccccagcacttaggaaggggtaggcactgtgaccccggcacttagtgaggaaggggtgggcgctgtgaccccagcacttaggaaggggtgggcactgtgaccccggcacttagtgaggaagaggtgggccctgtgaccccagaacttaggaaggggtggatgctggagccctggcacttagtgaccctgttggagcgtcacctcccagatccataaagcagggatcatgaaaaccaacctcagtcagcagggcccatggggcactcaggtaaggaaggtgtccaccagggcagggaggcatccctcgtgctggctgtctccacgccgccccatccccagcaagctctggtctgtgacatccacctgatgtggcacccgtcagcaggtgctggacacagtgtctctcccttgtctccccagatgtcaagaatatgaacacgtggctgctgttcctccccctgttcccggtgcaggtgcagactctgatagtcgtgatcatcaggatgctcgtgctcctgctggaccttcttggcttggtgcagctgggccagctgctcatcttccacatctacctgagtatgtcccccaccctaagcccccgatccccccaagcctggttggtcagagctgctcatcgttacacctctacttgagtatgtccctaaccctgagccccccacacctggggccagagtctttgtcccccgtgtgcgcatgtgttcagggtcagcctctcccagaagtgagatcatggacaaaaagggcaaatcacaggaagaaattaaatccatga

SEQ ID NO: 5295 - DNA, 3350 bp, Homo sapiens
tattaatatgacatttgtcattgtcactgatttttttaaaaaagcaatgcacatgttggttgtggctgttttccgcatgctatcttcatatctaaatgcttcattaattatccgagcctccggagaattaactctattacgtttgtatagtaagtttgtaaactgcttggcaaactgattaagaaataatttgcaataccgtgctactaaagtggcaggtttctggtagaaattgtgcgagtccaatttggagttttaagttccttgattgatgaaactaaaaaggcaattttggaaaaagagagggggaaaagtagatcacttatcttagcaaacggttgaaaatatgtctgtcctctgtggccccaaatccagtgaaagaaattctcccagtaaaagttgcttcctaactctgtttttctcagaatacctcttacctttctcaaagaaagcttcaaccaccatcatcagaaagaaggtggcctaaaaactgacacatggccagtgcccggaggggtctggaggcataagtctagatgcccagagagcatccaggcactgaactgctcagagcttgagatgaaatgacatacaagcttcagggtaaaactgtctactagcaagattacctccctcaattctaccattgcagatttcttctgaccccaaatgcaaccttacagagaatgctgaatgaggaaggccaattccttacaatgatggcagaacccccaagcgaatgccctattgaggagaaggacatcactgtatttggaattctgcctgctagtgatagctcacacatcacatcccagaatcccactcccaatgcattatttcctgaggcaagaacttaaggtcctcacctaattcctccatcacaaccattaactcttattggacaagctcctcctgtgagtagggcctgtactcacttcctcttagatcataattccatcttcaagagactgatttccagaatagtaatctttttccagcgttctctcttctccaatgccctggttgttatttttcccacctctcctaatattgatcttcttgtcttttggttagaactgcaacttcggagttgagttcatttcctattgctgctcaattcagtagcaacatagctggcttgttcccagacccaggaagtataagtcattgacagtttcctgagtggctctgccaatccataccacccttggtactgtgaaaaggcttcttggcagccaggtggcattgaggatggtattcagggcgctttccttctgtcatatagttgtgggatctctaccaagtgtgaaggtgaatgaggtaagggagatcagaaccatgcttcctggtttttcatacatccaaggaagaagtcctggtgtgggttgtttgacaccttctttccactttcaccttttattttttattccttcctttctacccccaaccagtcgagcaaatgagcaattttgtgtttctaatacaggatctggaagtagtgctttctaatcctcatttcctgtaggatgttcctgcactataacaagattatgttttcttccttctgcagcagctttctgcttcttgggtactactagctattgttcaattcaggtgaggcctgtgatgacatatatgtagcatgtgctctgcgctccctgcaagctgagcagatacaaccaatgcatcactgtatactcttgctgagaatgtggatgcagcctcacagatctttgcaacactccaaccagccaggaccagttgatcagaactgatcttattggtctgataaccaatcttatttgtgaactgattcatatctgtctttccactcttggttctcttgccgtagaacaaaaacagtttaggaagcataattacgaacatttaggaaccaatatgtataagtaattcggagactccaattcacctgcccctcccccatcccaggttgtggaggctcgaggaagctgacttcttaggctaaaggacaaaaaaatctctttacctccttggccattttcatgttctctgccaattactataggcagtcttcattttgcagaggtgaggtaagacttcatcttattcttcatgtaatcccaccttctaacaaaaaataaataaatatttaaattccaaggagaagtgttctttgtgtatttctagcagaaaacagatgcttaagcctaagaaggaagatccgtccatgacaaaggaaagtggaaaactgaaccagttatctgaatacttcatgccaggacagttgctattagcaactgttttgcaccttcagggctttaaaatgggctctgcagacagcatttgcatatgcaagactcagtagccaagcctccactgccaattgttgaaggcagtttcagatcgccaccttttgaggtacatttctttaagcacaagagaagtagaaatggcctttgccttgtctccagtggtttgtccctctggtgcctcagcagataccagagcttattcttatgaccatttggaagtagtcctcaaagtaaagatcaagaaaaaattggattctttttccattttctcataatagtagcctagtcaacacaagactcccataaaatatgactcactattgggagccatactattttataagcttacttcctgctgacaaaactagctttcctcaaggaaatataaaggaggggaaagtcacatagtgttaggaaaacattcctgtgttttgaatacgatgaatccataggatagagaaaaatctgcttgttctattctgagagttctctgagatatcccttcactctgcttggcatttggccattgatattcaacaggtcactgaccaagcttttctaaatttttcagagagagttacttaccagtaaggtctgttcttaaacctacctagttgattttcatatctttccataaagtgtcatgattctgtcatagaccctgacttaacattgtaaggactatgagtcctccattttttaattaatttttttttagcaaattaggacttcggcaggttttcctctcctaaactcattctttcctccacaggattgctttgtccatctcctgctttcatttcaagtgcataaacaaaacctcaaagggcctgggaaggtgaggcaggccagagtctgtgttctgtgttgagtgtcaagctatttgttaagaaggtctgcaacaggcctttggtgtgggctctgccagagactgttctgaacactttgcttgagatccgtgccctgtaaaatggatatgatgttttactgatgtctgtaatacatttgtaaacttccaataaaatttgaataaaagaaatgttgccattcttctca

SEQ ID NO: 5296 - DNA, 3349 bp, Homo sapiens
tattaatatgacatttgtcattgtcactgatttttttaaaaaagcaatgcacatgttggttgtggctgttttccgcatgctatcttcatatctaaatgcttcattaattatccgagcctccggagaattaactctattacgtttgtatagtaagtttgtaaactgcttggcaaactgattaagaaataatttgcaataccgtgctactaaagtggcaggtttctggtagaaattgtgcgagtccaatttggagttttaagttccttgattgatgaaactaaaaaggcaattttggaaaaagagagggggaaaagtagatcacttatcttagcaaacggttgaaaatatgtctgtcctctgtggccccaaatccagtgaaagaaattctcccagtaaaagttgcttcctaactctgtttttctcagaatacctcttacctttctcaaagaaagcttcaaccaccatcatcagaaagaaggtggcctaaaaactgacacatggccagtgcccggaggggtctggaggcataagtctagatgcccagagagcatccaggcactgaactgctcagagcttgagatgaaatgacatacaagcttcagggtaaaactgtctactagcaagattacctccctcaattctaccattgcagatttcttctgaccccaaatgcaaccttacagagaatgctgaatgaggaaggccaattccttacaatgatggcagaacccccaagcgaatgccctattgaggagaaggacatcactgtatttggaattctgcctgctagtgatagctcacacatcacatcccagaatcccactcccaatgcattatttcctgaggcaagaacttaaggtcctcacctaattcctccatcacaaccattaactcttattggacaagctcctcctgtgagtggggcctgtactcacttcctcttagatcataattccatcttcaagagactgatttccagaatagtaatctttttccagcgttctctcttctccaatgccctggttgttatttttcccacctctcctaatattgatcttcttgtcttttggttagaactgcaacttcggagttgagttcatttcctattgctgctcaattcagtagcaacatagctggcttgttcccagacccaggaagtataagtcattgacagtttcctgagtggctctgccaatccataccacccttggtactgtgaaaaggcttcttggcagccaggtggcattgaggatggtattcagggcgctttccttctgtcatatagttgtgggatctctaccaagtgtgaaggtgaatgaggtaagggagatcagaaccatgcttcctggtttttcatacatccaaggaagaagtcctggtgtgggttgtttgacaccttctttccactttcaccttttattttttattccttcctttctacccccaaccagtcgagcaaatgagcaattttgtgtttctaatacaggatctggaagtagtgctttctaatcctcatttcctgtaggatgttcctgcactataacaagattatgttttcttccttctgcagcagctttctgcttcttgggtactactagctattgttcaattcaggtgaggcctgtgatgacatatatgtggcatgtgctctgcgctccctgcaagctgagcagatacaaccaatgcatcactgtatactcttgctgagaatgtggatgcagcctcacagatctttgcaacactccaaccagccaggaccagttgatcagaactgatcttattggtctgataaccaatcttatttgtgaactgattcatatctgtctttccactcttggttctcttgccgtagaacaaaaacagtttaggaagcataattacgaacatttaggaaccaatatgtataagtaattcggagactccaattcacctgcccctcccccatcccaggttgtggaggctcgaggaagctgacttcttaggctaaaggacaaaaaaatatctttacctccttggccattttcatgttctctgccaattactataggcagtcttcattttgcagaggtgaggtaagacttcatcttattcttcatgtaatcccaccttctaacaaaaaataaataaatatttaaattccaaggagaagtgttctttgtgtatttctagcagaaaacagatgcttaagcctaagaaggaagatccgtccatgacaaaggaaagtggaaaactgaaccagttatctgaatacttcatgccaggacagttgctattagcaactgttttgcaccttcagggctttaaaatgggctctgcagacagcattagcatatgcaagactcagtagccaagcctccactgccaattgttgaaggcagtttcagatcgccacctttgaggtacatttctttaagcacaagagaagtagaaatggcctttgccttgtctccagtggtttgtccctctggtgcctcagcagataccagagcttattcttatgaccatttggaagtagtcctcaaagtaaagatcaagaaaaaattggattctttttccattttctcataatagtagcctagtcaacacaagactcccataaaatatgactcactattgggagccatactattttataagcttacttcctgctgacaaaactagctttcctcaaggaaatataaaggaggggaaagtcacatagtgttaggaaaacattcctgtgttttgaatacgatgaatccataggatagagaaaaatctgcttgttctattctgagagttctctgagatatcccttcactctgcttggcatttggccattgatattcaacaggtcactgaccaagcttttctaaatttttcagagagagttacttaccaataaggtctgttcttaaacctacctagttgattttcatatctttccataaagtgtcatgattctatcatagaccctgacttaacattgtaaggactatgagtcctccattttttaattaatttttttttagcaaattaggacttcggcaggttttcctctcctaaactcattctttcctccacaggattgctttgtccatctcctgctttcatttcaagtgcataaacaaaacctcaaagggcctgggaaggtgaggcaggccagagtctgtgttctgtgttgagtgtcaagctatttgttaagaaggtctgcaacaggcctttggtgtgggctctgccagagactgttctgaacactttgcttgagatccgtgccctgtaaaatggatatgatgttttactgatgtctgtaatacatttgtaaacttccaataaaatttgaataaaagaaatgttgccattcttctca

SEQ ID NO: 5297 - DNA, 6438 bp, Homo sapiens
tattaatatgacatttgtcattgtcactgatttttttaaaaaagcaatgcacatgttggttgtggctgttttccgcatgctatcttcatatctaaatgcttcattaattatccgagcctccggagaattaactctattacgtttgtatagtaagtttgtaaactgcttggcaaactgattaagaaataatttgcaataccgtgctactaaagtggcaggtttctggtagaaattgtgcgagtccaatttggagttttaagttccttgattgatgaaactaaaaaggcaattttggaaaaagagagggggaaaagtagatcacttatcttagcaaacggttgaaaatatgtctgtcctctgtggccccaaatccagtgaaagaaattctcccagtaaaagttgcttcctaactctgtttttctcagaatacctcttacctttctcaaagaaagcttcaaccaccatcatcagaaagaaggtggcctaaaactgacacatggccagtgcccggaggggtctggaggcataagtctagatgcccagagagcatccaggcactgaactgctcagagcttgagatgaaatgacatacaagcttcagggtaaaactgtctactagcaagattacctccctcaattctaccattgcagatttcttctgaccccaaatgcaaccttacagagaatgctgaatgaggaaggccaattccttacaatgatggcagaacccccaagcgaatgccctattgaggagaaggacatcactgtatttggaattctgcctgctagtgatagctcacacatcacatcccagaatcccactcccaatgcattatttcctgaggcaagaacttaaggtcctcacctaattcctccatcacaaccattaactcttattggacaagctcctcctgtgagtagggcctgtactcacttcctcttagatcataattccatcttcaagagactgatttccagaatagtaatctttttccagcgttctctcttctccaatgccctggttgttatttttcccacctctcctaatattgatcttcttgtcttttggttagaactgcaacttcggagttgagttcatttcctattgctgctcaattcagtagcaacatagctggcttgttcccagacccaggaagtataagtcattgacagtttcctgagtggctctgccaatccataccacccttggtactgtgaaaaggcttcttggcagccaggtggcattgaggatggtattcagggcgctttccttctgtcatatagttgtgggatctctaccaagtgtgaaggtgaatgaggtaagggagatcagaaccatgcttcctggtttttcatacatccaaggaagaagtcctggtgtgggttgtttgacaccttcttttcccactttcaccttttattttttattccttcctttctacccccaaccagtcgagcaaatgagcaattttgtgtttctaatacaggatctggaagtagtgctttctaatcctcatttcctgtaggatgttcctgcactataacaagattatgttttcttccttctgcagcagctttctgcttcttgggtactactagctattgttcaattcaggtgaggcctgtgatgacatatatgtagcatgtgctctgcgctccctgcaagctgagcagatacattcaatgcatcactgtatactcttgctgagaatgtggatgcagcctcacagatctttgcaacactccaaccagccaggaccagttgatcagaactgatcttattggtctgataaccaatcttatttgtgaactgattcatatctgtctttccactcttggttctcttgccgtagaacaaaaacagtttaggaagcataattacgaacatttaggaaccaatatgtataagtaattcggagactccaattcacctgcccctcccccatcccaggttgtggaggctcgaggaagctgacttcttaggctaaaggacaaaaaaatctctttacctccttggccattttcatgttctctgccaattactataggcagtcttcattttgcagaggtgaggtaagacttcatcttattcttcatgtaatcccaccttctaacaaaaaataaataaatatttaaattccaaggagaagtgttctttgtgtatttctagcagaaaacagatgcttaagcctaagaaggaagatccgtccatgacaaaggaaagtggaaaactgaaccagttatctgaatacttcatgccaggacagttgctattagcaactgttttgcaccttcagggctttaaaatgggctctgcagacagcatttgcatatgcaagactcagtagccaagcctccactgccaattgttgaaggcagtttcagatcgccaccttttgaggtacatttctttaagcacaagagaagtagaaatggcctttgccttgtctccagtggtttgtccctctggtgcctcagcagataccagagcttattcttatgaccatttggaagtagtcctcaaagtaaagatcaagaaaaaattggattctttttccattttctcataatagtagcctagtcaacacaagactcccataaaatatgactcactattgggagccatactattttataagcttacttcctgctgacaaaactagctttcctcaaggaaatataaaggaggggaaagtcacatagtgttaggaaaacattcctgtgttttgaatacgatgaatccataggatagagaaaaatctgcttgttctattctgagagttctctgagatatcccttcactctgcttggcatttggccattgatattcaacaggtcactgaccaagcttttctaaatttttcagagagagttacttaccagtaaggtctgttcttaaacctacctagttgattttcatatctttccataaagtgtcatgattctgtcatagaccctgacttaacattgtaaggactatgagtcctccattttttaattaatttttttttagcaaattaggacttcggcaggttttcctctcctaaactcattctttcctccacaggattgctttgtccatctcctgctttcatttcaagtgcataaacaaaacctcaaagggcctgggaaggtgaggcaggccagagtctgtgttctgtgttgagtgtcaagctatttgttaagaaggtctgcaacaggcctttggtgtgggctctgccagagactgttctgaacactttgcttgagatccgtgccctgtaaaatggatatgatgttttactgatgtctgtaatacatttgtaaacttccaataaaatttgaataaaagaaatgttgccattcttctcagccctccctcactttccagattttaggggtggtctctgcctttgagcatttcaacaaagaaaagaaaggacacaggtatggagggatgagttttactatgaaatattaacctgattgtttaaatcagggtttctaagcctcagcaatattgacgtcttgtgctagttaattctcggttgcagagggctgtcctgtgcattgtaggatgtttagcaacatcgctgacttctactcactagatgccagtagcagcccccagaaactgtgacaactaaaaatgtctcccatcacaaccattaggatggcagttattaaaaataacaacaaatgtgggtgaggatgtggagcaattggaacacttgtacactgttggtgggaatgtaaaatgatgtagtgctgtggaaaacagtatggcagttcctcaaaaaaaattaaaaatagaattactaccatatgctacttctgggctatacccaaaagaattgacagcagggtctccaaagagatacttgtacacccatattcataaaagcagcattcacaatatccaaaaagtgggagcaacccaaatgtccactgatggatgaatgtgtaaacaaggtgtggtgtatacatacaatggaatattattcagccttaaaacggaaggaaattctgacacatgctacaacatggatgaaccttgaggacattttgctaagtgagataagccagtcacaaaaagacaagtgtatgattccatttatctgaggcacctagagtcaaattcatagagacagaatgtagaagagtggttggttgtcagggactgaagggaggagggaatggggagttactatttaatgggtatagagtttcattatggcaagatgaaaagagttctggagacgggttgcagaacaatgcagatgaacttaatactactgaactgtacacttaaaagtggttaagatggtaaattttatattatgtttatttaaccacaattaaaaatgtctccacacattgtcaatgtctccctgttgagaaccactggtttcaatgcattgccttcttagtgtctttgttccttgagaattcttgaaactgattcctacccaggccacacagttaattttcagttattagcaagaattgaaagcagcagatgacccaaaaatatttgtgtttgcttttaagcaaataataagtggtctgtctggagaattacatccatgtctgtgttctggttagggcagcattaacactgactgggagccaggaccaaggcagcatgtaaattcaatttccccgtgtctgatccacaacattagggacttgctggatgctataatatcatctattcattcattcaacaaatatttatcaaaaggctttctctagccaggaaccgttctaggtgcttggaatacaataatgtgcaaaacaaacaaaaatccctaccttaaaggagtttacaaactttactttcaactaggcaagacattcggaatagtaagtagtcttacccaccctagctaatcacaaggacttgggagtggcagacaacaagagttgtttcattgtaagacattctaagagcttttgaataaaaacttgaactggaaatggcaattgtgcctgttctgcttacagacatgccatagagcatggcctgcaggcaaccatggtttttaatatacagcctccctgtttcccctcttcagccaaaatgattgtagtcaggtatagcaccctaccagcaatcttataagcatgataagctggacttatcagattcgctctctcaagaatacaggctgggcacagtggttcatgtctataatcccagcactttgggaggctgaggtgggaggatcacttgaggccaggagttcaagaccagcctgagcaacatagcaagacccgcccccgcccccatcgcctccgtctctatggaaaaagaacaaaaacaaaaaccagtagctggcataatggtgcaaacctgtagtcccaggtactgaggaggctgaagcaggaagataacttgaggccgcaatgacttatgactgtgccactgcactccagtttgggtgacacagtaagagactttgtctctaataagattaaataagattataaaccaagaaattctgagagaatgaggcagctggcagtgggagtggaagctaagagaatgtatggggaggaaccaggaggtggagtccagcacaggagcaacaaggtaagaggaaggatgaggaagcagatgcaacaaataagcaaaagtctaggctgagagcagatctaagagcaaagacaagagatcagaatggacccagaggagctggtcctcaggacttcctcacctccaaacagatcctagttcctgccctggaggtacccctctagggttaccatttgattttggtccttcacatacccctccccactgtgcctatgtattgtgacaatacatacctatgtaacctctttgggctcaagagttccttgcaatcccaattaaaacatatgaaggatcccatatgcactaaatgccagttgtgcaccttttattttggccccatgttcctttaacattttaaatgtcatctcagccacttgctacttgttgatcttgggaaatgtccatatcctctttgagcctcagttcttaatctattaaatgagataataacagaagagtcattattgggttattgtgtggatgtactggaataatacgtgtaaagctcttagtgctacctgtcattataaaagctcaggccgggcgcggtggctcacgcctgtaatcccagcactttgggaggccgaggcgggcggatcacgaggtcaggagatcgagaccatcctggctaacacggtgaaaccccgtctctaataaaaatacaaaaaattagccgggcgtggtggcgggcgcctgtagtcccagctactcgggaggctgaggcaggagaatggcgtgaacccgggaggcggagcttgcagtgagccgagatggtgccactgcactccagcctgggcagcagaacgagactccgtctcaagaagaaaaaaaaaaaaaaaaaaaaaaaaaaaaaaaaaaag

SEQ ID NO: 5298 - DNA, 941 bp, Homo sapiens
ttttttctatacaaatttgttacatgtcagtgagacctttttcaaaggaacatattcaatttggctttttgtggctgaaaaaacataactgttagacccaaagcattttatgctccgttccatcttaaggagccatccttaagtctgctcccaccctcagtagaatttattttctacaaagtggtagtaatttttttttaaattgcaaatgtaatttttgccaattagagaaaccaaccggtgtcagtaaaattctgtgagaaatgccatccctgctgggaatgttgaagttacttaatgttgatctatcccttggggaaagtaaaagtgactgtgagtggtgccattgtgtgatgtcagcatgacgttgttttgaatgtggcattatgttctggtgctcatgtttcctggattgtattatctgctttcctttaccaaggcagacagaactgctgccttagcctgacaaccggttgtcctcaaagcaaatgaacttaagcatttgggattgagggacagaaggattctgagggggctctgcgagggacggtgtgtgacatgtcatgcctggagaaggaacaaggctatttgaaaacagaaggcaggtcaagggtagaagttaaaggagaatctgaaggcaggtcagggaaaagaagaactggaaatgaaacagaggacaggtgacaaccacctcgaagagctcccagagattgtagaaagagtccagtgtaaccagcttagtaaccagagtatctggattacccaggaaggttgagctgctgagatttcagtggtgcaatgtctttaaaaaaacaggctttgttgggagggtatttccattttgaactttgaggactgttggtcagaaaatgggctcaaaagtgagtttgcttaatgaagacatttaacggttgtgctgtttatagtaaaataaaactccc

SEQ ID NO: 5299 - DNA, 432 bp, Homo sapiens
agcaaataataagtggtctgtctggagaattacatccatgtctgtgttctggttagggcagcattaacactgactgggagccaggaccaaggcagcatgtaaattcaatttccccgtgtctgatccacaacattagggacttgctggatgctataatatcatctattcattcattcaacaaatatttatcaaaagggctttctctagccaggaaccgttctaggtgcttggaatacaataatgtgcaaaacaaacaaaaatccctaccttaaaggagtttacaaactttactttcaactaggcaagacattcggaatagtaagtagtcttacccaccctaactaatcacaaggacttgggagtggcagacaacaagagttgtttcattgtaagacattctaagagcttttgaataaaaacttgaactggaaa

SEQ ID NO: 5300 - DNA, 941 bp, Homo sapiens
ttttttctatacaaatttgttacatgtcagtgagacctttttcaaaggaacatattcaatttggctttttgtggctgaaaaaacataactgttagacccaaagcattttatgctccgttccctcttaaggagccatccttaagtctgctcccaccctcagtagaatttattttctacaaagtggtagtaatttttttttaaattgcaaatgtaatttttgccaattagagaaaccaaccggtgtcagtaaaattctgtgagaaatgccatccctgctgggaatgttgaagttacttaatgttgatctatcccttggggaaagtaaaagtgactgtgagtggtgccattgtgtgatgtcagcatgacgttgttttgaatgtggcattatgttctggtgctcatgtttcctggattgtattatctgctttcctttaccaaggcagacagaactgctgccttagcctgacaaccggttgtcctcaaagcaaatgaacttaagcatttgggattgagggacagaaggattctgagggggctctgcgagggacggtgtgtgacatgtcatgcctggagaaggaacaaggctatttgaaaacagaaggcaggtcaagggtagaagttaaaggagaatctgaaggcaggtcagggaaaagaagaactggaaatgaaacagaggacaggtgacaaccacctcgaagagctcccagagattgtagaaagagtccagtgtaaccagcttagtaaccagagtatctggattacccaggaaggttgagctgctgagatttcagtggtgcaatgtctttaaaaaaacaggctttgttgggagggtatttccattttgaactttgaggactgttggtcagaaaatgggctcaaaagtgagtttgcttaatgaagacatttaacggttgtgctgtttatagtaaaataaaactccc

SEQ ID NO: 5301 - DNA, 2856 bp, Homo sapiens
caggggccttgggcaaagcacccagtaaagtgactgatgcccttccagagccagaacctccaggagcgatggctgcctcagaggatgaggaggaggaggaagaggctctggaggccatgcagtccccggctggccacactccgcagctaggggctgcctaccccgctgggtgtgcacacactcctctcaagagctgccattttatgtgtctcttgcactacacctctgttgtgaggactaccattttggagaaggttctgtttgtctcttttcattctctgcccaggttttgggatcgcaaagggattgttcttataaaagtggcataaataaatgcatcatttttaggagtatagacagatatatcttattgtggggaggggaaagaaatccatctgctcatgaagcacttctgaaaatataggtgattgcctgaatgtcgaagactctacttttgtctataaaacactatataaatgaattttaataaatttttgctttagcacttggccccattgtagattgccctgtgcagtaaactttcaaggtgtcggctgccccagattgcttcatttgctgggtgtggaaagagttgctatggccaggcatatgggatttggaagctcagcagaagtgacttctgctctgtggttgctgctccccggctttcacagacatggtatggcagccattcttttatctatttaaccaagaggatgctggggaattgtgctgcttgtcctgttggctggtggctgcattatgtcctggggtgtgcatgtgggtctatttagagcttctgtcccttccttcccattgcaagttgcacccagatgagacagctgtagtactaggtctctttcacctctcattgcctgtccctgcttcgagctggttgtcttgtgcgtgggacatgggccttcctatctgtgttttctcaaagtcaggagctgaccaggagcacactaaggtgtggtcatgcatcataaccaacattcactcatctgggacattcttaagatacatttataaatcatttcagcagtagtactttgtatgtgttgagagtttacagagctctttgacatacgcgatcttagtctttacaaataaggaaaacagctcagtttgggaagtatcagagatgggattcaaacccagatcctctggtccaagttgtatgtgcactgaactaatcaggcaggaaaaaagcccagccactgtctcacagattgttttttgtatattgtagcaaaatcctgaaacaatggggtccttccagtctcatcatacaaaatggcaatcttggctgggtgcggtggttcatgcctataatcccagtgctttacaaggctgaggcaggaggctctcttgagaataggagttcaagaccagcctgggcaacatagcaagatcctgtctctccaaaaaaaaaaaaaaaaaaaaaaaaaaatttcatttttgagtccagaggaccctcctattactcttgatttcatcttcagagtgtagttaaaaaattattttaaataattatttttttaaatcagttgtaggttcacagcaaaagtggacaaaaagaaatttctcatatatcccctgccctcacacatgcatagcctcccaccactatcagtatcccacaccagagtggtacatttgttacaatcaataaacctccattgacacatcattatcacccaaagtccatagtttacatgaagattcactctggtgttgtacattgtatgggcttagacaaatgtatgatgatatctacaattatagaatcatacagaatagtttcactgccctaaaacttctctatgcttcacctgttcatccctttcttccctaatcccctggcaaccactttaaaaaaaaaattaggttcagggggtacatgtgcaggtaaactcgtgacaagggggtttgttatacagattatttagtgacccaggtactaagcctagtacccaatagttacttttctggtcctgtcccttttcccaccctccaccctcaggtaggccccagtatgttattcctttgtgtccatgttatttcactcccacttgtgagaacatggaatatttggtttcctgttcctatgttagtttgttaaggataatggcctccagccccatccatgttcctgcaaaggacatgatctttctttggcaaccactttttactgtcgccatagttcttccttttctagaatgtcatattggaatcatatagtatgtagccttttcagactggcttctttcacttaataatatgcaattaaggttcctccatgtcatttcatggcttaatagtgcatttatttttagcactgaataatactccattgtctagatgaatagtttatccattcacctattgaaagacttcttggtggtttccaagttttggcaattatgaataaagctgttgtaaacatctttgtgcaggtttttctatgggcatgtttttaattcatttgaataaataccaagagcttcagtgctggatcatatggtttgtctcgtttgactgtcaaagtgtaccgtttgcattcccaccagcaattaatgagttcctgttgctccacaccctcaccagcatttggtggtgtaagcgttctgggttttggctatgctaatggttatgtggtggtacctgattgattgacatttgcagtcccctcatgacatatgttgaacatcttttcatatgcttgcttcttggtaagttgtcttttcaggtcttttgcctgttgtttaattgggtatttctgattattgaattttaagtgttgtctattttggctaacagtcctttatcagatgtgccttttgcaaatatttt

SEQ ID NO: 5302 - DNA, 2680 bp, Homo sapiens
caggggccttgggcaaagcacccagtaaagtgactgatgcccttccagagccagaacctccaggagcgatggctgcctcagaggatgaggaggaggaggaagaggctctggaggccatgcagtcccggctggccacactccgcagctaggggctgcctaccccgctgggtgtgcacacactcctctcaagagctgccattttatgtgtctcttgcactacacctctgttgtgaggactaccattttggagaaggttctgtttgtctcttttcattctctgcccaggttttgggatcgcaaagggattgttcttataaaagtggcataaataaatgcatcatttttaggagtatagacagatatatcttattgtggggaggggaaagaaatccatctgctcatgaagcacttctgaaaatataggtgattgcctgaatgtcgaagactctacttttgtctataaaacactatataaatgaattttaataaatttttgctttagcacttggccccattgtagattgccctgtgcagtaaactttcaaggtgtcggctgccccagattgcttcatttgctgggtgtggaaagagttgctatggccaggcatatgggatttggaagctcagcagaagtgacttctgctctgtggttgctgctccccggctttcacagacatggtatggcagccattcttttatctatttaaccaagaggatgctggggaattgtgctgcttgtcctgttggctggtggctgcattatgtcctggggtgtgcatgtgggtctatttagagcttctgtcccttccttcccattgcaagttgcacccagatgagacagctgtagtactaggtctctttcacctctcattgcctgtccctgcttcgagctggttgtcttgtgcgtgggacatgggccttcctatctgtgttttctcaaagtcaggagctgaccaggagcacactaaggtgtggtcatgcatcataaccaacattcactcatctgggacattcttaagatacatttataaatcatttcagcagtagtactttgtatgtgttgagagtttacagagctctttgacatacgcgatcttagtctttacaaataaggaaaacagctcagtttgggaagtatcagagatgggattcaaacccagatcctctggtccaagttgtatgtgcactgaactaatcaggcaggaaaaaagcccagccactgtctcacagattgttttttgtatattgtagcaaaatcctgaaacaatggggtccttccagtctcatcatacaaaatggcaatcttggctgggtgcggtggttcatgcctataatcccagtgctttacaaggctgaggcaggaggctctcttgagaataggagttcaagaccagcctgggcaacatagcaagatcctgtctctccaaaaaaaaaaaaaaaaaaaaaaaaaaatttcatttttgagtccagaggaccctcctattactcttgatttcatcttcagagtgtagttaaaaaattattttaaataattatttttttaaatcagttgtaggttcacagcaaaagtggacaaaaagaaatttctcatatatcccctgccctcacacatgcatagcctcccaccactatcagtatcccacaccagagtggtacatttgttacaatcaataaacctccattgacacatcattatcacccaaagtccatagtttacatgaagattcactctggtgttgtacattgtatgggcttagacaaatgtatgatgatatctacaattatagaatcatacagaatagtttcactgccctaaaacttctctatgcttcacctgttcatccctttcttccctaatcccctggcaaccactttaaaaaaaaaattaggttcagggggtacatgtgcaggtaaactcgtgacaagggggtttgttatacagattatttagtgacccaggtactaagcctagtacccaatagttacttttctggtcctgtcccttttcccaccctccaccctcaggtaggccccagtatgttattcctttgtgtccatgttatttcactcccacttgtgagaacatggaatatttggtttcctgttcctatgttagtttgttaaggataatggcctccagccccatccatgttcctgcaaaggacatgatctttctttggcaaccactttttactgtcgccatagttcttccttttctagaatgtcatattggaatcatatagtatgtagccttttcagactggcttctttcacttaataatatgcaattaaggttcctccatgtcatttcatggcttaatagtgcatttatttttagcactgaataatactccattgtctagatgaatagtttatccattcacctattgaaagacttcttggtggtttccaagttttggcaattatgaataaagctgttgtaaacatctttgtgcaggtttttctatgggcatgtttttaattcatttgaataaataccaagagcttcagtgctggatcatatggtttgtctcgtttgactgtcaaagtgtaccgtttgcattcccaccagcaattaatgagttcctgttgctccacaccctcaccagcatttggtggtgtaagcgttctgggttttggctatgctaatggttatgtggtggtacctgattgattgaca

SEQ ID NO: 5303 - DNA, 2925 bp, Homo sapiens
ttgcttccttgtcaaagatcagttgactatatttgtgtggggctatttctgggctccctatttgtttccagtgattatgtctattttttcaccattaccaccctatcttaattactgtagctttatagtgagtcttaaagttgggtaatatcagtcttctgacctttttctctttcaatattgtgccagctattctgggtcttttgcctttccatgtaaactttagaaccagtttgtcaggatccacaaaatactttgctgggttttgattgggattgcattgaatccacaggtcaagttggcaaaaactgacatacagcaatgccagtttattgttttgtgatagccttaatccagctagtttcttcacaggatgatgttgaaaatatgggatgctcataatccctgaatattttttatgtggataattaaacttgttctgggtggatggttggatagccagaatagtaataacctctcttccagccactcaaagaaaatgatataaacgtagggttggtttaattgttgagaggtcacgttttttccattcttgcttgctctcaggtaaggaaagagcactgttggttcacgcattcctttttccctcatacactttgttgggcactgatatggtttggctctgtgttcccacccaaatctcatgttgaattgtgatcctgagtgttggaggtggggcctcgcgggagacgactggatcatgggggcggattttccccttgctgttctcatgatagtgagttctcatgagatctggttgtttaaaagtgtatagcacttcctgcttcactctctcccactccaccatgtgaagaaggtgcctttgcccttccgccacgactgtgtttcctgaggcctccccagccatgcctcctgtacagcctgcggaactgtcagttaaacctcttttcttcattaattacccactctcaggtggttttttatggcagtgtgagaacggactaatacagaaaattggtaccagagaagtgggatattgctataaaatacctgaaaatgtggaagtgactttggaactgggtaatgggcagaggttggaacagtttggagggctcagaagaagacaggaagatgagggaaagtttgcagcttcctagagacttgttgaatggttgtgaccaaagtgctgatagtgatatggacagtgaagtccaggctgagttggtctcagatgggagatgagaatcttattccgaactggagtgaaggtcactcttggctgtgctttagcaaagagagtggtggcattgtgcccctgctctagagatctgtgaactctgaactcgagagggtatctggcagaaaaaatttctaagcagcaaagtgttcaagatgtggcctgattgcttctaaaagcctatgctcatttgcatgaacaaagtggaacttatatttaaaacagaagctgagcttttataaaagtttggagaatttgcagcccaaccatgtggtgaaaaagaaaaatccattttctggggaggaattcaaggctgcagaaatttgcataagaagagcctcatgttaacagccaagagagtgaggaaaatgcctctagagcatttcagagaccttcacagcagctcctcccatcacaggcatggaagcccaggaggaagaaatgcttttgtgggccagcccagggccccactgttctgtgcagccttgggacatggtgccctgcatcccagccactccagctccagctgtgactaaaaggggccaaggtacagcttgggctgctgcttcagagggtgcaagccccaagccttggtggcttccatgtggtgttaggcaggtgtgcagaagagttgaggtttaggaacctctacctagatttcagaggatgtatggaaatgcccggatgtccaggcagaagtttgctgcagaggcagagccctcatagataacctctgcgagggcagtgtggaggggaaatgtggggttggagcccacacagagtccccactggggcactgcctagtggagctatgagaagagggccaccatccaccagaccccagaattgtagatccactgacagcttgcactatgcacctgtaaaagttgcaggcagttaatgctagcctgtgaaagcagctgtggggactatatgcagagccacagaggcagagctgcccagagccttgggagcccactccttgtgtcagtgtggcctggatgtgagacgtggagtcaaagatcattttggaggtttgagatttaatgactgccctcctggattttggacttgcatggggcccatagcccctttgttttggctgatttctcctatttggaatgggagcatttacccaatgcctgtatccccattgtatcttggaaataactgacttgtttttgattttacaggctcacaggaggaagggacttggctggtctcagatgagacttgacttggacatttgagttaatgctggaatgagttaagactttagggggctattgggaaggcatgattgtgttttgaaatgtgaggacatgagatttgggaggggccggggtggaatgatatggtttggctgtgtccccccacccaaatctcatgttgaattgtgatcctgagtcttggaggtagagcctggtgggaggtgattggatcatgggggcagatttcccccttgctgttctcatgacagtgagttctcatgagatctggttaagtgtgtagcacttccccctttgcttgctctctccctctgccatgtgaagaaggtgcttgctttcccttcgcccttctgccatgactgtaagtttcttgaggcctcgcagccatgcttcctgtacagcctgcagaactgtgagttaattaaacctcttttcttcataaattatccagtctcaggtagttctttatagcagcgt

SEQ ID NO: 5304 - DNA, 400 bp, Homo sapiens
gctgcggttggccatgatcgcactactgcagtccagcctgtctcaaaaaaaaaaaaaaaaaaaggttcgaaacaaactaaatgcctaataaaatcatttgtgttatatttattttaatggaatactatatattgtgatagatggtatagaaatatactcgttaacatggaatgatgtttacaacatgtgaataaagcctttttactgaaatacatacttttgtgtaaaaacatgtctatagaagtctggaagggagatgataaaaatagtaatctccaagtgatggttaatgagtttttaaactttatttttacttctagattttctgagttttatgtttaattaaaaaaatggtggggtttaatttttattagttcatttgttgggtttaagttgttgg

SEQ ID NO: 5305 - DNA, 2758 bp, Homo sapiens
acatggatagatctcttagtggtctttccaaaagtacatgtacttgaaatattttcattatcatactattctttgaaaaaaaagatgcttactgtatacttgttttcaagcatcctctaaaatcaaaggttttgatcacaatatgcagatttctcttgatagatacttaaataggctatttctctcctcttcttgggcaatgccttgttttctcctctgaatatttgcatttgaaaggattgcttcctgttctgctcattgatcaaaggtagggccaattaaggattctaaccctaacccagcaccacaaagcccccctggagcatcttcccggctggcaggaccatgccatctctgtggagaaggtgctggggagggaagtccttccagtgccacatggagtgaggccctgcccatgctggggactttggggaggaatttggtattctggtggccttgctcagctctcattgagatcttttcctatcagaatgttagtgaatatacttcgcagctctttgttcagcaataaggaatattctttcaattcctgctcttcaagccaatttactacacccagttgtctttccagaagttcatcccagcggtaatatgttggtgtttgttcttctttggatttcacatctgttttctggtagaagtgagcactgttcacttgtgcagtcgtcttattttccttcttcctagatgactcagctctttgtaaatgttgtgctcaacttctaggggccagttctagactttggagatgcagtgtctcccaggtgtgcacggacacctggtccgtggaaacaggtgtgatgggcacaggctgctgcccttctgtctggtcgggggattcctcttcttcaagctgctcagctaacccagaagaggggagagagtactccggtggttcccagagcccctcccgttgtgccgcttcgacctgacacctgctcgatgctgacttaggcttcctgccaccaagcaggaaactagaaagagaacatttcagtgtaaggtctgttcccgacagcatggattagcttccgtgttctgaagttgttcttttcatggtgtctgacaccgagggcgttgttcgtccatcaggcgggattggatggagtcttggtgttttgccttctcagggaccaaaaatgtatcattgactccttaacagtgaccttcctcccaaggacatatccgtgttcatttttcataggttttactcatattcataggtagattctgttaatgtgagttggaaagaaaagaccaatttgtacaccagtcacaccacaagacagtttatcatataaaatacctcaattttttgtattcctcatttccacctcacaattgtactggtgatgaattttaagggtctgtcctttagcttataggtgatgtttcacatctggccagattcttatacctccattgtatacttgaaaaggttcagaattacaggaacagcagtgagaatttggcccactaccacgactcatttgtttcattcacattcctcacgtgcaacaacataattatattttaagaaaatgtaactttgttacatcaaaatatgttgtctagtaaaaagttgatattcagtagaacaaggatcatgtaaataaacatctatttcacatgtacccaaaagcatttaaaaagcagaatccagggcccagagcatgagccagggaggaggatgtttttcttcttttctctatttttccctaaattgtgcaaacataggtgagtctcttaacctttctgtgcctcagtttttctacctctaaaggggtgggatggttcttcaaattgtttctaaaacaccggcactttcagcagtgttctggtggcctgagatgagagcaccgtgttcagaagtgcctgggagtggcacagtggaaactccgcttgcacggaccatggagtctgctcaggaccatgctgtaggacacacagcctcatgcgctgagaaagcaaaggaagtgctgggtgtaaagtttgcatgattccatgaagctttagttttcctttttttgttttaaaagaaagggttttatatgttctattgtaaaatatggaaattaaacagggacttcagaaagccgcacagaaagatcaccttccgatggtgtgatgtgctcctgacattcggccgaggtctgtattctgaaaaagatttaatggcctgtgaaacacgtggattctgttgcactggatttgtaataaatgacgctgaacttcctgcttccaagcagctcaaccctgatgctgaactgacaccaggcgaatgtcagggctcccaaaccactagtgccaaagggtcatgttgaaaagttcagaatatttatttgtcagaatataataattgccccccaccttagtatttttgcactttacagaaatttagatactgtttttcagtggcttgagcgttttgccttttcaaaggataactattattttcttgaaaatggaatataatcatgagaggaagaagatgtaaaaaatgtcaaatgttgattggttgtgtaaaagttttgtcatagacatgtattggggagcttccaattagcatacatagacacatgtgtcagtggccaagacctgcttatattttgctttatagatgtagtcatagcatgttgttattgcctcatgtaaataaaaaggctattaagttttccagtaatatttattaatctgtatgtgttttaaaataaaataacttatttctagctgaaca

SEQ ID NO: 5306 - DNA, 476 bp, Homo sapiens
agtgtaatgagaaagttcatgtgtcacatgaaaatgatcatgtttgtgttgctacagcttttgtgggaaatttagtttaaaggcagctcttggtgtaccttagtatattttaatccacaattataccattgatactgagaggtgatacccgatgatcttctctataatattcttagagtaaaacaaaatctcaaaagtattaatagctcttctacccttgaaggtgactggtcctgggacagttagaatctttcaggtttacctctgttcagcagatacttcagtaggatacatagcttttcttccagtgaaacaaagttcatatcatccattgtttttcaagcacgtgacaccagcctcaaagtaaatgacatgaccagtggttgaacagtctaattttcaaatttaatatagagcatataacttctgatttgatagtatttattttaaaaaattatgttttcatcattcatttg

SEQ ID NO: 5307 - DNA, 1820 bp, Homo sapiens
tgggcagtgaaatctagctagatgaccataatatgtctgcttttcttgactttattattattactttttaagggcattgttcaatcctcgattttgtatctatggcagcaggtgaaggtctctagatgagcgttcacatacacgatgacaaatggttaaggaattttgaggctaaaatctttactgcttagatgtcatgtactttataggcatagcatttctagatttaataggaaggatctctgctctgtatgtgcttttatgtgacttgcaaaggaactattccatttaaatagatttcaattaggataatgggtttgagacatttcacaatggtatattttctagactcttaagatagaattgtcaaattatagcaaatagagttagaaattattttgcaattttctcagcagattgtaatttctcctgccatacatgtagtcattgtaaaaataatagtgtaagggtaccttttataaaactgattattttccaaatagactggtaccttttggtttagaaaaaaaatgatggaagaagattgtagttcaggagagcaagcagaaagcagtcatttttcagcctttcattttattgtacctttggtcacatttttgaagaaaggcccaaaattgccatatgtatgaaagaatattggtaatggggtagagttggaatgaaagtgagattttcagagtaacaaggtcactttcttctgtggcttgtagaaacagatatgtgatcacaacaggtccagcagccagggttggggggagtagagagttcatgtaatttgtatcatgcttaaatttccatatttgaaaaagcaactagagaacaggattttgtcaaaacaaagagaaaaaaataatttttttaaacaggagggggaaatgtacgtgttattcttacaggatgttgaaaaatgtttaaatagctgcgatacagtttgttgagggggcaggggacagtgggaacagtgactaaagggttacattttgatgtagaaatgcctagttgaagaaaaaagcttgcctgggaggaaagtttctgtggagatgtaccctgcatttggagtgatgtactgaagcatcaaagactcagcattaattttgatctttcttgggaagctggagaaaataatgcatttctgagaaaaaatagtaacttatgaaatgtcaaagcctgctctggacaatgtcaacatccatgagtgcgaggcaaattcaagaatccaaaccctaagtgaagaccttcctgacctgctgtctagacgtcaggggctgtttgagcggtgaggtccagcgggttaggcattccaaagatacgagaggcccacacccacatcaggattgtgtgttagttctcaggcttcctaggatttttcttgggaaaaggtttttgaccccaagtggctcccagcttgacagaaatctttagaggcagctcagaaaaactttggtttcccaaaataatccaaaggctaaagttctgccaccctttaaaagagtagtgttttggctgggcgcggtggttcacacttgtaatcccagcactttgggaaaccgaggcgggcggatcacgaggtcaggagttcgagaccaacctggccaacatagtgaaaccccgtctctactgaaaatacaaaagttagctgagcatggtggtgcatgcctgtagtcccagctacttgggaggctgaggcaggagaatcgcttgaacccgggaggtggaggttgtagtgagccgagatcccaccactgcactccaacctgggcagcagagtgagactccatctcaaaaaaaaaaaaaaaaaa

SEQ ID NO: 5308 - DNA, 311 bp, Homo sapiens
tctgcctttggccatttaagcttcttcctttctgaatttcagcctctagtgctcaggaggaggtcagggatctggctcttaaagggtgttggagaaaggtctcctttccatattgcttctgaggacttcttagaccattggcagcacacgtcctcacatgaaggtgggcgtatgatctgggagactctgcttaagaaaccggatctctttattgatagagccatctcatgagcaagtaatgcaagctgttggtaattacagaaaacctactgtggaatttcatctaaaattaatgaagagtcagcactgtg

SEQ ID NO: 5309 - DNA, 1957 bp, Homo sapiens
aaaagattcatttattgatttgtgcttcaggtttaatttgaaaacaaaaacaataggagaattggaggaaaggaatgggaggacagagtacatgtgttggcatacctttgcttagctctagaggataatgatgcagatttagatcaattatgtagctgtgctgaaatttccctcatttgagcacctttaatgtgaattattatgtgttcttgctggacttacactgttacatcattgtcaacttgcttagtgtgctcagaaataaaattttcatagctttcctctggaccttgttttaaagggtaatatattgatccacttggagacaagaggctggtaatagaaatttggtacttggtaacaaaattgctgaatgtgtgaaataagctttgaaaaatatatgttatggttaaaatgttggaagggcctcagaattttcacagcagttatttgtgtattttctttctaggtgcatgctattatgatgctaatcagtctatgtatgtgtttggaggctgtacccagagcagctgcaatgctgctttcaatgacctctggagacttgacctaaacagcaaagagtggatccgacctttggcttcaggtaagagatgaaatgctgatctttgcctccttaccaggtgactcccttggcatggaaactctacctgatcatttttggtgttggtctcaaggatgggttactgggactcaggtccttaagtttaatgtgccatgtaaatgataatagtaatatgcttgtgtaagtctttgttttttgttaaattatactttatcattagtaatggtgccctgccaaaattgctgtactgctgtgtgaattcatttgcatggttttctcaagtatactcatacaggtgtgatacatcatttggtaggaggttgaagtaagaacagaaacacagagtcgtgagaactgtagttgactgacagaagctattgtcctagggctaaggtctctgaatatctgttgttgttgccagctcagatatttggggagtgtatgggacgtgcctctgctagttactcttaacaacccaggggtgtgggaagattctacagtaggtacattcctacccagtcccactatgccagaaatctggcagaaagaaactagattattttcttatttttgacctaacctctcctgggggaaaaaataaaaacaatggtttttgcactcatgaggcagggcaatttgaggaggcatagattggaggggttggtgtgatggagaaatagtgtccactgagtataaagtattctgctagattttttggcaagcttttcccaaaacattcatttggctttttagtattaggactcagtcttaggactaaggacatttgggtttccattgggcaagttccttatttatttaggccttgccttactactttgattaccagataggaggcatcattgtatattagaaagggcactggactaagagtgaggggacatgagtttcatttcctggcatagtcaccaattctccatgtaactataaataagttattgcacttctctgggagaaatgtggagtagtactaaatgactatttttaaatgggctaaaaaggctagtttatgtttccctttctataaccgctactgtgaatgtctaggccagggacttaaacctgtttatgagaagaagctgcattttgcttccctaaaacttaagttcctgttctttccacctacattaggcaaatataggaggagcctactgagtggataccatgggtggagctgggctttgtgtagatgaagttctttattaaaattattggcatttggagggtaggagggtggtggtccagtctgcagatggccacaccaggaggaggagctattatatccccttctcttccacttcctgtcacaaccaataaaggccgtttgtgccattcataaaaaacaaaaacaaaaac

SEQ ID NO: 5310 - DNA, 1957 bp, Homo sapiens; identical to SEQ ID NO: 5309

SEQ ID NO: 5311 - DNA, 424 bp, Homo sapiens
attgagaagtcttttttgtttacttaattttattttattttatttttacctcctgcgtgcatgaaatggatggcaaggaaagctttgcttgggcctcttcctgaaatccaagatggcaaatgcaagactgtaaggaatgtgatcgtcatttccaaaggatagagaccgcaaggggcagaacttagcactcatgcatcttttctagactctggctttggtctttgtagtttttgggtaacagcccttctgatagtcattgcctctttttcttaggaatgcctggtgatgtgtatacaatcatctaatcaaagaaggctttttttagagatcctggtgttttttaaatgttaccgttctgttttctagtcggctccaaccagcatgccttggtagctcttggatacatattgggacttaatgattt

SEQ ID NO: 5312 - DNA, 364 bp, Homo sapiens
aaccatcaagtttaaagactgctttgtggctaggcgaagtggctcacgcctataaccccagcactttaggaggccaaggcagaaggatcccttgaggccaggagtttgagactcacctgggcaacatggtgagacccccatctctacaaaaaataaaaacaaaaaattagccaggcatggtggcatgcctccatagtcccagatacttgggagggtgagacaggaggattgcttgagcccacagatataagcccagacgcctaggcgagagtgagactgtgtctcaaaaaaagaaacaaagaaagagaaagagaggaagggaagaaaagaggaaggcaggaagggagggagggaagccaaagaa

SEQ ID NO: 5313 - DNA, 364 bp, Homo sapiens; identical to SEQ ID NO: 5312

SEQ ID NO: 5314 - DNA, 3422 bp, Homo sapiens
gccgctggctctcagaagtagcacgtgggcaggagtctctcctctgatccaggagcattggcaggtttgtgttgggactgctggttaagttggagctgtgtaactacttagtttttggtagccaatcagaacgcagtgccccacatattccagctcggtacatgttgataaacagactcatccaaactttcaaaatggattcgtactaaacatgctcaggttttaaattttggtttgcttttgagcttttcctctttatgtggctcttaataataagtagttagaatgaaccaagccatcccagttattccaagcaggctctcaaatgacctttgagcacccttcacctggctggtccccaggccaggggtccacagccctgctcccttctcagcaaggagggtggcctgtctgacagtgcagttgaacctttgctccctactctgcaacttttgaagacttcaggctaatcaaaattacttataattagaatcaagtgcctttattcttgttttttatttttattttatttatttatttttttagatggagttttgcccttgttgcccaggctggagtgcaatggcatgatctcagctcactgcaacctctgcctcccgggttcaagcgattctcctgcctcagcctgctgggtagctgggattacaggcatctgccaccacgcccggctaattttgtgtgtgtgtatatgtctatgtgtgtgtgtgtatgtatatatctttttttttttttttagtagagatggtgtttcaccatattggccaggctggtctcaaactcctgaactcatgtgatccgcctgccttggcccctcaaagtgctgggattacaggcatgagccaccacacccggcctattcttggtattctttattcttggttttctagcctttagaaaaaaaaaatctagtcttggtaaagaaaatgttcattttaatcaagctccagtacagcttgtgtcaagacctagtaagaccacctttaatgtgttcctggatatgacattaaaaactaacttgaaaattgttaggatatttccttgttccctacttttattgtaaaatctactacattcttaagaattaaaaaatgccatttcagaagagatgatagttttatcttgccaaggaattatcttcttagtagcctatattggcttattccaaaaaaggcgttaacctccatcaaaacatcttctgcgcctctctctcagcatatgctttgatatttgaagtgtgtaatagattggagctatcagtcacttatttctaaaaaatgtattcttttttcttcatagctgtgaagagggataccaaggaaagttctttctgctgtctttctctttggtaatgcttatcttatgaacactcaactgaaaaaacactccacctaaaagcaggaaagatggcaattctaaatagcagctattatccccgggtataaactatttttgttgttggcttggggctttgctgcaggtattaatagtttaaaaagaaaaaaaaaaaaaaaaccctaagcaaatctgccacctctgggaagtgccttttaaaatgcaaatagaaagtgaactctcccctgatgcctggatctgcccccttcctttcccttgctaagcctctgtttgcaggagctactcctgaggtatggaaatggtctttgcaactgaaggacttttccaactgaagcaacagttgtagctaaagtggccgtgctatagggttgtgcagagctgggctcaggggacaagaaaggagagacttggagccagagagacctgggtcacatcctggcacaggcctgcctttctcagctataagatgaaataagaaaactcctttcattaagggagattttgtaaagtgcctggtgcttagtaagtgctcaagaaatattatatttcagattcattgagttaagtaggtttttgaggtagcatccttttttttttttttttgagatggagtctctagttctgttgcccaggctggagtgcagtggtgtgatactggctcactgcaacctgtctcctgggttcaagctattctcctgcctcagcctcccgtgtaggtgggattacaggtgcataccacgcctggttaatttttgtattttcggtagagacggggttctcaccatgttggccatcctggtcttgaacttctgaccccaaatgatctgcctgccttggcctcccaaagtgttgggattacaggcgtgagccactgcgcccagccttgaggtagcatactttctgaaataaaaaagtagattatgtccgaagcagttgacctaaaaactgccttggactgacatttgttaggtggtctaagatgttctcttcacgctttgcaaaaaaatgagcttttttggagtttaaattaagcatccctctggtgtgtttggttttttagccaccaaaaatttaacaaatttgataacctgtcacgtgtaagttcagaaagcactttggtcttaattggtgacttgggggttatttggtataaatataggttctttttctaaaaattattgccagtatcctccaaataattgccccttcaaatgtttcatctaaaggtgacagcttgtgggcagaaccatgcacaggaagtgcctgccagtgggtgttaggagatgtaggtggagtctgtgatagccaaccaaaagctatccccttctcgcccagaaaagccacgtgctttgctggacgctacttgaaatctgaactctgcacctacatatgtagtaaaattagagacttttgtcactttaatttttagattatctcaagttttcactagatttcaatgtgccacttgtgctatgagtctttaagaagctttaaaaaataaatgcacacctgtagccttttaccattcagacaggtagattatatttacctgtcatgagggaccatgtatggttgacagttgcaggtttgattaaatccactatattgcacaaattttgctggaaataatttcctgccctgccaagagctctatggtagtttgataataaactactaccccagtattcttaggaactgtgttactaagtcttttctgcctgatttgtactttatttccatagacccctcagatatgtgaggaatcaagccataaatgtgcatttgctggacattatgtaccatgtcatctctatgactacagatttcaaggataatttttacatctaacaatttcactgtaacagtgaccgataatgtgagaaatgtgctttttacagtgctgctggtgggtagacaagtgcttgctgcagttgtttctgaatctagccagatgctggagtcgtgaagctgtaagctccgcgggagcagggaccatctctctttcttgcactacaggcactcaataaatacttgtggctgtgaactgg

SEQ ID NO: 5315 - DNA, 531 bp, Homo sapiens
ggtttttaaaaaatgataatgcaattcctatttgaaacgtgtcttagagtgaatatcagaatagtaataatggactcttggaaagctttgaaaactacatgaatataactcattttctttaaactttattgtctgtaagagaaaaaagagagattgtaattctctaattttatcttttctaaaaaagttaaacaattggagagccctctctggaggtctctcagagtagctctctgcccattgttctgaattaacttgtgtcccaccctggacaataaatggacagataaaccctttgaaatacaagccaccaccccgtgagggattaagagggcagcctggttttcttagtgtgcatagcttcagctgtccgtcatagttgtcatctggatatgttcacccctttccactccttcaccctggccaaaaggaaaatatttccactgtaggtgctgtaagaacactagactttagatcatcacaatctactgtatttgttaatggacagggagtgtgtccggatggagcctg

SEQ ID NO: 5316 - DNA, 1268 bp, Homo sapiens
tctcctgtggaggaatttctccctttggaactaagacctctaagccagtggggcataaaattatgagaacaggaagaataaattttgctagtgggtcaccagggttaataatgcatggtgccacttttgtttctaccccttgattcctggctatggagggaaaaaaagtaccatttattggatgctgattcagagcatatatatagccctctggagaactctgccctccctgcaagttattgccacctagctggtgctataactgaatcttcaaaaggccatcccatcatcctattaggccagcttctttagcatgataaggaacatagaccagtgaattccaggagcaatgactcatactgaaattcttttgctgtgacgtgagttccttgatcagaagcaatgttgtatggaatatgacaatgggtaaagcattccatgagaccatggatgacaattttggcagaattttgtatgaggaaggcaaatctgtatcgagggtctgttctagtaagaacaaaatgctaccccttccatgatggaagtagttcaatgtaatcaactacaaagctgactgagcacccagaggaatagtgccatacttggagtcagtgttgttgtctgctgctgactggttgggccctcagcagtggcatccaggttggccttggatagtggaaatccatattgctgagcctatgtatgacctccattcttgccactgtggccactttgttcatgagccatgaacaaagaggataccagttagcctctttccccagccctgttctgacagaggtggctggaatagagactgactggtttccacagacttgattatcctatattcacttcattattaaaatcctcctctgctaagatcacctttggtgagaattttatggcatacatccttcttttcttttcttcttttcttttttttcccattgagagaggtctgtcctgggtgggtgtgatggctcatgcctgtaatcccaccgctttgggaggttgaggcgagtggatcgcttgagcccaagagtttgagaccagcctgggcaacattgtgaaaccatctcttcaaaaaaatacagaaattagccaggtgtggtggtgcactcctgtagttccagctacttgggaggctgaggtgggaggatcacctgagcccgaggaggtggaagctgcagtaagctgtaatcacgccactgcactgcagcctgagcaatagagtgagatcctgtctcaaaaaaaaaaaaaaaagatct

SEQ ID NO: 5317 - DNA, 280 bp, Homo sapiens
atcccagtacttcgggaggctgaggcgggcggatcatgagatcaggagatcgagaccgtcctggctaacacagtgaaaccccgtctctactaaaaatacaaaaaaattagccgggcatggtggcgggtgcctgtagtcccagctactcaggaggctgaggcaggagaatggcgtgaacccgggaggcggagctttcagtgagccaagatcatgccactgcactccagcctgggtgacaaagcaagactctgtctcaaaaaaaaaaaaaaagaatatagtt

SEQ ID NO: 5318 - DNA, 21292 bp, Homo sapiens
cccgtgcggaggcggtgcggagcatttcggctctgagcggctgggcgaccggcgcgtcgtgcggggctgcggcggagcctccttaaggaaggtgcaagaggttggcagcttcgattgaagcacatcgaccggcgacagcagccaggagtcatgagcgacagcggcgagcagaactacggcgagcgggtacgtagagctgcggtagggggtggctgtgtggtcctagctccttgcatctttttctaggcccgtcggcctcgggccaggaggcaggggcgttttaggctccgaagtctgaagccgggagggcaggcaagggagacagcatttaaccaaaaaaagcctttgtggatagtgccttagtgcctttggtcgtgaaggagggaggcccccggcgggtttatgtggcttctgcccgagacggccgtttttcccgttataagagggggaagatgaaaatggccgctgcgtccccgcggtgttgggggaggggagcgatatcttatttcggcgttgctctcctgcgaaggtccgccgcagccatcttgggctggcgggctgggcgagctgccagaggcacaaaatggcggagaagccgcgcggcaacgcggacccgacccgcagcgggccgcgcttcgtaaggccgcgtggtggggtgcaaggggacagacgacgttcttttgggtctttgggccggtgtttaggttaacgaaggaccgtctttgcctccacggaaaggacggagtctgggatgtctttggggcctcttaagatggaaactaatccaaggccgactaagttctgggcccgttaggtggaggggattgcgtgagggctttgtgtttggcctaaatgaagcgcttttctctgatgccgaaagggcttcccaggcaaaaatctgtatcagtattctattaggacagaccacaaagtcgttaagatgattttgtggacatcgcatttccacgggattgtgaaggagaaattggcgggcaaccatttacggcgccgttatttcctttgttttgaggcgttctaatacttagaaccacagcgtgtgttggctacagttttctttcccttaagtttccacctcttaaaggtgttcagtgagggttgattgaattgcgggaacaagacagttctagggtttaaacagcatacgtagctggtctgtggggctctgggtattggattcggaaagcattgaatgatgcgaacatacgaggcttgctagaattaagaggaatctgttagaagggtgatagaaaagcaccatagaaattgatttttgaggctgtgggaataatttgtgcttttttaaaaaaaaaaaacaatttgttacctaagtttccccttgttggtaaagctaccttaagatctgaatatgatttatcaggtaaataagactattaaatgtcttagcaaacttttgattaagattttatatgattcctcagagtattttaggaagaaattttcagtgatgaagcgtgagtttcctgcgtaattttggagcccaaactgcttaatttggtttgaactaatcaagccttgcgtttacatactcggatgagcatagagtttttagtttttgatgtttttcccgaagccgattgactccaatgtcacgagtgttttagatttttttttaagttcttgctttcttgggtaagaaagttgggattgagctcaaaagttgttaaaaagtcgtgacttctgatcattggcagttgaatctgttataacagtcattggtgtttggactgcaaagtaagcgattttaaagtcttttgttattaaacagaaaaattcaattattgggtacctttctactcttcaaaaatactaaatgactggcttctgactagagctctcgattgaatacacgtgaagaatgcttgagaatggaaaattgcccagagttcattagtatattttacgtgagaagggaaacaattgaaactaggttccagtttgagactcggctcaagagaaatttgaaattttctgatgggttatctttttactagtaaaagtacactgtgtttttcgcaatctttgaattgtagagggaggttaacttaatgtgttaaaaattgagttttttttcttacataagagtcttcgctttctggccgagatctctaaacttttacgttgtgaaatacttccatattgttgtgtttggtgtttgcgtgtttgtgttccaattggaacctttaagggttggaatacacctgaatcaaacacgtgtctaggcttccaaagcaagcttgggaaaaccataaagctcaatggaacagcttgatcttagacatgcctgtggtgtaaatgatgcttctctggagccagaaaaatgagtgttattcaactccaggcttctgaactgggtcttaatgtaaatcactaatctcttcaaatcagtggaattctcccttatttatctgtctctaatccagacaaccccacccctctgtgccccaccttttccagtgactgtaggagtttgttgttgtgtccctcccctttaaggttgggtgtgtgggataaattattctcagtttgatcactcaatagaatacatttgggtgaatataatgacatttaaagaactggtgtgtccctcatccctcgttggtctgtgggatttattttttcccccctctcaaaggtaatagattaacactaaaatctgtctataggggtctaattagcaggcttaacctgatctggccaaaccactttcaaaagtaagatctcgttttcatctccggattcaagactcttcccccaaaattgcttgcattttgtaaaggggttgactagcaccatttctttgtaaaaagaggcactcctggcctttaagtcacaattacaagaagttgaataaaaagttgatgaagtgcagggtaatctttagagcccaataatggtcacagcgtataggttgtgtgagatttgtatgttggtcttgcacgcagtgtaatgttctgagcctctcaatattgtaatgagtttctacgagtgagtctttactaaaggaatccagaaactaaggagacactgatgtatggaccagatgttaaagaaaatgttttgacccagcagatactctgatagaatactggctattatttttgtaaagccgatgtgattgcaacataggcacgtaatctttatcattagagatgaatagcagcatctggacaccaacccatcaaactgcttttcaaattctgcagtttttctcatcttctgctgaatcttgggatgtctttttatattccttggttttagctcctaaactctaaattctaattttcaaaactgaaacatctctgaatctacttctttctaaagaattgcagccatctcaccaaatttcctttaaaaaaggattgaattgtcaaataggaggaaattgttttgtattgtgagtctggttaggtttatcagtctcttgaaacccggttgaaatatttttttcttggttttaaacaagaatgctttaatattgtggatattgtctggaactagaacgtgacattttcaagctgacattacaggtgattttataaggtaagtactactggttttgccaaaaggttgaaaaggaattcaggtggtgggggaagtgttaatgggatttgccttacatagcgttttttcctcctttctctacaataaaatccgaacgtaggtggtaaatattaatgctttcatagctattttgcccaggacaagggcagagctacagctgtgtatatttcttgagccttagcattttatgttgatcagtgtttttacatatgcgactgtttttttaacaaggcatggtgactgatgtttaggaattttaagtgttttgacccaggttagtattgggggtgtgggctatgtagaattagatattgaaatcacttagtcttgtttttaaactgcaaaccaaaagaagttcttcactgtagcaaattacagtcttgaaattcccccaaaatctttgctttgaattgggttttggaggttacattgagattgatgttatcaacatagattgttacctgacagtttggataaggggcccctttttctctaatttttgtggttagaaattaggttaaaaggtagtcttctgaaaagtcaaaagatatttatatttgcttttgttggggagtactgactgttttatgaatgtaaatttaacagtctgtgctatatttacaagagagtttttataagcacaggcctacaactaatttcagatgatgtttttttccagacactattctccagtttttgaggatttacttatccatttactcttctggtagacagtttggctgccagaaaaaaatatagtccttattatattgatatgagcattgacctttccataacaggattaatgaggttttctttgcccctgtccctcccaatttttaaaatattgccttgtcagtcaacttaatgagtttgtgcatgtttaatgttaaatggattctagttgtatcccctagaaacattttaacaaaaattgtgttgataggacaagtttctgtttatttctaactagggtctcttaactaaatgtacataacattagcccaagagttgatcttctggttttataaagtagccacttgaacttagctgagttgaattaaatctaatatttataataatttagtaatggttttgttcttagactataagagaaggaaccaggttaggaaggggtaatgaagtaacagcaggaaggtatccacattgaaaacagttgtgatagctagagctatggcctctattcttgtatcttctgcatctaagtgccctgtctgtatcgaagttttaggaggccctaaggaaacctgcttgggcattctgattccatgattacatttgtgctgccagaaaacatttcccattgcattttagtgatggagatttaaagaaagccaattactgtaactcccttaaataaaaacatatttaaaaattttcggattaaataaacaataattgactctaaaactagactggaaattatccttttgttaggaaagacatcacagcacttgccagattaacgatggttgtctttatgcccagataggtataaagacttgcaatttttttaaacaaagccttacatttttttcaggaggaaaaaccaggagaggaagtaattgacaataaaatgaaagatcatcaaagtgaaatgtaggataacaagaaaaactagcatgttttatgtaggcagtattttattttgtttagtatgttcaacagacatttacagatcaactaaattcaatctttttaattatttgaggaggtgagctgtaatttaaatagtgccaccttttaaagtagtatttctcctttggacatccagaagacttaatattttctaaattgagggggaaaatgtacaacaaaactctttgaaaataccagtgttggattcaagtttgttctgctttccttcatagctactggcatattgtaggtggttgacttgattttgtctttttatgattcatactataaaatctcactagagcagcttttccagggggtgggttacacttaagctccaaattgtcaggttccctgacaccgtctttctgcagagctctttaaatacagtacaaaaatgtgtgacgctaaatacgtttctttatcctatctagacaagtcacaatactgtaaacctcttcaaccctgagcgtttgtcattgtacaaatgaattgtccgtgctttcctttcatgcacttatgtattaatgtgtcactttttgactagaggtgtgcttttgacacttaacctattttctattgaatataataagaagtgtgaaatgtaactaatagttcttaaaatgttaaatgaacagtaaatgttcagtggcgcacttcacattcaacttaagcatgataagtctatttggagtagagaaatgagattaccatatattctagaaccagcagaaaactatgtagttttcagttttttgagctgcatattctagtttctttttttttttttttaatccaaatcaacaaagggattttttttttctagtttcagttttggcactggattttatcctggagttttaaaatattcttcatcctgttctttttctattaaggttaatgttgaagaaggaaaatgcggaagtcgtcatttgacaagttttataaatgagtatttgaagctcaggaataagtgaagctgaaatttgaaaaaataaaagaaagaatgcatgctaattatcagaccagaagtcccacttgtagaatattgagcaatttgtgtgaagtggggaagatgaaagaagtcagaatttgaaacggaagaatgaagaaaagaaataaaaatgaagttaagataagaagtaatctggaatcagaaagcactacgctaagtaattactagtctgtttatgtgtccctgtatattttgctaaacatgcatgcattatttgtttaatagaggaaaatatatacagggtaaagaagtgccttccaggggaaacgtttaaattaggtaattctgattttaactgcttagttaaatgattgaaatgcaatttttaaaaaatatttagtagtcaagcaccaggcagcagtgagctctccagcatgggtaacagtgggcttcatgttgtcctctctagataaactttacctgtctaatgttgctggtcctggggcatgagcgaatacctccagggttggaactggtggtctttgccacctccctggactcttagattgcactgtcccctttccttcagtactgagcaatgtatagtagaatattttctgttaaaccattttcaaaggaatgtcaccaggatggttatggaaccaaacccccaaaatccaaacaaagcattgaacaaaatagttccctttggcattagtgtgttagttttttccatatggcactagtggaaatctgtgagcatttgggccctaaatttaagatgcatatttgctaaatacacagggatggtttttcaaattctgtttctgtttaatgcctatttcagctgattgactaggattactgataaaataccgtagcttccccttagaagaggtgggtcacacaagtgaacaggatagctaatacaaattgcagtaatggcagatgctttcattcctatttctccttttttgctatcaacatttagctattgtaatgttagaggtaacggttacaaagtagctttattctggttacctggtatcccttgcacttattgagaaattcaacccaaaagctgtcccttcttttctgtgtgttttgttttagctgagtagaagggtcaagtgattggtgtaatgttactttcagttgaatgagacaagtacacatatcaaaaataatacccagtagtagtcagccagcggttttctacccagttgagaatgccaagggtatcatgtcacacatgtcttcctgaaataaactttctctgagagttgtcaggtcttcatgctcttggagaaagtgacttaaatggcatttcttggagaatccattttctgatgctttcaggcctgtttatttctatatcttgcaagcagaagaaaattttctcttaagaagttttgcattcctttgtcaaatttcttgccatagataaactaatgatgataaatgttattttatgttccaaattactcaaagagcaggcaggaaactgaggtaaatgtgtgaatgaatattacattttaattccaagcccatggattcttttatcaagaaacctgacaggtccttggggtgcaaaagaggaaaagacctcttaacccccagcccactaaaggaaagaaagcaatttggaatctggttatgacccaagctggatagacttaaggtgagaaaacgttgctagtggaccattgtgtccatttgtttttgttttcccccttgaccaaagcatctgtgggtcctaatgtgtctcctcctcgggccatagggaagatgaggaggaggccggcttctgttcctgagaacaggcagtgtgtgaaagactgccttaatcagaggtctgattaatgctaaggggagtcaaaacaaggaaggggatgacagtgtttcaggaagataacctttgccaagggaaaaaaatgagtaggaagcatgtaacttctgaggttgactaagtcaagtaagtcagacttaactagtatgataaacagtgttttaagagatgcagtgtttatgagccactattttaaatctaacaaaccacattcagtttttaaaataatacagggattggatggttagtcctttcaaatatgtttttgtaaggtggttgctgttctcagaatagggagatgtggattattttgttggaaggctaagtgtgttgtatttttacttgatgtattccctttaggttttgtattaggatgtggctgagatccagtctgtgagagcttgattgatttcctgagcattttttcagggaaattttggttttattcatgctaattttagtttcatggtccctttttttgaggcagtggtgtccagttctgtctgttggtgtggttttaatgtgttgaccatgtcagccctgagagtggaatttgaagtatgcttagatttagggacttccccaactggtttttatagctttacctgtctgcattgagatttaaagttaattatgcttttgatttgggtgctaattttaggtcttatttcttgtaggcaagttttattcccttgccatatgtatttcccagccagttaaatggccaaaataacttcagaaagctttaacttctttaagaaaatatccctgataaaggatcgagacgtttaggtgttacccaaacaagtgtcagtatagaaaaggaagcctttgcattctggtatttcccttattcctggcccaagaaatgattgcttacaaaatatatctgcatagtccgttagttttggaggctgagtgaaaactcctgtgatttcagaaatattgtatctgtgatctgctagattttaaggagaaaacttcattaagtcttattttctaggttaggagtactgtctcttccctcagtggacaggctgccgaagcatcttagcttagaataaaggtttttctgttaaagccaggagcttaaagaggatcttgacttgacccattcttcctttatactcagattcctgggctgactgatttctgttaactacagttactttattggtagtcttaactgttactgtgaaacacccatattctgctttcacttctggagaaaattgtttcatttccatagaggtaatctttctagtgttggagtaaacaggcttttagcaacttttgggttccccatttctatattctcacctatgttaatttttgcctgtggtaaaaatagcaaaaactacaccctcatttttgagacttcctcctttgtccatggagagaagggaagtgtccgttcagaatacttgatagggaattccaagggattgttgttaattggaagccccagagcatcactacatcctttaaccatttcttgatgttaaaggcagctgttcatatatttttcttttaatctttttacagtcagtcatggagggaggtagaggggaaaggctgtcacatttcatgtcaccccaccatgttttataatggctttgaagtcatttgaacgtttctagagtcgtctggggcctagagacctgaactcattttactggatgagttagcctttccttctgtgttaaacctcaaaccttaatttgtctattctgtgttacattataaatgttttccctgagcatcaaaggatcatccaaattttctccattatgttgtaaaccacaaaactatcttctaaagtgttttgagctgtaatttagaataatcctctactgtcctttcaagaatgtccagaatactctgaagatgtatcacacaaggaaatctcttgtgattttatctgaaagcttcacctttgattcatgccatatagtgacttactgtaatactgcttccttttgagtcttgccatttctgctctctggagtagaaaggcttaccaggctttactttgtctaagtttgataacctaaaataaaggttgccttgataattttacctagctatcagactgactaggagtaggttctgtcctttcctcatctactgttttggtgccttggcagaacttttccttggtttcattacttagtatacccttttgttgattatgtgtctttagctcgttggtgacctagttatcctggttaccattcctttgctatttttcattacaaatccccccttaacctgccagccaatcccagttttggttgggaaagctatgagtacacaatgtttacctaaactttggcttttgtatgtagtttctgtactcttttgcttcctgggccctaggttaggagctcctgatttagctgcctggttttgatgtgtacttaagtaactaggtaagttaggttaattcctggttttccataagtttgccctggctcatctccatttagctggagaagctgtggaggatctctgacaccctctctactcttatttgtgtgtagttcgctgttctgttgtagctccatctggttgctttcagttttttagggggcctcccaccatggttagatgcaatagggttttacagggtttagtgtccttcaagctagcctttgctttccactaggtttctgcttttctctaggatttgaaactgagatcatcatctttatctcttatcactgaattataagtagtaacttgaaaggtcaaggtctttttaaaaatcaagcatttttttaagtaaattatataaattatataggattttgttttattgattgcaacttgattgaaataggtataaagtataggtgtcatagttaataaggttccgcctcaccctagtctttatggagtaacattctgaaacacagtccttggacagttcccttaactgcttgactttggcacccctttctgaaggaagtggggtcaaataactcttatccctgctccaaaaaggtggaagaaaggacaagttaattgacttatgtcatttggagcaatgaaactattaacaccaggtatattcagttcctgcccttacctatattttcttatcttggaaggggattgctgtccctcaccatttatctcacagcagcttatttgtttttaaagttgcccagaaagtgtgcaaattaaacttttaacatctacgtgtaggaatcccgttctgcttccagaagtggaagtgctcacggatcggggaaatctgcaaggcatacccctgcaaggtctcgctccaaggaagattccaggcgttccagatcaaagtccaggtcccgatctgaatctaggtaagaaagactgtcttgagatttcctcgttactcttagctctgaaattggtgcgtgttttgtaaaccaggaaggtagagagggttagattatttgttggcctattaaatattggtactagaagtgaacttaagttctgggaggcaagactaaaagcggttaagagcctgggcttttggagtcagggttttctatttttgctggtttgggcagattaacctttcagctttagcttctttataaaaggcaaattagtaatacagtaccagttcttcagggttgttgtgaggatttactaaatgtaagtaaactgcttactagtatggcaaatatactgcagaacattggctttcagtaattagaattcttgataaataagtatatatatggtgcgcttttttttttttaatgttggtcaaaagtaggctatatatacatcctggtttgcctggggcgataccatttatgcctgtggtcaggcataattaacagcaccccttttcttaaatgtgtgtcctcgtttcgatgacaatttagagtcactctagttagtcaagagccactcaattttttgtttttttaactgctggggaatactccttgtgattttgttactgtattaaattaatggtgggcataatgggagacagaaaagtagagaatggtcttctgagggggaaagatgggcacaagccaagctagtaaaatgctgcgtgccttgatttgtaaaagataagtaatatgtctttaattggaagaaatactggaggagagcttgtggtttttagaacgcttcctagcaaagttgaaatgactaaataattagagaagaaaagtattgatcctactaaattggtaaccatgttagcatattcctggattgttccctcttttggagtttaactttagaacagagtaataaagaagacaatatttgttttcagtcataaccttaggaggtctttgtcttgcaggtctagatccagaagaagctcccgaaggcattatacccggtcacggtctcgctcccgctcccatagacgatcacgtagcaggtcttacagtcgagattatcgtagacggcacagccacagccattctcccatgtctactcgcaggcgtcatgttgggaatcgggtaagatgaaaaactggttttgaagcagtcaactgcctaaatttactttttcttaaagttagagctgattttgacaatagagctttagcagttggtgcgtgagtgaaatcttcagaggcttttttagtgttttgagagagtcttttaagttaatcttccatgacggggtctgcatttgggctgcctgtcaattaagcataatactgacacaatggtgtaactccttagcccatcaaaaaaaaaaacttccgactgcattactatactgtagtatagtattagtacattagttcaaaatatagttctatgctaacattaactctttccaggctgcataaacctagttagatgctctcctgactttcccatttaatttgaagctaatttcttttgggtgttgttaaggcattttttacatttcatgaaaggcttcaaatgagatgatatttattgtgatttcactgtataatccaagtggtttaggaggagggtgcagggggggacttaatgtttttagagtagagtagaatttttccctagtaaattgttagtttatgaaataaatggaatctttaggtaaattcatcacagcatctggaatgttagcaacatatggctcactctttattctttcctcttgtcatctttttttgagacagggcctcactctgtcgcccagtctggagtgcagtggtgcaatctcagcttactgcagcttctaccttgcaggcttaagcgatccgcccacctcagcctcctgagtagctaggactagaggcatgccaccacacccagtaatttgttatatttttgtagagacatggggtctcactgtgttgcccaggctagtctcaaaactcctgagcttcaagcagtccaccagccttggcctcccagagtgtttggattacaagcatgagccactgcgcctggccaactcttgtttcttacgattgcaagctgtttatgacctgtaaaatggtttggtacgcatcccctcaggcttcgtttatgtacttacttgtgtattgtgtttctgaaaaaatcgaaccatacatgctcatctttttggcaattcagagcattctattgaatggaaggtgtgtcaacattacaattttttctagctgatagacacagtgtggttccagttatccttgtatgtcatgttatgaatatgtgaatttttcttagaataaattcatagaaggaaagatgccaagttgcttttcgccagcacgagtgcttgtttacctacttaattctaaggttgaaattttttcttttgcattctttcctacccattcccaaaaatacttgtagtacttgctgtaattttgtaatttctaagcagtgtttggtctaatcattatgtacttttcttgttagtgacattttggctagtatacagctccctttttaaacaactttgattttatgacaacttttccaaagtttaaaacttttttttttccctaggcaaatcctgatcctaactgttgtcttggagtatttgggctgagcttgtacaccacagaaagagatctaagagaagtgttctctaaatatggtcccattgccgatgtgtctattgtatatgaccagcagtctaggcgttcaagaggatttgcctttgtatattttgaaaatgtagatgatgccaaggaagtaagtaaaagcccgttcctttgtaaaccatcagttctattgttaacgccaagttatcagtgaccaattgctaggataaggacaaggacaagtcagtaatacttcgaactttttctccaacctcttgtggagactcaagatacatgcagaataacaaaattttgtataacttggggaagttggtcctaccacctgctttattagttgccacctattggggtcaactataccccaattccgccaggatatgtagtcagtgtttacactgggttcacattctagagtcaaaaataaccaaaagcaaagttatgatgcagaaggaaaacattgttccttttttggctagtgaatgatgtcatatttggattttgatttgttttgaggcagaatatagagtcaagatttgaaatgtggggctagaccccatttaagaaattcagattttaggtacattaaggatggtagctaaagtcatctccaagtatagagaagaggaagaactgagaaacacttaatgacaaacggagtttcactcttcttgcctgggctggagtgcaatggcgcgatctccggctcaccgcaacctccgcctcctgggttcaagcaattctcctgcctcagcctcctgagcaggtgggattacaggctaccacacccagctaattttgtatttttagtagagacggggtttctccatgttgggtcagggtggtctcgaactcccaacctcaggtgatctgcccccctcggcctcccaaagtgctgggggattacaggtgtgagccaccatgcgcggccgcccatttcctaattaaatttttgcagtaggatcatagctctcggaaaatagcataaattttatcttaatctctagtgccagaaactgcctgggcgtaaacactagcttgaacatctgaactagaagatagcatagtattggaattagaaacttaaattctatttaggtgaaaggatgtttcctcaaattatgaacaaactttaatgtgtttgaaacggggtatttttattttttaaatgtatgctgttaatacatactttgggaaaaggaactatatgtacttaaggctgtgcttcagtcttagcttttggcttccagagaagggctaagaaaacttccaagggttaaataatgtgttcaggtttcagtcataggatctcagtcgcaactatttaactctgttgttttaacccaacagcagccagatgaatgagttggggccctattccaataaaagattattttggggcattggaatttggattttgtgtgtttcttcacttgtcatgaaatactgtttttccccctagttatttaaatttttagcttatgggttatacagaaacagccagctggccagatttgacctacaggctatagtttgccaattgtgtgctgctttggagctggaaatactgtcaggatcatagttaggtaaaataattgtttcaagtttttatgagtagcttttacaaatgaacatttagtagagggaacaacacatttgtaagttgtagaccttacgttctggctaacattaagataacttaatgcacctaactgaaatgtccagtgggatcttactcatagccacaggataattagtggctttgttcaggatgtatgtaacaatttatttaccttttgaaggctaaagaacgtgccaatggaatggagcttgatgggcgtaggatcagagttgatttctctataacaaaaagaccacatacgccaacaccaggaatttacatggggagacctacctagtaagtttattttcaaaataaatataattggcagtttttcacttgtcaaagaaacacttgtattagtggaaagtcttcagcacttaggtttgtgccataaacttgactgttgattgattaaatgctcctcattagggcatttttctcatagtagaagttcaaccattacaggtaaaactaaatcttagtcaagtccatttttaaattttttgtttgttgttgtttggttttgtttttgttttgttttgagacggagtcttgctctgtcgcccaggctggagtgcgatggtgcaatctcagttcactgcaaccttcgcctcctgggttcaagcagttctcctgcctcagcctcccgagtagctgggactacaggcgcgtgtcgcaacgtccggctaattttttgcatttttagtagaggcaggttttcaccatgttagccaggatgttctcgatctcctgacctcatgatctgcccgcctcggcctcccaaagagctgggattacaggcgtgagttgctgcacccggcctaaattttcttaaatagagcaaagtgatactatttttgtttcctcttagaaatatgtgggatatgcagattgacctctggcaggatctgtgtgcctccttaaccaaagatttttaaaaataggtttatatatattgaaacaagggaaagggcaatgtttgctcaatataggtgagaattttaacaggaataattttcattttccagttaatgtgtcagaaaaggcctactagtagatataaaaactcatgtccagaaagataagggaggtcacctgaatatttttttcttcatagtggcagctctcgccgtcgggattactatgacagaggatatgatcggggctatgatgatcgggactactatagcagatcatacaggtaagttatgaggtagaaaggtcaacgtctgaatctcagtacagtgtacagagcagcactatgcttaagttttagcctttgttaaaagctttgctttagtacttttactcgagaaatgcagagtagaaagttaaatcagattctaaggttctgtgtcttaatcaatttaatgtgtaactggatttctgttcaaatattctagaatataaatgggatttaaatgataacttggaatattaataataaaatgtgttttatttttaaacattgaatgaggccaggcgcagtagctcacgcctgtaatcccaacacttcaggaggccaaggcaggcagatcacctgagatccagcctggccaacatggtgaaccccgtctctaccagaaataaaaatttagccggttgtggtggtgcacgcctgtagtcccagctactggcaggtgaattgcttgaacccggcaggcagaggttgcagtgaatttagattgcaccactgcactccactgtaggcaacagagcgagagactcaaaaaaaaaaataaataaatgaatacatagtgaaagcaaaattataggctgaggcaggggaattgcttgagcccgggaatttgagaccagcctgagcagcatagggaacctccacaaaaaatgaggcaggaagccggggaggttgaagctgcagtgagccaagtacgctcccacctgagtctcctcccccagagcaagaccccaccttaaaagaaaaaattatagcctctgtcttagccttttaaaagcaaatttataatggcttataaaagcaaatttcataagccattttggaaagccaacacttttcaggcagtttcttgtaatctcttaatgcatgcatcgtacactgagggcaggtaaaatggatgccttgaaagagtccagagaataattttaaagatgttaatttagtatgacaagggtatgtggctttttatttttgccaaaaatttggtatttcggggtttgggtagggaaatgtcaatcatagtttaaaaataaagatatctttgagaatacttccaaagataaaaatgaagtaaaattgtgacattttggtcctcccttgtcaaaatgtgtaatttgacaagtcaaataatgtagttagtaagtattgaccacagttgtcattgataatggtattgaggtatatggatgtctattttgtgcattatttggcaatgtttaagaagttaacagttgtcagtcattgtctgaaagtgagtctgtaagtgtattgttcagcattttatcacccatgaaaaccctttttttatttaaagcatcactctattgaatggtactaaaggtacaaatttgttggggctgagatttttttcttagtttgatttttttttttaagagcatttacttaggaatgttctgtgttctaatactacttatttcagccaccagagagaaccctatgccagtttctaaaaagggtggcaaatcacttgacctgcaagaaacatctcattcatgctctatgaaagtttttattttactaaatgaatgacataattttttaaaacttacaaactgaatgcgtgttgtgttgcctttctgtcttcacagaggaggaggtggaggaggaggaggatggagagctgcccaagacagggatcagatttataggtatgccaggagaggacttagcatctgtacaacagtataaagcttcacataaagatgtttgcctagtaatgttttggtaaattataagtggaatacccaaaatcagactgtttgaagctcatgaaaatattctaacggaaactaaatgtataaagtctttgtatatttataaaaattaattggttttgcaatagattatttagtgataccattttataccgtgatgaggtacagtgatgttagtcactgataactcattttttttgtcattatgttcttgtattacattttccttgctttttaaaagtaagcatctcaaatagcacaagaacattcaagccagcctttttaacacaaagctaaatcctgaagcacttgtgaaattagttttgggtgttcaagagggtgctgttgggattatttaatggtatgggaattttctcatttttatttttaatttttggagacagagtgttgctctgttgcctaggctggagtacagtggagcaatttgagctcactgcagtctctgcatcccgagtagctgggattacaagcatgcaccaccgcacagagctaattttttttttttagtagagacaggttttcaccatgttggtcaggctggtcaaactcctggcctcaagtgatcctcctgccttggcctcccaaagtgctgggattataggcgttgagccaccgcacccagccaggaattttcttttacaaaactctcttaacatagttcacaaaatttaaaaagtaagtagattaaaatatagcaaggattatttgaccttaaagttattaagagtgcttatttgacacttgggcctgataatgtgcttcattctcaagatttaaacagaccttgaaggttcatgcagctttccttttttggggaactgatgaaagggcagtatatatagtcataaatttatatgtttggtctaattgtgatctattgagacttagacaatcttgacatttgtttatagaaggcggtcaccttctccttactatagtcgtggaggatacagatcacgttccagatctcgatcatactcacctcgtaagtttttatcttaatatgattgtttatattgtagtatggcttgctctgatgacagtgtattccctttatcagataatggattggtttcaggtagtttcatacctaatgattctccacacatcctgaacattttttggttcaagaaagtttgtggaaacaacccttagaatcctattattttttaagaaggaaaaattggacagcctcctgagccagagtaggctcggagactcctgttgtttctaactgaaatagtaaataatgtatttccaccatttacccagagtaggctcagagactcctgttgtttctaattgaaacagtaaataatgtatttccaccatttagtagcttttcaagagtccttaaaaatttttggacagcacagaaacatggattacttagccctttagttctcagattgagttatatacttcccagcaatttctgttatttaagattgctatctcatttctggtgtaatacttacatggaagtctttctctatttgggggtggtggggttctggcacataggaatttcttaatggcagaatattctgaaattctcggcattaaagtatacttgataattagttcacttaatattaaagcatgttcattcttttcttcccaggtcgctattaaagcatgaagactttctgaaacctgccctagagctgggatattgtttgtgggcaatattttttattgtctcttgtttaaaaagtgaacagtgcctagtgaagttaggtgacttttacaccttttacgatgactacttttggtggagttgaaatgctgttttcattctgcatttgtgtagtttggtgctttgttccaagttaagtgttttcagaaaagtatgttttgcatgtatttttttacagtctaaattttgactgctgagaagtttctattgtacaaaacttcatttaaaaggtttttctactgaatccagggtattctgaagatcgaagcctgtgtaaaatgctaccaaatggcaaaaagcaacaataaacagtttgatttttacttttctttctaacatatcaatgcttagcagaactattcagattgtcagtagtaaatttaaagacaaatgcccgttttcctccagtccatgaaacataccatacttatatacctgcaactaagtgtttaaaattatgctctgtaactctgtactgctagtattagaactaaaaatcttaaaatacagccagtgcttaatgcttatatcaatgtggatttgtcggcttttatgtaatctgtaatatgtatagcaggaaatacgaagagttacacagtgtatgccttaaaaggctgtttcttaaaggtgttacaaggggataatggtatttcaactagttatcagcaagtgacaatacattccaccacaaatacactcttgttcttctagcttttagactatatgaaaaaaccgggtgcttcaaagtacatgataagggaacactatacctgtcatggatgaactgaagactttgcctgttcattttttaaatattattttcaggtcctttgcttaccaaaggaggcccaatttcactcaaatgttttgagaactgtgtttaaataaacgcaaatgaaaagaaaaatgttggtgcagctgttcacaaagaa

SEQ ID NO: 5319 - DNA, 627 bp, Homo sapiens
agtaaataactagactgcgggtactttaatacatgttcttattattttgcatttaagtaattttcatgaccaattgtagggatgttgctacaggtgggttattttgttgccttgctaacctttatcgcatctaggtattagtatgtttcaggtactttgggaagaactttacatataatctttagcaatgaaatgatgtagagtaacttaccttagttcaaatagctgtttaagtggcaatgccacgatctgaattgaacctaggtgatcttagtccacagttctcttgatcatgatgtctcaaatctgggtacctgggtgatggaaaataccagtaatggagcataggcagtattggcaggtcttaatttgtaaaacttactgtccagggtgttttcagtgtttgccaacttgtggtaaattaatatgcttagagaactacccttaggtttgtttctgataagcatgtggaaacaacttagtatatgcctgatgggttatttcaaattgttctcaatgagttttgaaacaagaatttgtagtatttatatataaagttgagttttagggtgtggtcccagagggggttgtgttatggatggatacattaaaggctgagaaacctgg

SEQ ID NO: 5320 - DNA, 304 bp, Homo sapiens
cctttttttttttttttttttttttttgagacggaatctcgctctattgcccaggctggagtgcagtggcgcgatctcggctcactgcaagctccgcctcctgggttcacgccattctcctgcctcagcctcccaagtagctgggactacaggcgcccgccaccgcgcctggctaatttttttgtatttttagtagagacggagtttcactgggttagccagaatggtttcgatctcctgacctcgtgatccacccgtctcggcctcccaaagtgctaggattacagcgtgagccagcgcgccc

SEQ ID NO: 5321 - DNA, 1452 bp, Homo sapiens
caaaaaatgatctctgattcatcagcatgaatttccaagtttggggtacagggcaatgcactttcctcagtttatttatattattgtttttaaaaatttgcaatacttaccaaagataaaggatttgttagaaacagcttttggaagaggagcagtgatataggtttattttactaatgataatagtaagtaaattataaagaacctttaatgttttctgagaaagtaaagcctattcttggagtttataatcatttaagtggttctggacaaaacttaccaaattctttactgttattactaaaaagaatgttaacaattttaagaaaacaaaaaaattattttttaagaattttgtttatcggttgatatactcattgccaaaccagattaaagtaatattccaattggattggcttcttctaagctctacttctaaggaaattgtttggattgatttgctgtctgtgctttgagaatgacttttttcccctcctccttttttttaaagcaaactttgcgtaacttattgagcaaggtttccccttccttttctgccgaacttaaacaactaaatcaacagtatgaaaaattatttcataaatggatgctgcaattacagtaagtattatcattacaaacccttgtaaaataaagaataatatttacatgaatctttatgttaaagtaagttaacatttttctttttacagtgagtttcagatatttagtcatatataaaaataaatgtaaaaatagacattatgactcagatatagaaatgtcactttattgtatgactcttcccagaaattctacagtttttaagaaatttgtgtttatcagacttgacagccattgataagataaatagcatttcttagaattatgttattggtttaaaaaacttgaatatttcctttgtcaagattaataaatataacaattagaaaaaaaaattataaagttttccacagcatagttctttaaatgaaaggataatatttactttaatcttatgtatgtgtactacagactttcagaattttatgaacagatttgttctataagcattattttactattttaacattatttcctagaatattttttcactgttattattttcacacacctcagattaaattttaaatttccattaaaacacctagaagaatgattgaaatcaaaacataatactttctttttatgataattacttttatccttgcagttaaaaagacttgaacataaggaagtgcttaaaatgtacactaatgtgaatatacatgcacactcacagttacattgtcactgaggtaaataagaaggtagagccatggaccaggcacttggcctcccataatcccagtgctttgggaggccaaggcaggaggattgcttgagcccaggggtttgagagactctgtcttaaaaaaaaaaaaaaaaaaa

SEQ ID NO: 5322 - DNA, 126 bp, Homo sapiens
gcctgtaatcccagctactcaggaggctgaggcaggagaattgcttgaacccaggaggcagaagttgcagtgagccaagattgcaccactgcactccagcctgggcgacagagtaagtctccatct

SEQ ID NO: 5323 - DNA, 87 bp, Homo sapiens
ctcacacctgtaataccagcactttgggaggccaaggcgggaggatcacgaggtcaggagtttgagagcggcctgcccaacatggtg

SEQ ID NO: 5324 - DNA, 1664 bp, Homo sapiens
cccagccctcatcctgagccctgctgtgtgcactgtgtctgatggagaggcagcctctctggatggcagctctctccatattccaaaggcattcttctcctgttctccttccctctttttaaattaaatgggaatgccactgacgtgatgtcgtttgcactgcaggatgacagaactgttgtgtgaataccattgtatttgccaaatggtccactcgtcatttcagaacaaacaaatggatggtgtctgtaagtcggcaaacactggtgacatttagccttgtttatgttcctttccttttgctgcatatttttggctccaaaagctactggctgaatcaacagggcctctgaatcaggagagaagtctggtagcattaattttagttgctatgtccatattctcttcagactgcatgaatcctactgctcaggaccaagtctaggtgagaggagagggcaatcaacctctttggtttcggatgttgtgtgcaaagcccagggttcaaataagcagtaattatctcctattacttagtgctgatcaacagcacctctacgtctaattgccaacctgccctaatcatgttgactattcttgctttagccagagacagaaggaccaaattttataaataacactttattgtcattattccattaaacgattaggggatgtggccctgcccttgctttcaaatgcctctagccctgatggtttctggattatttaataaatctgcacattttcttgcaggtaagtgacactccctgtcctagtcggtctatctggacttgcccttgtctgttcgtggtcctcggtggttatctgcagcttgttaatcgtgtaaagtcaagagaagaatgtatacacatatgtgtgttgaataattactattggcataggtatgtgtatacacacggtgcaccaatctacagtatatatagcagagaatcagaggctaaaaatattaccccatatgttccagtattagtcatggattgcaaaggcttagtaacttgagcaggagagaaaactccctcaaagtcataaatcctgagtgacaactgctgctggatgacagatcccttcacctgtggacaacctggctgggggtggggggctgttccaccagctcacctgagcatgtagaggtgggtcctgcagtggtctcgtgggtattactgcttgtgtctgattgtcctgtattttgtaacactttagaagaatacagaaaagtgcagtaattctctttctccatagtatttaagcagaaatattgctagtttaatattgtgtcaggtcgtcctattaaccaggagcagatgacagtaaaatttcagtgaatagcaccttgacatctacaacttaaaaatggtgattgaagcaaaatatgtaaacttgtacggggtgatcgtgtgctttggaacagagtattgttgaagtaattagaagatatattaaggtgttcctggtaatgaaggcatgtaagttataataattgtagctttctgaataagtgtcaaactatatctttaagtgtgctgtatgctgagttacaagttaggtcatttatgaatggaatgtaaaataatactaaaaatgcttcaataacttatcttggtattgctaataaaaaaaaaaagctgtgaaacattagtgca

SEQ ID NO: 5325 - DNA, 413 bp, Homo sapiens
gcgatctcggctcacggcaacttccgtctcctgggttcaagcgattctcctgcctgtctcccaagtagctgggattacaggtgcacgccaccacacctggctaattttgtatttttagtagagacagggtttcatcatgttggtcaggctggtcttgaacttctgacctcaggtgatccgcccacctcagcctcccaaagtgctgggattataggcatgagccaccgcgcctggccaatacctacccttttacgagctactcagtctaaagcaacaggcagcaaatattttcttaaagggccagagaataaaagtgttggctcacaggccatggggtgtctgtggcgaccacccaactccgctttggaagtagcaccacagctaccatagacaataggaaaatgatggctgtg

SEQ ID NO: 5326 - DNA, 1184 bp, Homo sapiens
gtggaaactcaacagagatttgtaaagtaccatatgtgttttaccagttgtccagctgattaaatctttgtgggtttcttttgctgttttatgcccgaagttaaatccatgctttctttggttattaatactgatgttatttaagaaatgcaaaaaggccttactttagtttctaagcggtcttggatttacatagcataaaaattagaatggatttaaatgggagttaaacagcaggagctggcaaagtcaggcccatctgacattgttatctaggctgtgttctttgagtatggaagatgacaaggaaacattaacacaatagcttaatagtttacttcctgtctttggtcaaaatgttccaaaaactgaattcttacctcaaagtcactagcctttgggtgatgaattcaattgtaattactttgggtttgctcatgacagtaatgcagtaacttaaagttagaaaataatttcaacccaggagcatcttaaatagaagtcattattgtctctatgtaattcttgttggaatgtttctttgggcaatttaaactgcccacacattagggcaatgactttctgagcattttgtagcaattaagagttgttgtttcttgttcttggcattgtttttgttgccttgtgagagaagatctgtggcaggatgctgctcttaaaaattttcctttaaattgactcaagctgttatttccttctgaatgtctgatcttataagacatagtagatgctattaagaaagatttgttttactgttgtttagcacttaaaacatatattttgtagttatatgtgttagctagggtcaaacataaaaactcaaatgctggctgggcgcggtggctcacgccagtattcccagcactttgggaggctgaggtgggcagatcacttgaggtcaggagttcaagaccagcccggttaatatggtgaaaccccgtctctactacaaatacaaaaaaacaattagccaggagtggtggcaggtacctgtaatcccagctactcgggaggctgaggcaggagaattgcttcaaccgaggaggcggaggttgtagtgagccgagatcgcaccattgcactccagcctggtcaacaagagcaagactctgtctcaaaataaatatattacaataaaaaataaaaactcaagtgataccaga

SEQ ID NO: 5327 - DNA, 1182 bp, Homo sapiens
gtggaaactcaacagagatttgtaaagtactatatgtgttttaccagttgtccagccgattaagtctttgtgggtttcttttgctgttttatgcccgggaagttaaatccatgccttctttggttattaatactgatgttatttaagaaatgcaaaaaggcctctttagtttctaagcggtcttggatttacatagcataaaaattagaatggatttaaatgggagtaaacagcaggagcttgcaaagtcaggcccatctgacattgttatctaggctgtgttctttgagtatggaaaatgacaaggaaacattaacacaatagcttaatagtttacttcctgtctttggtcaaaatgttccaaaaactgaattcttaccttgaagtcactggcctttgggtgatgaattcaattgtaatcactctgggtttgctcatgacagtaatgcagtaacttaaagttagaaaataatttcaacccaggagcatcttaaatagaagtcattattgtctctatgtaattcttgttggaatgtttctttgggcaatttaaactgcccacacattagggcagtgactttctgagcattttgtagcaattagagttgttgtttctcgttcttggcattgtttttgttgccttgtgagagaagatgtgtggcaggatgctgctcttaaaacttttcctttaaattgactcaagctgttacttccttctgaatgtctgatcttataagacatagtagatgctattaagaaagatttgttttactgttgtttagcacttaaaacatatattttgtagttatatgggttagctagggtcaaacatataaaaactcaaatgctggctgggcgcagtggctcacgccggtattcccagcactttgggaggctgaggcgggcagatcacttgaggtcaggagttgaagaccagcccggccaatatggtgaaaccccgtctctactacagatacaaaaaaacaattagccaggagtggtggcaggtacctgtaatcccagctactcgggaggctgaggcaggagaattgcttcaacccgggaggcggaggttgtagcgagccgagatcacaccattgaactccagtctggtcaacaagagcgagactgtctcaaaataaatatattacaataaaaaataaaaactcaaatgataccaga

SEQ ID NO: 5328 - DNA, 451 bp, Homo sapiens
attttctgcaaacatttggcctttcttgtgtgttttcatatggcatacttaccttccttttctttttcacctaaagtaaccatctggttctgcttttccattaatcctccttccttccttccttccttgcttcctttctgtcacttttctaagcgttctttatgccttcttgacatttgactgataatgacaatcaccccaggagcttaaaaaaatgacagtttcctggtcctcatggcatctgagatctgcttgttagacatcccaggcgtcatttggtatgcagccagatatgggagtcactgtcccagaaaacttgcctttctctcctgtgcccagcgcttactttgacattcctaacccatcactgtctggcctcgatgtacatttcctggctcatttttcaccgtattccccaggagggccatgcttccctgcttacgttaccatt

SEQ ID NO: 5329 - DNA, 84 bp, Homo sapiens
ggtttcaccatgttggccaggctggtctcaaactcctgacctcaagtgatccgcctgcctcaacctcccaaagtgctgggatta

SEQ ID NO: 5330 - DNA, 2107 bp, Homo sapiens
attggctgtgcagcacagcaaggacttggtgtgtgggatctgcatggaggtaggcagtctatgagaaagccaaccccagcaagtgccacttcaggatcctctccaacggcaaccacacctactctctcaagtgcatttgcaagtggagaagtgctaagcaatttgagagcaagatcataaagtcctgcccagaatgccatatcacatctaactttgtcattccaagtgagtactgggaggaggagaaagaagagaagcagaaactcattcagaaatacaaggaggcgatgaggaacaaggcgtgcaggtattttgataaagagcatgggagctgcccttttggagggaactgtttttacaagcatgtgtaccctgatggccatagaaaggagccacagagacagaaagtgggaacatcaagccgatactgggcccaacaaaggaaccacttctgggaactcattgaggaaagagagaacagcaacccctctgacaacgatgaagaagaggttgtcacctctgagctgggcaagatgttgcttatgctttgggctgcaggtagggacgatagactgacagactctgaagatgagtgggacttgtttcatgataagctggaagatttttatgacttggatctataacaaccttgcatggcgtgtgaactggtctgctgaccccagacagcagctgtcccctgtggtggtgtggcagtgcctgtgttctctcctaggcaggcctatcaactccaagtgctgcggtaagaatttttacccagggcctgtcttctcaacccctaccctttccgcgaggagtgtgttttccctgttgaaaaaacttacaaaaataaatcttaaagttagttttttgtaacatgaatttaaccgtcagttagtgtaggtgtgttgcgccatctgttttcaaccagattgtgtttatggacttttcacacactcattttgaggaccccaggttcaaaagtaaaagcagtggtcctgctttggggtccaagaataggagtgatgggtgaagggacctaagctggccaatagccttctgctccagacatgggacgtggatccttgaggtttctggtgaaatctgcacatctgtgtttttatatctgttccctatcctgtaatccctaccacgtgcacttgttctgtggtttttggtctcttgtttaattgtacataagtgatactactgggtaaccagaaccaggtgcaaatgtgttgagatttctactgttttgcatgttaggaaaattgagaaagaatacatataaaagatacagaggcataacatcaatgcagagttggaagttgactcccaagggctgacataatgtgtatgagtgtgggtgtgtgaaaagcttctcatccctgcatagatgcagtattcttagccttagcagaaaaaagtggtttagtggtttaagccttgtacagcaggatagatcttaaagggcaaagcactatattggtagttgtcaatatagcagtgctagctctgtctatataaacagagaaatggggttagccatagaggttaaaactacctggttatcccatatgttaacacaaactgggtcttggatacactgtgtatttaatgttttatgatctagcttttccagtacaggcactttctgaaaaacctttgtcttcatttggggcattttgttgtcgagtttttgtgtttttttttgtgggtatttgcctcattccacccctgagttttcacatagacagatgtgatacaaaactctgttctaaggtgtctattgtagtggactaatgggtttgcagtaataagtcatacttttccactgaaggggagggcttgggaatccctaagactagctaaaattaagttatttgaagaattccttgattggaaattttacctttgtgttttgtcgctttgtttcctgaaagtaactcggggatgctcctggtttgtccatttactgctttgattccttggatcccacccattctttcactttatgaaaatacaaataattgttgcagaggtctctgtattttgcagctgtccttttgtaagaagcacttttcccaaataaaacaattcaaataatagt

SEQ ID NO: 5331 - DNA, 34547 bp, Homo sapiens
gagtattctcgcgagaagtccaggggtggccgtgatggcggcggcaggagcaggacctggccaggaagcgggtgccgggcctggcccaggagcggtcgcaaatgcaacaggggcagaagagggggagatgaagccggtggcagcgggagcagccgctcctcctggagaggggatctctgctgctccgacagttgagcccagttccggggaggctgaaggcgggtaagaggtcctgccgcccgaggaagacgcgggagggaggcccgcccctcgcgaatcccgcggctcctggagccctgccgcccgccccctgcgaacccaggccccgccgccaatggctcgccctgcctctgcgccgcttggcccgtcccctctcaagcatatctcggataacgccccttccgcacctttcacgggcggtgggagctgaggctcctgtcgttatctctgatccttgcaccctggcaggaagctggtagctcacactttaacgggaggccttcacatattccagaaaagaaaccactttgcagtgccagactggaagaagtaacggtcactctgaaaacagggtgggagagctgcctctctttgaacctctcccaggaccaactctaacccaggtagatttgactgtaaaggccggttaggcttccctgtgctccgtgggtccgcgactgtctgacatgtccaccttctcagtatcctgacagtaccttgggcatccagtctgagatcaggcttagctgaaaaagctgcaggagtatgaagttcggctgtaatttgatcatcatttttgggaataggcattttgaggtttgtcttgagaattcttacttgagcgctttcattatcttatagggaggcaaacttggtcgatgtaagcggtggcttggagacagaatcatctaatggaaaagatacactagtaagtatttttagttgtttgcaagacaaaatagggtttgttttagttatttcttcttcttcttttttttttttttttgttgcgacggagccttgctctgtcgcccaggctggaatgcagtggcgcgatctcggctcactgcaacctcctccccccgggttccagcgattctcctgcctcagcctcccgagtatctgggattacaggcatctgccaacacacctggcttcttttttttgtctttttagtagagacggggtttcaccatgttggccaggctggtctcgaactcctaacctcagttgattctcccgcctcagcctcccagagtgttgggattacaggcgtgagccaccgcgcccggccttgtttttacatttttaagcgaatcaaaaatacattcaggccaggcacggtggctcatgcctgtaatcccagcactttgggaggctgagacctcaggatcacttgagaccagcctgggcaacatagggagacccccgtctcttaaaaaaataaaataaagtaaaatacattcaagtcaactgatttgagtctcgaactgctctgacacaggaaggtgctggggatacatcagaggtgatggatactcaggcgggctccgtggatgaagagaatggccgacagttgggtgaggtagagctgcaatgtgggatttgtacaaaatggttcacggctgacacatttggcatagatacctcgtgagtacttttcatagtttttgtgagaattgctcggtaaaataaatctgaacatgctcaacagttactttgtgggcaaaataaatgcaaagtatttcctatgtctcctaacccctattcagcaagtaggatgttgaatcaggagttgttttaattcccttagcatgttatctgcttactgagggcacagctctggtagatacaatggtgggtattgcccctccttttgagttgacaacctggtttggagacaaaaaaaaatgcaattacaaagtgttatataaacaaatttagaacaatataaaccttgtgttggtgttttggatttttcagaaaggatatatgtggataaagcctgttgtccaaaatttgagatgacccatgctctttatgcctgaaccatcctttttttcctttctcattgctgctgactcactcctttaggtatattgtctactctcctcagcaaacctatttccaatcatgtacctcttctagtgaattaaaatcatattgtgattgagaatgaaagacttttttccttatactgactgtctgttggaataattgtactgctcgctctctgtaatgttctttatggtttgtattatgctaatacatttataaaagactatctaaacataaggctgcattatcgtgaaattaatccaccttgggtgagattgtgaagaaatacatatatgtgtgtgtgtgtgtgtgtgtgtgtgtgtgtgtgtatatgtatatatatatacatatatatatgttctcttgtttttttcttgcgactgggtctcgctctgctgcccaggctggagtgcaatggcaggatcacagctttctgcagcctcgaacttctgagctcaagggatcctcctgcctcacccttccaaagtgttgggattactggcatgagccaccacacccagctttcctttataatctgttgtatactttctagttaaaaggttaaagtgggttttagaaatgctgatgtcttaattaacatgtgacttgtgatttaggaaagagtgtttttaaaaagaaagaaaaatactgaaggatcaggaagaaataattgatcttggtagcaacatctgctgggaaaacacactagctaagcaagcctggtctcttagagaggcctaagatagggccacttttgccagaaaaatttgtttggatagacagtttaggaaaggaagtttactagagagataactgggaggaattcaaggaagaatcaaatcacagttcaaagttttggtagctttggagacaacagtttgtaactgaatttcaaaagttatatctaaagtccagttagatcctatcagtggtatcaagttaaaaaaaaaaaaaggtggggggccaggcgcagtgactcacgcctgtaatcccagcactttgggaggccaaggcaggctgatcacgaggtcaggagttcaaaaccagcctgaccaacatggtgaaaccccgtcaccagaaaaaaaaatacaaaaattagttgggcacagtggtgcgtgcctgtagtcccagctactcgggaggcaggaaaatcacttgaacccgggaagcagaggttgcaccccagcctgggcgacagtgagactccgtctcaaaaaaaaaggccaggcatggtggctcacacctgtaatcccagcactttaggaggccgagacaggagaatgacgtgagcccaggacttcgagactagcctaggcaacatagtgagaccctgtctctacgagaaatagaaaaaaattagctgggcgtggtggttcacatctgtagtaccagctactcaggagctttaggtgggaggattgcttaagccctgcaggttgaggctgcagtgagccatgattgctactgcactccagcctgggtaacagagtgataccctgtctcaaaaaagaaaagaaaaataaagcccagttaggtgggatggattatcttttacaactgagatagagaatgtgagctagcagggtataaaaaaggctgctttttacacctgtttgtatttaaattaaaataactatttacctacctatctttagtatgaggttttgtctttgtaaataagcttatcacaatagtctgttaaacagaagaggttctacagagaagtgaaggtaaggaaactcagctgtaacatttgtaagaatgtttcgtaattccatgagggtagcaatagttggtaaatgcagtcttctctgaggatatcctaagctagtttcagagtccaagataaacctttgttctgatttcttctcttctagcttaagccatttatactaaaggtcttctgtccttctgttactttgccctttgcaagactaaactcctgtgcttttcctgtcatcttgtgcaatcactaccatgtttctcttctcaaatgcgttggttcctctgttgcatccgtctctgccatattgtctttcccctcctggcctcttcctctcttgccttcaaataggcaagtcttctcttgatgtcaggtgatccatgcgccttggcctctcaaagttctggaattagaggtctgagccactgtgcctggcctagttatttacatttttaattcattttttcttacattctgcctgccctttccaaccacattattgacaccatagagatacaccttagactactttgtcctcttctacagctagcctggcatattctttttaggtactcaaaaaataaacttaacgagataccagtgagaaccttctagatgctgaattgtccagtataacggataaggtcttattaactttcgtgacagaaaaatccaggtatttataaaaatatgagccctgttttggttttgacaacctttttacattttaagactatgttaacatattaacattttaatttacctgtcactgaggggaatggattcatgttaacttctcataaagaggcgtacagcctgtgcagcatggcgaaaccctgactccataaaaaaatacgaaaattagctgggcatggtggctaatgcctatagtcccagctacttggggggctgaagtgggagaatcaacctgagccagggaacgtcaagtctgcagtgagctatgattgcaccactgcactccagcctgagtggtagagtgagagcctgtctttaaaaaaagaaaaagaagtgtgtgtgttcacaagttcactaattcgtataatttggctcttcggcagatcctgtctacctttcatgaccaactacagttttcattgcaacgtctgccatcacagtgggaatacctatttcctccggaagcaagcaagtaagaacaaactctggagtatttgaagatgattatccactggaaaagaaaagggatctgggcgtagcagaatcaggagacctttgcctagtagctggtataaattcagttggggtttagctctgaataattgcaattgcccatttcaggtcacatgatgactccattttgctgctataattgttattttctggaccacttatcgagtattcccttggtagtagagatgtagtactacagataactgtttcttcctttttgtttttgatagacttgaaggaaatgtgccttagtgctttggccaacctgacatggcagtcccgaacacaggatgaacatccgaagacaatgttctccaaagataaggtagaggtggaactaatgtgattgcagttatattgaagagttaggtggaacttctaaatatactccctaacaagtactttcttcccagtttttattgaatatatgacagtggattcagtgattaccttgttctctttttttttcaagatggaatgcagtgatgcgatctcagctcagtgcaccctctgcctcctgggtcccagagattctcctgcctccgcttcccgagtagctgggattacaggcatgcgccaccacgcccagctaattttttgtatttttagtagagacaggatttcaccgtgttggccaggctcatctccaactgacctcatgatccactggcttcggcctcccaaagtgctgggattacaggcgtgagccaccgcacctggactgttgtgttttttttgagagagggtctctgtcacccaggctggagtgcagtggtgtgatcatggctcactgcagccttgacctcctgggctaaagcaatttgccttcctcggcctctcaaagtgctgggattacaggtgtgagccactgcacgtggcctctttttagtttattttttccaaaattattttgaaaagtttcaaggtggaatgtagtgacaccatcacggctcaccgaagacttgacctcctgggctcaggtgatcctcccacctcagcctctcaagtagctgggactacaggtgcacaccaccacacccagctagtttttatggtttttttagagacagggtttcgccacgttgcccaggcaggtagaactcccgtactcaagtgatccgtccgcctcagcctcccaaggtgttgggattacaggtgtgagccactgcacccggcccatttcttcttagatttaacagttaacattttgctacatttgttttatgtccccatatatctgtttttcccttaagctatatgaggctacattgtgggtacactttacccaatattctgttatacaaccacagtgccataatcataataaaaaaatttaacattggtgcagtactactaatttacagttcatatttgtagtttctcaggattatttttgtgttaataatatcctcctctatagcttctttctccatccaggatctggtcaggatcacccattacatttagttgtaatgactgttttgtctctaatctattaataaaacaattcctttattcagttgggttttgctctattacccagcctggagtgcagtggcacaggcccggctcactgcagcctcaacctcctgtgttcaagctattctcccacctcagcctcccgagtagctgggattccaggcgcatgctaccacatccagctaacttaaaaaaattttttgtggagatgtggtctcactagctggtttcgacctcctgggttcaagtgatcctcctgctttggccttccaaacgtctgggaatacaggcataaaccaacacacccagcccctttatttatttatttatttatttatttatttaatgaattaaaattttttaagtgcttaggcagttgtttggcatgatattcctcaatttgcatttgactttcttcatgattatgttcaggttaaacttttttttttccgctttaatagggacaggtctcactatgttgcccaagctgatcttacactcctaggctcaagcaatctaccagccttggcctcccaaggtgctgagattacagttgtgagccactgtgcctggccatgtgttaaacatctttggcaagaatattacataagtattgtgtgttttttagactgtcacatcaggaggtatataagatattgctttgttttattattagtgatcctaaatttgactagttggttaaggagggagcatttttatctttgtgctaagtaatccttaagccatacatggagattatgtgagtactttattttcctactcctttcaaccagtgatttttagcccccattgattatccaaccctgaatcagttgttagagtagtagttgtaaatcagaatacattctttggttgcaagtcttctgtaaataactttccctcattctttttcttcccttttaaatatcactgtggattattttttaaaaatcagtgtgttatagtccattgttggaatttttttttttttttaattgagatggagtctggctctgtcacccaggctaaaatgtagtggtgcgatgtctcggctcactgcaacttctgcctcctgggttcaagcaattatcctgcctcagcctcctgagtagctgggactactggcgcatgccaccatgcctggctgatttttgtattttttggtagagacagggtttcaccatgttggccaggctggtctcaaacttctgacctcaagtgatccacccacctcagcctcccaaagtgctgggattacaagcgtgagccaccacgcccagctcttgttggattttttcatttctgaccctcaggttgtcccagattcaaccattgtagccctatcagactgactcctgaaactctttgatactcccccatccgtttttgaactcttccttactttctggaacaacaaaatattccaggctttctttgtactttccctggttcctttcagtaaagatttagttgtcatggagctaactctggtggtggtgcttttgaagattatctaaataggaggccagaagatgaaggtcaaaagtcgtttcagtcatgcaagcaggagttggtgagagccacagtcacagcagtggggatggaagggagtcctgactgaagtgacatttctgaaattttaaaatttatttggtgagcatttaggtgtaaaaattgtgagagaagagtcaaggacaactcttaatgtgtctagcttattctgggtgatgactggttctaagttatcaggagcaagaatagaaatccataaagcagatttatgaggtaatataccaagttccattttagtcacaagaagtttgaggtccctttaggatgtccagatagagatgtctcagctggtagaaataggagttcaagagagaataatttgggagtcatcttccaattgacagccaagggactgtgacagagcttttctctccaattggagtgtaagccctacatggctaaggtttgtttatacttgtggaaatccccataatctgtgtattgtgtgtatgcaatgaaatattcagagattaaaagacaaacatgtaaaccttgtataacaccgtggggggaaaaactaacatggatttttctcttgattctaacaagatcttcgaaaaatgctgttttctttctttgtcagcatatctttgattgcagcagtaatagtcttaatttattttgaaaattaggatattataccatttattgataaatactgggagtgcatgacaaccagacagagacctgggaaaatgacttggccaaataacattgttaaaacaatggtaagtagattaaaattgattagacttgacatttaaaaaaccattgttttttgtaagaattcaataatatcgtctcattgtgaaatgataaaattagaacaacttaatgttaaatctttgagtgtgagatacagctaattgtgaattttagtagttttcacacacagaatcagtgagatgcatattgtcttatatgaacattgcccgcatacacctggttttatgtattgaaacttgtccacagtacttttccaagaataattttgtattgaaattagagaccatttcttttcttctattaaaaaaaaagttataggcaatattgtccttaaaattaaagagagcacctggggagaagtcaacagcaagctgttaacagtgcttatctttgtgaaatagaaggataggtgaggattatgaaaaacttgggcactctttgtgtttctctgttgtttgaattttttgatggtcactgattatttcttagaaggaaaaacgatactatcttttttggacactgcacctaggaattgacttttagagttagtggttgattattaattccatacttttaagtataaaatgttcattaatagtaaaacactacttctttttagagtaaagaaagagatgtattcttggtaaaggaacacccagatccaggcagtaaagatccagaagaagattaccccaaatttggacttttggatcaggtacattaatatgttttacattttctttttgattttaagccactcggggataggtaatcaggttctgtttacatttgtatatttgccacataacacactgccattatatgcacatagcatggtggactccaaaaaaatagtgactgatatgagagtactcaccttcaaccaagagaccagtgttgtatagtgtttttgttgtgggtcttccccaaaatgttatgaatttcttcaaatcacttttttttttaactttagtttcctcgcttgtaacatgtaaaaatgctatttcaaattacttctaatcttcctgccatcttaaattttgctcttaaaaactttctttgttgtgaaaagaatttgttttgaagaatttgtgttgcatatctaacataacaggcaaacgaaaattgctgttttttgttcaacagcagggttcacatttggcaagtcagaatgtcaaatcttaaagctgtgtctttacatgtttgatttgccagctttgaaaatgcaagattcagcccggtgcagtggctcatgcctgtaatcctagcacttttggaggctgaggcaggaggattgcttgagtccaggcattcaagaccagcctggacaatacaacaagacctgtctctcaaaaaagaaaatgcaagatttcacatagaaatttagatttctgtcttgtaaaatgaaaacatctgactgcatggggcctgaattcccacaggagctgagtgaatggggcttaggcactctggtttgccctgtgccctctcctgcctctacccaagttgattgattaattgccatttatcgccattctgaaactattctgatccttacacttggcctacctcacacatacttgcaaggttgcttgctggtccttaaaacacccaagtttgggactctgcaagcttcattgtttagaattgtccatttcagactgtgcatggtggctcacgcctgtaatcccagcactttgggaggctgaggcgggcagatcatttgagatcgggagttggagaccagcctggccaacacagcgaaactctatctctagtgaaaatagaaaaattaggccaggcatggtggctcatgcctgtaatcccagcactttgggaggccaaggtgggtggatcacctgaggtcaggagttttgagaccagcctagccaacatggtgaaaccccatctctactaaaaaatacaaaactttagctgggtatggcagcaggcacctctaatcccagctactcaggaggctgaggcaagagaatcacttgaacctggtaggcagaggttgcagtaagccgatatcgcgccactgcactccagcctgggtgacaagagtgaaactctctcaaaaaaaaaataataataattagccaggcgtgttggtgtgtgcctataatcccagctactcgggagggtaaaccaagagaatcgcttgaacctggaaggcagaagttgcagtaagccgagatcgcgccactgtactacagactgggcaatagagtaaggccccatctcagaaaaaaaagaattgtcaattttagttcccattctgttagaatttctcttgttttatgagcatccagattgactgacttacgtagactccttttttaattggatgtatttttgcaggaccttagtaacattggtcctgcttatgacaaccaaaaacagagcagtgctgtgtctactagtgggaatttaaatggtaagtgtttacatatctcattgctgaaatatttggaagctattgaatccagttgtgcctagaactggccattctttgggttgacccttaacctggatacttactaaaatgcttttatagttcaaactcaatttttaggaactagccaaggatttggcagatggtaatagaggagaactttttgtcactttacaacagtttggtcttgagtgagacaggtttagcataagacaaggaaccatttcaaggtcagatttgctgtgtttatatctgtatccttataactaacattaaatttagaaagattcatctcctctccactctttttctgcaattcagctgttacttttaacagatttcctgtgcccatcttctaatttttcttgccctgaaacttcagctcattcacatgatagcatttctatattaaccacccattgcagcttgttcttctgttaacccatctaatagcgggaaaacccctcgttactaatggttatttaataagagttggggtggctgagagatatttagctgttcatctgatatatgggatcattaacctgtcttttggagtggtcgcgtcttaaatatctgatcatttctactgttactaatattttaaggtgggttggaaatagctagtgtgttatctttttacaacatattttcccgttttaattgttaaaatttgacaaatacatggtgccacttctgttcttacaggtggagccacttttggaggtgaattcctccactgtcttctttcagcctctcagacttaagtattttgtggtttggaaaatgctttttgctgagctatggtagaagctaaaaactacataatttgaagcattatgaaaatggcggcaatagcacttaatatgaaacagtagttgagtttaatgttagtatttaagagcttgtatgttgtcatattctgcctaacatggccagccaccccacttctgtactgtttgctctgttctggttggatctgaaacttcttaaaataatcaaaatgcaaatgacaattaaaaatgtaattgtggccacgcgaggtggctcatgcatgtaatcccagcactttgggaggccgagacaggcagatcacctgaggccaggagtttgagaccagcctggccaccatggcaaagccccatctctactaaaaatacaaaaaattagccaagtgtggtggcaggcgcctgtaatcccagctactcaggaggctgaggcaggagaatcgtttgaacccaggaggcagaggttgcagtgagccgagatcgtgccactgcactccagcttgggcaacagagcaagactctgtctcaaaaaaacaaaaatttaattgttttttgattatggttacttaaactagagatgatgacattgcagcagtttaacattaaacttttatgaaaaataggaataacatctgaggtgttcaccaaaggaaattctgcataaaaagtctggtcctgtatatgcagaatatgagccaccttcaatgtcttgatcctttttattgcagcagaactgctagtaattcccaagcttgccccaaattaagatttagtactctgcagttgtttacgtaaaggtgttttcctgcagttcagggacatttcctggaagagggaaaaataaaactaattgagaggaatttgaactggacaaaaatttcaaagtacctatttcagaaatacacaaggtaatcttccttgtggctttagtatgtagctaaattttttgtataaaatatgtaaattgtctattcctatttattgcttttagttccacaagccaggttaatctaacctgaattttagtgcattggcacaatcttaataaatgttgtatttgacgaatgggtatggaactaaaaattgcctagcaaatcgaaagccttctttcttatttgtgtcatgtgcaaccacgatggagatctagcagtactggagagaaacacctttttagtacttctgtttccgttttccatgttggatgtattttgtcttgttggatattcaggttcaatgctttagcagatactgtgcttttatgatgtttatggactgtattgtgtagttcaagcaagtgaacatcgacttacagtgaggacattctctctttatgggtgtttgtattaatttggatgaaaaaaaatgtgcccatacagttgttttcattctttttagctgtgggtgtttgggatctgaatgagtgagaatgcatttgtgtcacaccctgagaaagtataccaatagttgcagtttattaggaacaaaggttgaaaactgtaacccaaccatcatagtgctggattcatttgagtttattgccagaacccagtgttcccaggctatgagatgctcagtagattctttgaaaactagggtgaaatccaatatgcctttggaaggaaatcctcctgtggtgttacacaaatgcacattgggtgtgttggtccctatggaatttcagtatccacatggtgtttcccttgtggctcattgaaagcaatctgccttctcttcaaagggggaattgcagcaggaagcagcggaaaaggacgaggagccaagcgcaaacagcaggatggagggaccacagggaccaccaagaaggcccggaggtggggagagtgcccaccctgcccccctcactatttaagtattatttggtgctgggaaagtccagcagagggaagagagttcaagggtcggaggttaaaaagcctgtccattttttctaaaccttgagcactttgagggacaaaataaccccaggttggaggccaggcgcagtggctcatgcgtgtaatcccagcactttgggaggtcaaggagggtggatcacttgaggccaggagtttgagaccagcctggccaacatggcgaaaccccatctccactaaaaatacaaaattaggcaggtgtagtggtgagcgcctgtaatcccagctacttgggaggctgaggcaggagaatcgcttgaacctgggaggcgggtggcagtgagccaagatcatgccactgcactccatcctgggcaacagaatgagactccgtctcaaaaacaaaacaaaaaacaaaaataataaccccaggccgggcacggtgggtcatgcctgtaatcccagcactttgggaggctgagacaggtgaatcacctgaggtcaggagtttgagaccatcctggacaatgtggtgaaaccccatctctactgaaacaaaaaacaaaaaaattagctgggcctgggggcacgtgcctataatcccagctactcgggaggctgaggtgggagaattgcttgaacccaggaggcagaggttgtagtgagctgagatcgcgctatcgcactccagcctgggccacgagaacgaaactgtctcaaaaaaacaaaacaaacccaagtttaagtgtcatgttttacatttaagtgtacatacatttgttagtacaaaatttatagtagtaacaaggatagtgtcttctggtgataagcctggggaacctagggagtgaagttctgttaaggcgacttgagaaaggataggtggggagggagtgaaaccagtgttgaatgttagctcctttagctccttaactttctgcttctcccttctcatgccttttcccttccctttgtctaaagctgaggtgatgaaatccaggttgcttatttatttatatatttttgtgagatggagttttgctctatcacccaggctggagtgcagtgatggaatctcggctcactgcacaagttatttacttagattagcaagatagcaagtgcttatgtctctgagcttctgttcattactttataataatcagtatactaaagactatcaccctaatcacccccattcctctcctcccttccccccccccccccccccgcataatgtaccagctcagtttcatagacatcaattcatgtttaaagaccactgggaagatatccacaatctacaagtaatttcaccaaaactaccttgctcaataaagctaatccttttcacttccttgttttgcctgaagagggcagagttacttatttgagtaatgagaagtatttgctgtgaagttgcatgtattctagctgaaataaaccagaggcctttcttacacagttgaatgcatttgagctaaagggggttttagttttttgatgttattttttcctttctgcagtgaccctttgttttctgctcagcgccttccccctcatggctacccattggaacacccgtttaacaaagatggctatcggtatattctagctgagcctgatccgcacgcccctgaccccgagaagctggaacttgactgctgggcaggaaaacctattcctggagacctctacagagcctgcttgtatgaacgggttttgttagccctacatgatcgaggtatgtaaagtattggagatcatatggatgcagggttactttgaactgccatcattagccttgtcagtctagaattaggtgtacatctcagtctgttgccactgcctcacccccatctctgtctagattcatccagaatgtgcaagaaattctgttccttcctataagctccagccgttttatttatttatatatatatatatatatatatatatatatggttttttaaaactttctattttgaactaattttaaacttgcagtaaagttgccaaaaataagttttctttctcatcaagcttttcctaatgataatatcttagaaaaccatagtacagttatcaaaactgggaaattaacattggtaaatattatcaacacaactagagaaagacctttcaattttaccagtttttccactcacacttaattatttctctttagtctattatagtctttaacagttccaaagccattgcttatctttcatgaccatgatatttttaagtgttttaatcagttattttgttgaatattcctcagtgaagatttgtctaatgttttctcatgattagactgaagttaggcagtttggggaagaataacacggaaacaatgtcttatagcatcatctcatgggattcatgatgtcagtaggtcttattggttacgttgaccatgatcatttggttaaggtgattctgctagctttctccactgtaaaaaactaccgtctttcccttatacttaacaaatgtcttaggcaaaaatacatcgagtctatctatgcaaatatcttgtttgtttttaaacttatgttcactaattttagcacccatcagtggatattgtctgcaacaattatgactgtgttgtatgatgattttcgatttcctctttcccttttctgttaattgattatttatatcagtatggactcatatatatttactttatttcagggagtataatccaatactttgattattttgttgtttaaattattccagctttggcaagtaggagcttcttcaagaagttggttcttgtgttctttcgataagccgtgtctttttttaaaaaaaaaatttctttactttgaggcatcaaaaggtgttcctggccaatcttatattttctgtgccccaggcctacttctttcaccgagccctggttcctttgattggagcatgttgtttaggaataacatctaggtgctcacttccatatatcacatataccaaaattagaatgataaagagaagatgcatggcccctgtgcaagaataacacacaaatttgtgaagcgttccttattttttttttaagtaataaagtaaataaacaaatagcaattaatatctaggtgttaggtgtgctgttactaggcgtcattgcttctagacttcctcagtggtcagaggtaggaagtgcatgtgtgtatgtacaaacctgcatgtacacagataacaatttatattgatacctgggttgacagccttcctcctttccttatttgtaaggtctttctccaacagtgggaaatgtgaataattagatagataattatctacaatatatttactttatttcaatatatttattttgttatagagatcagagtctcactcaggctggtatgcagtgatgcagtcctggctcactgcagcctcaacctcctgggctcaaacgatcctcctgcctcagcctactgagtagctgggatcacaggcacacgccaccacacctagctgggttttttaattttaattttttagaggtggggtcttactatgttgcctaggctggtctcaaactcctgggctcaagccgtcatcctgcctcagcctcccagggtcttgggagtgagccaccattcttgaccttgctcatatttaatatgcacataaagtcgtttcagaatttctttttttttttttttttttttgagttggagtcttgccctgtcacccaggctggagtgcagtggcgcaatctcggctcactgcaacctctgcctcccgggttcaagtgattcttctgcctcagcctcctgagtagctggaattacaggcacgtgccaccacgcccggctaattttttgtatctttagtagagacggggtttcaccgtgttagccaggctggtcttgaactctggaccttgtgatctgcccgcctcagcctcccaaagtgctgggattacaggcatgagccactgaacccagccagtttcagaatttctaatccctgggagaaacatttactaagtagattatagcatttatatatagctctttttgtctttagacttgccgtactcagtccaaggtactggtaacttagattagttcttttcttccccacttcctttagtgggtcatgtccagttaagtcaggtttatttgctagtgtttgatgccattttggattctcccacatgttgattgtttgtgtgtatgtatgtttggagtgaggatgtgtgaaacattactatggttctgggagtcagagctgtacagaacggtttacaaaatgtcactccctcatcacccctacagtgcccttctcactctcttttttccaccgtcttcccactcacactctagtttctagtttatccttgctgtatttcttcacaaatgagcagatacagtacatgtatatattcttttgtctcccttttttgtttgtctgtttctgtgtttttttggtttgatttgttttttgaggctagaaggcagtggcgtgatctcggctcactgcagccttcacctccctggctcaagcaattctcatgctgaagcctcccgaatagctgggactacaggtgtgtgccaccacccgtggctaatttttgtatttctagtagagatggggtttcgtcatgttggccgggctggtctcaaactcctgagctcaggtgatctgcccatctcagcctcccaaagtgctgggataacacgtgtgagccactgcgcccagccttatctccttttttatacatgaatagcagcgtgctatatatatagtctttgctccatgcaattattttattttatttttttttttagaaaggttcttgttctgtcacccaggctggagtgcaatggtgcaatctcagctcactgcagcttcgacttcctggctcaagcaatcttcccatcttagcctcccaggtagctgggactacaggcacacatcactgcacccagctaaattttaattatttttttagggacaaagtctccttcactgtgttgcccaggatggtcttgaactcctgacctcaggtgatcctacttccttggcctcccaaagtgctgggattataggcatgggccattgcatctggcctcattgtttatttgtttgttttcaagatggggtctcactctgccacccaggctggagtgcagtggtgtaatcatggctcactgcagcctcaacctttcctgttaaaatcagcctgcaaagcctcgaaattctctcccaccttttgccattttttctttctgtggaagtcatggggttctcccctgattatttagattgctcccttatctcacataatggcctggtaataaagtaagattcaaaccatatgcagaggtagagagatgaattacagtgaatacctgtcttagtccctttgtgttgctactaaggaggacttgaggctgggtaatttgtaaagaaaagaggtttatttggctaaaagaagcatggcaccagcgcttgcttctggtgaggatcccaggcatgtccagtcatggtagaaggcaaagcggagcaggcgttagatggcaagagaggaagcaagacagggagggaggtgccaggctctttttaacaaccagctcctcagaaactaatagagtgaaaactcactcacatccccacattccgcattaatctgctcttgaggtatctgccctcctgacccaaacacctcccatcagaccacacctccaacattgtgatcaaatttcaacctgcacttagggtcaaatacccaaactatagcgataccttgtacacttttcacccagattttaacagttcaagattttgccatgtttgctttatctgtttatttctttttctttttctgaattaaaaaaatatatatatcaccctatgtacactaaaaactatgcatctctttaaaaatgcggctattggggccaggcacagtggctcacgcctgtaatcccagcactttgggaggctgaggcgggtggatcacctgaggtcgagagttcaagaccagcctgaccatcatgaagaaaccccttctctgctaaaaatacaaaattgcgggcctggtggtaatcccagctactcgggaggctaagacaggagaatctcttcaacctgggaggcggaggttgcagtgagccgagatcgcgccattgcactccagcctgggcgacaagagtgaaactccatctcaaaaaaaaaaaaaatgcagatattttcttttataaccaaaataattccttgctatcatccaaattcagttcataatcagatttccttgattgtcttaaataccggttcatctcctgagatatttattaattacaaaaggaaaattgtcatttagcagtggagaaacctggcaggcatcatcttaatcaagtgaccagggtgaacatcactattttgatagcatatatgatgcactgaggggcacaacattacctcattggagttcctgagtaagaataacaataaccttgaccttaaaatgaggaaacgccaggccgggcatggtggctcacacctgtaatcccagcactttgggaggccaaagtgggtagataaccggaggtcaggagtttgataccagcctggtcaacatggtgaaaccccatccctacagaaatagaaaaattagccaggcatgatggcaggcacctgtaatcccagccacttgggaggctgaggtgggagaatcgcttgaacccgggagccagaggttgcagtgagccgaggttgcaccatcacactccagcctggatgacagagcaagactctatctccaaaaaaaaaaaacaaaagaaaacaccagacaaatgtaactgagggacattctacaaactgaaatgaccaatattcttcaaagtgtcaagcttatgaaaggttgaggaactgtttgagattggaagaggctaaggagacatgacaactaagtgaaatgtggaatctaggattagaacctgggccagaaaaggggatattacttggataattggcttaattttaagaaggtccatggattatttaatagtattattgttaattttctggttttgatgattatgttaatgattatacatgatgtgaacatttgggaaaactgagtgaagcacacactaggactctactattttttgaaagtttgaaattgttggccgggcgcggtggctcacgcctgtaatcccagcactttgggaggccgaggcaggcggatcacgaggtcaggagatcaagaccatcctggctaacacggtgaaaccctgtctctactgaaaatataaaaaattagccgggcgtggtggcgggcacctgtaatcccagctacttgggaggctgaggcaggagaatggcgtgaacccgggaggcggagcttgcagtgagcagagatcgcgccactgcactccagcctgggcaaaagagcgagactctgtctcaaaaaaaaaaaaaaaaagaaagaaagtttgaaattgttttaaaacagttaaggccaggtgctgtggctcattcctgtaatcccagaactttgggaggccaaggagagcagattgcttgagttcaggatttgagaccagcctgggcaacttgttcaaaccctgtctcttcaaacaattagctggatgtggtagcacttgtagtaccaactacttgggggctgaggcaggaggattgtttgagcccaggaaatcaaggctgtagtgagtcaagatgacaccactgcattccagcctgagcaacagcatgagaccttatctcaaggaaaaaaaaaaaaaaactagtcaagaggctagccacagtggctcatacctgtaatcctggcacttgggccaacacaagaagatcgcctgaggccacgagttcaaggctatggtgagctgtggttgtgcgactgagtaagagagcaagaccctggctcttaaaaaaaaaaaaaaaaagttaaattttttaaatgaagatttattcaaattaagttccaaactcatcaccattggtttgttatatttgagggaatatgcaatataattaatatcaatcagatgtcttaaagttaatcacatgtaggctgggctcagtgactcagcctgtaattccagcactttgggaggtcagtgcaggtggatcacctgaggtcaggaattcgagaccagcctgaccaatatggtgaaacccgtctgtactaaaaatacgaaaattagctgggcgtggtggtgggcgcctgtaatcccagctactcaggctgaggcaggaggattgcttgaacttgggaggcggaggttgcagtgagccaagatcgtgccactgtactccagcctgggctacagaacaagactctgtctcaaaaaaaaaaaaaaaaaaagataagccaggtgcggtggctcatgcctgtaattccaacactttgggagaccaaggcgggcagatcacgaggtcaggagttcgagaccagcctgaccaacatggtgaaaccctgtctctactaaaaatacaaaaatgagctgggcgtggtggcacgcgcctgtaatcccagctactcgggaggctgaggcaggaaaattgcttgaacccgggaggtggaggttgcagtgagccgagattgcaccactgccctccagcctgggcgacagagcgggactccatctcaaaaaaaaaaaagataatcacatgtaataaaaactaagtaacctaacaactttctcttttttgttgctttctcattccttgccagtatcttatgctgagatttttaaactcctcaactaatatttcaaacacctgacctgatatttgtgatttttaaattgttttattggactaatgtttttgtggcaattgtccccaagaacctcaaataagttgcaggccttcttttaatctctgtcaccgcagctccccagttaaagatctcagatgaccggctgactgtggttggagagaagggctactctatggtgagggcctctcatggagtacggaagggtgcctggtattttgaaatcactgtggatgagatgccaccagataccgctgccagactgggttggtcccagcccctaggtaagctggggccttaatatggacatcacagcagatagagaggatagaccatctggccaagggctaaggcttcaaggctgttgggtttaccagattgtgggcatagaattcagttcctgagggttgagctggtttgctattcccgggatatttttgtaattctttgcttgtgagaaagtttttaagcaattttacaaaattgaccaaaaaacataaaaagaaataggatctttttccttcagcaaactagatttgacttgcaatcttctgacttcctgtgtatgtttttattgggacaggaaaccttcaagctcctttaggttatgataaatttagctattcttggcggagcaaaaagggaaccaagttccaccagtccattggcaaacactactcttctggctatggacagggagacgtcctgggattttatattaatcttcctgaagacacagagacagccaagtcattgccagacacatacaaagataaggtgagtttgtcctctcccggcagattcctggctttgaaggcctgtggcagccagtgcttatcactggcttgtgtgatctcttaggaactgacccacagctcacgttttttcctaacctgttgctatgacattttcagaataacagtaacaatcggtgcacaaatagtcatccattcattcttctacccatctatcatttgtctttttttagtgcactacagagaaaatgacagacatcaggacactttcccactaagtacttcaggatacataagctagaattcagcctgtttaattcattcttttgatacaaaatgtatataaaatgaagtacacaaattttaagtgtacattcactgagttttgagtttgacctaaactgttgaaatgtaggatccactaggcatgatggttcacgcctataatcccaacaatttgggaagccaagctgggaggactgcttgagcccacgagttcaagaccagcctgggtaacatcacgagaccccatctgtacaaaagactaaaaaagtgccgatagtcccagctacttgaaaagctgagatgggagaatcattcagcccaggagttcaaggttactgtgagctgtgatcacaccactgcactccccccaaaaaagagatgtggacacttaccatcacctcaggaagtttcctcatgccttttcacagttagtcctcacccccacatagaggcaaccactgttttaactttctttcccaccatactttaatttgtacctcttcttgaacttaaatgggctcatgcagtctgtagtcttttatatctggcttttgagactcatccattttgctgcatatatctgtgcacccttttcagtgcagggtagtactccattgcatgaatgtgccccagtgtgtttatgcattttcctactgacagacacttgggccgtctcaggtttggggctactatgagcaagatgctatgaatattcttgtacagtctttttggatcattggatagttacatatttagctttataagaaattttccaaactcttttcctaccatatatgagggttttagttgctgacatttatgattgtctgtcaacttaattttagccatttttgatgggtgtgtagtagtatctcattgtgagttaaattagcatttctttgatgacatactgggcatttttcatgtgcttttcggccactcatatgttttttgtgaagtttctcttcaaatattttgcctgttaatattgctattctgagacttctctgttcttttttttttttttttttaagtttaaatttttttggtagaaacaggtttggtattttttgtttttttttttttttccatgttgcccaggctggtcttgaactactgggctcaagcagttcacctgcttcagcctcccaaagtgctaggattacaggcatgagtcactgcacttaatagtgtcttctgaggaaccaaagttttagtttttatgaagtctgatttatcaaatttttcttttatacttatttctttccatgaatttaaaaaaaaatctttggctactccctgtcatgaagatattctcccatgttttcctttgaaaacatcatggtgttagcttttacacataggtgtctgatttaccttggattaatttttttttttctttagatggagtctcgctctgttgcccaggctggagtgcaatggtgcaatcttggctcactgcaacctccgtctcatgggttcaagctgttctccagccttagcctcccgattagctgggattacaggcacccgccaccacacccagctaatttttgtatttttagtggagacagggtttcaccatgttggtcaggctggtcttgaactcccgcctcggcctcccaaagtgctgggattacaggcatgagccactgtgcccgaccagatttttatgtatagtatggaaattcattttttttccatatgattacacaattatcccagcaccatatgttaactctttcctttctccactggatttctttgatgcctttattgaaaatcagatgtttgtgttaaggaaaggtttacttcagagctctgtatttcagtgatctgtttcttgtcctttatgcatgtatcacagtgtcttggttatcatagctttagagtaagtctttaaatttgatagtggaaatactctgagtttattctgataataagcagcctacagtctcatttttattgattatatcacactagtgacttattgtaccatcctgcctcccggaactctttaaatgtataccacactgatgcctggttttacagaacacagaggtctgcacttaaaaggattctgtaggtgttttttcaatgattcatttacattacaaaaaaaattttttttcctttaattaaaaaaaaaaacaaattttttgaccagacactgtggctccacgcttgggaggccaaagcaggcaaatcacttgaggccaggagctcgaggccagcctgggcaacatggcgaaaccctgtctctacaaaaaaaatacaaaaattagttggatgtgatggcacactcctgtaatctgagttactcaagaggttgaggcatgagaatcgcttgagcctggagggcagaggttgcagtgagccaagatcatgccagtgaactccagactgggcgacagagagcaagactgtctcaaaaataaataaataaataaataatttttagtgacatgtccacacgacagaatactatggatctattcaaaagccgcatatatactgattataaaatggtctctaatgtagttgccaagttaaaaactcaagatgcaagaccaaacttataatatgttaccatttgtatggctttttgggctttttttttttttgtatgtttatctggtgttttattttgaaacagagtctcattctgtcgcccaggctggagtgcagtggtacgcagtctcggcatactgcagcctctgcctcccaggttcaagcaattctcctgcttcagcctcctgagcagccaggattacaggcgtgcaccaccacgcccagctaatttttatatttttagtagagacggggttgcgccatgttggccaggctgatctcaaattcctggcctcgtgatctgcctgcctcagcctcccaaaatgctgggattacaagcgtgagccactgcgctcggccacatgtgtgtgttttaattttgaagacaatatatgcctagattctctggaaggataccaggacactggaacagtgattacttttggcaggggaaactgggtataagggacatagaaagagagactctcgttttatatgcttgtatatcttgggaattcttcttttctaaccatgtttaatacatatatatgttaagaaattgaaattttttaaattaatgtcatatatttctctggaagtgaatagttaaatagactcttaagaaccagtaagaaagaggtgacccagagaccacctgtgggaacagatgggaaactaggacggggaagaaggtgaccttcaaaatattttcatagaataagggattgtaggcttggtgcggtggctcgtgcctgtaatcccagcactttgggaggctgaggcgggtggatcacctgaggtcaggagttcgagaccagcctggccaacatggcgaaaccccgtctttactaaaaatacaaaaagtaaccgggtgtggtggcacatgcctgtaatcccagctgcctgggaggctgagacaggagaatcgcttgaacctggcaggccaagattgcagtgagccaagatcacaccactgcattccagcctgggtgacagagtgagactgtctcaaaaaaaaaaaaagaataggctgggcgcagtggctcatgcctgtgatcccagcactttgggaggccaaggcgggtggatcacctgaggtcaggagtttgagaccagcctggccaacatagtgaaaccctgtctctactaaaaatacaaaaaattagccgggtgtggtgtaatcccagctactcgagagcctgaggcaggagaatcgcttgaacccgggaggcggaggttgcagtgagaagagatcacaccattgcactccagcctgggcaacaagagtgaaactccgtctcaaaaaaaaaaaaagaataagagattgtagactcaataaacgtcatttttttcagtgagattattggaaaagatgtgtgaatttagccacttttatgggtatttttattgtggtaagcatgtatgtattatgtattttctcacgtttcttactaaaggcctactgaaaatgttttaataaacatgtgccatctggtattttttaagaagtgtgtaatagttcaaaatctagcaaaactcaactgcaaagatttttaatatctgttgtagagctcaaggggttaacactatttgtgtgcggatgcgtttttttcatgatgatggagctgatgctttattgtgcctttttttctttcttggttttcaaggctttgataaaattcaagagttatttgtattttgaggaaaaagactttgtggataaagcagagaagagcctgaagcagactccccatagtgaggtgagtcatggccataagaacattagaatcataaggccttgagcgttaggacccattccttcattataaaagtgaggaacacgaggcccaaaggggaatgaaggggcatctggtagccccactggccagcggcaagctcaccctctgcttattgtgttttgctctttatgtagtaccatgcttctgctgttagagacatgatcctgttctttcaggataactctgtagagaaaagtgtataaaaatagtggcctgcaccaccccatctgggaggtgtacccaacagctcattgagaacgggccatgatgacgatggcggttttgtggaatagaaaagggggaaaggtggggaaaagatagagaaatcagattgttgctgtgtctgtgtggaaagaggtagacatgggagacttcattttgttctgtactaagaaaaattcttctgccttgggatgctgttgatctatgaccttacccccaaccctgtgctctctgaaacatgtgctgtgtccactcagggttaaatggattaagggtggtgcaagatgtgctttgttaaacagatgcttgaaggcagcatgctcgttaagagtcatcaccactccctaatctcaagtacccagggacacaaacactgcggaaggccgcagggtcctctgcctaggaaaaccagagacctttgttcacttgtttgtatgctgaccttccctccactgttgtcctgtgaccctgccaaatccccctctgtgagaaacacccaagaatgatcaatgaaaaaaaaaaaaaaatagtggcctgttgggaaatctacaagagactgaggaagcaagtccagtgtctttattctttatcagaggaggtatcaagtccaaagggagggaacctggagtgggagagtagaccttgtggtgtggcccaggggcactaggagctgtaacgtctcactcagtgtccttcagaactttctctgcctccacttccggggttgctggaaacatgtctgcccaaggtcatagcacagtcagagaaaggctggcacatctgggccagccacaagcaccaaaaataaaaagggaagtgggatgtagaggaagaaagttaagctggaaacatttttttcataaaaatgctaatgctgtgaggccacccaggacactaatagaaggagatggaggtgaaataaagaaacgagtttcagctgtttttaggaaagaaatactaaagagaaataattattagatctaaagatgcaataaccagaaagccccctcttgtgggaagagaaggcagccttttctgaagaattgaagtggtcaagagaggatattcagtgtaattctgggagagaaaggaggaacatgaggattcagagatgtgacataagagtcttagagaacttcaaagtgaaaaagcagaagtgagaactgactcggggaaaggaattgataaataagcacgcttaaacaggtgtggtcccaaggagtccatggaaggccagcttactttaaaaaaaaaaaaaaattttgtagagatgaggtctcactatgttgcccaagctagtcttcaactcctggcctcaagtaatcctctctcctcggcctcccagcttacttttataaatacagtgcaatgaataataaaatatagaaatgtttggtatatgtagcacaggaattcagaaaacaaagccccggactttgagaccagtctgggcaatacagtgagatctgtctctataaaaaaattttaaaaattagctggatatggtggtgtatgcctgtagtcccagctgcttgggaggctgatgtgggaggatcacttgagccaaggaggttgaggctgcagtgagccaagatcacaccactgcactccagcctgagtcacagagtgagaccctgtctcaaaaaagaaaaaaaagcctgaatagtgcatattaacatgctttgaaaaatcgaaagtattataaaaattgaagatgttgttattacacaagttatgcactgttcttgggtgagtgactagcagtctggcagcagcacttctaacatattttcctagagagttctttttttgtttgttcttttttacagttctgaagtaaaaccatggtttttgtttcagataatattttataaaaatggtgtcaatcaaggtgtggcttacaaagatatttttgagggggtttacttcccagccatctcactgtacaagagctgcacggtacgtacatgtttccatcccatgagcaaaacttgagggaagcagatgaatgggttgtgatgacaaagttactgagtgctggaacgaaatccaagcagcctcagagtggcatgcgcatgtgttgttaccattactgtttagtccagaaacagtttgggcatcttagggagtatttgctggatagaaaaaggtcctgcagtttgtgtgcgccatacttttcccttgagcacgtggtgtggtgttaccgttcagtaggaaggatataaatacacatacacaaatcctcctgggatgtcatgataacccaccattattagtcattgttgcttacaatgatttttttttttttttttttttttttttgagacagtgtctcactctgttgcataggctcaccatagccttgacctcctgggcacaagtgatcctcccacctcagcctcctgagtaggtggggtgtgctaattttttggtttttgtttttgtagaggcaggatctcactacattgccctggctggtctcaaagtcatgggctcaagcagttctcccagctcagcctcccaaagtgctgggattacagagaggcatgaggtaccacatctggcaagttttttttttttttttaaatatgatccaaacatgaagaagggtactatcattagggcctgttggttttaaaaatatataggtagataggtagatagatacagatatatagaaaagttggggctgggtgcactggctcacgcctgtaatcccagcactttgggaggccaaggtgggtggatcacttgaggtcaggggttcgagaccagcctggccaacatggcgaaaccccgtctctactgaagatacaaaaattagctgggcttggtggcacatgcctgtaattccagctactcaggaggctgaggcaggagaatcacttgaacccaggaggcggaggttgcaatgagctgaggtcgtgccactactccagcctgggtgacaaaacgagactctgtgtcaaaaaaaaaaaaaggaaagaaaagaaaagaaaacttaggccagtcgcggtggctcatgcctgtaatcccagcactttgggagggtgactcaggcagaccatttgaggtcaggagttcaagaccagcctggccaatgtggtgagacctcgttgctactaaaaatataaaaattagccagatgtgatggccacgcgcctataatcccagctgtgggggaggctgacgcaggagaatcacttgaacccgggagatggaggctgcagtgagccaagattacaccactgccctccagcctgggcaatagagtgagactccgtctcaaaaaaaaaaaaagggcgggggtggcgctgggcacagtggctcacgcctgtaatcccagcactttggtgggaggccgaggtgggcagatcacgaggtcaagagatcgagaccatcctggccaacgtggtgaaaccccatctctactaaaaatacaaaaattagccgggcatcggccgggtgtggcggctcacacctgtaatcccagcactttgggaggccgaggcgggccgatcatgaggtcaggagatcgagaccatcctggctaacacggtgaaacctcatctctctaaaaatacaaaaaaaaaaaaaaaaagaaaaaaaaaagctgggcctggtggcgggagcctgtattctcagctactcaggaggccgaggcaggagaatggcgtgaacccaggaagtggagcttgcagtgagccgagattgtgccactgcactccaacctgggcaacagagcgagactctgtctcaaaaagaaataaaaaattagccaggcttggtggcacgcgcctgtcgtcccagctactcaggaggctgaggcaggagaattgcttgaacctgggaggtggaggttgcagtgagccaagatcatgccactgcactccagcctggtgacagagcaagactccgtctcaaaaaagaaagaaaaagttaatgcatgaagatttccatgtacttttagtctgtcagtaggcaccattgaagcaggtaaaaaaaaaaaaggaaatctttaaacagtgtaaaccaaaactatctgagacagatctcaatcaatttagaagtttattttgccaaagttaaggacctgcctgtaagaaaaaaacagaatcacagaaacagtctgtggtctgtgcctttctccaaggatgaatttgagggcttaaaagttttaaaaagaaaaagggctggacggagtggctcacggcagtaatcccaacactttgggaggccaatataagagaatcagttgagcccaggacctcgagaccagcctgggcaacatagcaaaaccccctttctacaaaaaaatacaaaaaattagccaggcgtggtggtacatgcctgcagtcccagctacttgggaagctgaggtgggaggatcccctgagcccaggaggtcaagggtgcagtgagccgtgatcgcattgttgcgctgcagcctggacaacagagtcagagcctgtctcaaaaaaaataaaaagtaaaataaaggggaaatgcgggctggaggggaaagtaggagggtatggtcatccacatgttgcaagagaaaaggagcagataggggaaagtcaattatgtattcatctcatgcccggtaaatcggcacttcacataaggtaaggtgaacataaagtagctgcctgtggggatatttaacgttttatctgtaggtgtctgcttagcaacaaaaggaaaggcagtttcttgcatgactcagctttcagcttaattttttccttttgacagagcaaattgggatcctgaatttttatttttctttgacaacagaaatcaacacagatctcttttagttacctaattcttgatggacatcaggatgttgaccacttttagtaatatttaatatatatcttatttgttccatttatcccccgagtattgtagccacatttaaagtgaaaatttcctgtgtcaaattaacttttccaatattttttgtccattttttccatgtctgcttgaattgaattcgctccaggtttccattaactttggaccatgcttcaagtatcctccgaaggatctcacttaccgccctgtgagtaacattacaaatggctgcatgtgtcctcagcatctccgtggctgctgtagtcaccgtgttctgtttctcattcctcctgcagatgagtgacatgggctggggcgccgtggtagagcacaccctggctgacgtcttgtatcacgtggagacagaagtggatgggaggcgcagtcccccatgggaaccctgaccaggtccctcttttctgtcaaggactttctgggaataatactgggggttttgtttttgtttttgaactgtctcaaatgttctcccaaagatgctaaaaacacagcctctccttttagcaagttaaaaggctgggtaggactgcgggagactgcctgcctttcaccattttctccccacttccagtgactgctcttattttgtgtaccataagccaacaaccgctgactccaggattgcataagccccctgtgaaatcggtgctgtactgcataccctgccagctgtgacttgttatcctactatattttctaaggagtgaataatattgtccgagtaactaacttatttaaaagacatttccttctgtgggcattgactgtatcccacctgttttccaaggaaatggtaacctgtttctgagaacacctgaaatcaatggctatacattccaaaccaatctaaacgctatttccttttggtgtgggtttggttttgttcattttgaaatacacttttgaacactgagatccgtaaaactactagatctctggaagtgtaattgtgaaagaaacttgcttgcagctttaacaaaatgagaaacttcccaaataaaacttgttttgaagtttatgtgacactttgcttcccttcagattgggtgcctcttggtgacagtgttcagaaatgtaagcagcacgaggaagggagctggcactgggaggaagagccgggtttctgagttgtgttttggctgctttcctattgctcccattcttgccaatcagccaccccctttcctgtgaaaatctgccaccttgaggagaggaacaagagtttaaaagggctaatgatctccctcccggtcttcccttggaacatggatgttgatatatgtgcgggtggtttcctgtcttgcttatcttcctttgccctgagctgatggctaaagggcagttttcggactattaaagactgaaatgtaa

SEQ ID NO: 5332 - DNA, 142 bp, Homo sapiens
ctgtaatcccaggtactcaggaggctgaggcaggagaattgcttgaacccgggaggcggaggttgcagtgagctgagatcgtgccactgcactccaggctgggcgacagagcaagactctgtctcaaaaaaaaaaaaaaaaa

SEQ ID NO: 5333 - DNA, 688 bp, Homo sapiens
tgaggattggcgaggggtgcgccgttcttgtgtaaagcgggagaagagtgtattatcgttaggcaacattttaggatataggataaacactggtgtcctgaaaacgttcctggccgcaacactctcagaggtttgcattctcgagtttggagaccatggctctgaaagactcaactcactccactgatgccagccaccagctactgttgatgacttcccaagttcgtactttcagtccacacctcttcctttcgctgggcaccaaacttgtctacattccgagtgccccggcacaccccggggcttcgctttccgcctctcacagtaggaagcggcgagccgcttctagtgcccacgccgctcctcggctgcccggcctgggttttccaccctcgcccctggaatcggcctccctagattcccttccctcttaaaatcatttggaaacgggctccaaggggcgaccctgcgcagaaaaccaaattccatccggggcgggcagggagtgctagactccaaggaagacgtttcccacattcggtggtgaggagtgtttggcggcacggcacggccagcgctctcaaggaccctcttctgcgcagaatatccagtcgtagccacgaaaatacgccgcgtcagtccctgactcgaaaggaagtcctccagagagccgcactaaccatctagc

SEQ ID NO: 5334 - DNA, 452 bp, Homo sapiens
ggaaagaaaagaacagaaaaaagctaatagaggaaggtaaatctctaaatgagttaaataaggcttaaataaagtttgcatggtatattctctaaaagttgattggcgtggaggaggctgtatgtgtttgtgtgtgtatgcacatgggcatgtctatgtgtaaggtcagaagggggagcctgaattatctactgcttttttggttaactagtcctatttttaaaactttgtctaactcccaaaacttattaatgcgacatgtagtactgaaattagaagattattgttaaactcaggacagctctgtggagattcacaaagtaatttcatgaaaacttatgaggaagttgttcagtactgtcactaattaacgcgcacaaaaaaaaaacttgttgtgagtaattatgggtgatttcgctgcaaaacaaattagtatacgaattattattttt

SEQ ID NO: 5335 - DNA, 452 bp, Homo sapiens; identical to SEQ ID NO: 5334

SEQ ID NO: 5336 - DNA, 471 bp, Homo sapiens
attttatgaaaactttagtataacacactacttagtttggacttgaaatcaacttattatgatgcttaaaaaaatccatgttctaaatcataattgcatgacagtttagatcttattactatttagttgtagcctaacaaatactgtattcctctgttttctcaaaaaaaaaagttcctagtttatgaaatagtattcagataaagccttatgctgcccaccagcccactaaatgtattaaatacctgtctctatgtagcttatgtaaaaactcaatgttgactgtcccatgtctgctgcatttaaaagctcattgtgattctatcatcttgctatgccaatgccttatgttatggtgtcgtgtatataggccatggtacaaaagtgactgtcaactgcttactcaacatctagtcagaaaaggtctgaggcagtgcaataacgcttttagtcaaactggctcactgttgg

SEQ ID NO: 5337 - DNA, 623 bp, Homo sapiens
ggttttcatactagtctatgaatgctctgaatgctgcagggaaaaagaagcacaatcagtatttcattatttatgaattctcaattgaattatcctatcctgtccacacacataatagcattagcatttcttcttataccatgttgaaatacttttaatacaaactctcaatagaagcttaaacataagtggttaagtcttgttgtctagtctcattcacctgcctcaacatgctttctttcattctatttgcatacaaaatgttcttatttcagttttgtagacaggatatgagttagcatactcgtgtttgttcagctgtccatcctgcatcgttactacaatgcctttttctgccatttaatggtgtttgtatcaatgttcccatatctgctgcattttaactccataaaaaggaaatgtgatttcgtattaatagttttgttgatcaactcaatatttctgcaccaatcagcatacctatatgcatgtagtagtctgtacaattgttcaacatcaaaatacttgtttactttatgtcaaaatgtctataaaattgctggcattgttctccatttcagtctggtagaataagcgagatagaaaataaatgtgtaaatgaa

SEQ ID NO: 5338 - DNA, 471 bp, Homo sapiens
attttatgaaaactttagtataacacactacttagttggacttggggatcactttattatgatgcttaaaaaaatccatgttctaaatcataattgcatgacagtttagatcttattactatttagttgtagcctaacaaatactgtattcctctgttttctcaaaaaaaaaagttcctagtttatgaaatagtattcagataaagccttatgctgcccaccagcccactaaatgtattaaatacctgtctctatgtagcttatgtaaaaactcaatgttgactgtcccatgtctgctgcatttaaaagctcattgtgattctatcatcttgctatgccaatgccttatgttatggtgtcgtgtatataggccatggtacaaaagtgactgtcaactgcttactcaacatctagtcagaaaaggtctgaggcactgcaataacgcttttagtcaaactggctcactgttgg

SEQ ID NO: 5339 - DNA, 623 bp, Homo sapiens
ggttttcatactagtctatgaatgctctgaatgctgcagggaaaaagaagcacaatcagtatttcattatttatgaattctcaattgaattatcctatcctgtccacacacataatagcattagcatttcttcttataccatgttgaaatacttttaatacaaactctcaatagaagcttaaacataagtggttaagtcttgttgtctagtctcattcacctgcctcaacatgctttctttcattctatttgcatacaaaatgttcttatttcagttttgtagacaggatatgagttagcatactcgtgtttgttcagctgtccatcctgcatcgttactacaatgcctttttctgccatttaatggtgtttgtatcaatgttcccatatctgctgcattttaactccataaaaaggaaatgtgatttcgtattaatagttttgttgatcaactcaatatttttgcaccaatcagcatacctatatgcatgtagtagtctgtacaattgttcaacatcaaaatacttgtttactttatgtcaaaatgtctataaaattgctggcattgttctccatttcagtctggtagaataagcgagatagaaaataaatgtgtaaatgaa

SEQ ID NO: 5340 - DNA, 1385 bp, Homo sapiens
agtagaatattaaaataaatgcagaatgcgttggctccgcttctggtgtgtgttctcttcatgttctcaacttggccttggacttccaaagaggtggattagtgtctccacaaagatccagcagataatcactgtttctccctttaatccttttagagacaaagtaagaataatatacaatggtaccttggccctccaggggttatttacctggtacctcagttattactaacccagctgagaagcaggaaggaaggagatgggcctctgaacagccaaaacagatgtctaaagttcaagctcacctggatcatttattcttaatttagacaacaaaatgaggtttttccagctttggcacgttagtgaggatgctatggcaggttccttgagagcagccagaagtgatagcctggtttgagctgaggggtctgtggaatactgatactcaaacacaatagctcaagaagccggatggtctgggcccacactcggttttcacagtgagtaactgctgttcgtaatgacagtgctgcattattagagagaaattaattcattcttcatataatcttgcaaaggctcttagagtatgatatcatttaggaggtattaccaccagatatgattaaactccctcagtttttctgctaagttttgttttcatatcagtgccagaatttaacagtggtctctatcctacgagggaaagatagagtagctgcctttagttagaaatatacataaccaaaagtgacagacattaggaattgttcaaaaaggatcttaacctggaacagtggaatgatttcctacaagtgcattatttgccttttgagtaaaataaggtccactatcatccatctttgcggcctgatgagttttagaattcagagcttttcagattttttgaaaggaaatatgtatgtatacaaaaccacacatcacataaaagccctggcagggtctaaggtaacacactatgataaagcattaatatttctgcagtgaaatgtacgaagaactaattaggacaaactctgtagtttatttaaataataaaccagtagactgggtgcggtggctcacgcctgtaatcccagcactttgggaggccaaggttggcagatcacgaggtcaagtgattgagaccattttggctgatacagtgaaaccctgtctctactaaaaaaaagaaagaaagaaaaatacaaaaaattagctgggcgtggtggcgggcacctgtagtcccagctactcgggaggctgaggcaggagaatggcgtgaacccgggaggcggagcttgcagtgagccgagatcatgccactgcacttcaacctgggcgacagagcaagactccgtctcaaaaaaaaaaaaaaaatt

SEQ ID NO: 5341 - DNA, 1385 bp, Homo sapiens
agtagaatattaaaataaatgcagaatgcgttggctccgcttctggtgtgtgttctcttcatgttctcaacttggccttggacttccaaagaggtggattagtgtctccacaaagatccagcagataatcactgtttctccctttaatccttttagagacaaagtaagaataatatacaatggtaccttggccctccaggggttatttacctggtacctcagttattactaacccagctgagaagcaggaaggaaggagatgggcctctgaacagccaaaacagatgtctaaagttcaagctcacctggatcatttattcttaatttagacaacaaaatgaggtttttccagctttggcacgttagtgaggatgctatggcaggttccttgagagcagccagaagtgatagcctggtttgagctgaggggtctgtggaatactgatactcaaacacaatagctcaagaagccggatggtctgggcccacacttggttttcacagtgagtaactgctgttcgtaatgacagtgctgcattattagagagaaattaattcattcttcatataatcttgcaaaggctcttagagtatgatatcatttaggaggtattaccaccagatatgattaaactccctcagtttttctgctaagttttgttttcatatcagtgccagaatttaacagtggtctctatcctacgagggaaagatagagtagctgcctttagttagaaatatacataaccaaaagtgacagacattaggaattgttcaaaaaggatcttaacctggaacagtggaatgatttcctacaagtgcattatttgccttttgagtaaaataaggtccactatcatccatctttgcggcctgatgagttttagaattcagagcttttcagattttttgaaaggaaatatgtatgtatacaaaaccacacatcacataaaagccctggcagggtctaaggtaacacactatgataaagcattaatatttctgcagtgaaatgtacgaagaactaattaggacaaactctgtagtttatttaaataataaaccagtagactgggtgcggtggctcacgcctgtaatcccagcactttgggaggccaaggttggcagatcacgaggtcaagtgattgagaccattttggctgatacagtgaaaccctgtctctactaaaaaaaaaaaagaaagaaaaatacaaaaaattagctgggcgtggtggcgggcacctgtagtcccagctactcgggaggctgaggcaggagaatggcgtgaacccgggacgcggacgttgcagtgagccgagatcatgccactgcacttcaacctgggcgacagagcaagactccgtctcaaaaaaaaaaaaaaaaat

SEQ ID NO: 5342 - DNA, 1303 bp, Homo sapiens
ggtggggctagctggaacttagtttccaactgctggaatggattatttccttctggctagggctgatccaaatgctcttccatgggaacctgctgaattctgtcctgtgttgcttttggctgtgacagggcagcactgagttccaatgcaaagtttcacaattacttcactcttcctcctccaaacacacggactctctcagcaccacaaggtactgctggagaatggcggatgagtggtgtagacaactcaagaccatcttttctacgctcttcagtgcctctttccttggtaggatgttaaaactaagtactgtgatcactcacctgatttttggttcttatgaaggtgttttcttgtgtggatagttgttcaattttggtgttcctgcagtagagacaatcaatggagggttctgttcaactctcttgggccaccttctccaatcctgttctacttaatgtatcttggcaaactttccatatcagtacagagaaagcttcttcattctgactgctgcatagtatcccagtgcttgaaggtagcatgattaatttagccatccaattcataggcacaggttatttgggttgctttctattacttgtaattacaaacagtgctattctgttatatcttgaacatatatttttgtgcacattatagaaaatgtcaaagtgattttcatgtaggttgttccagtgaatgagagttcttattttgtcacatacttggcaaccctgagattatcaatacgatttaaatctgtctgccaaacagataggtttgtaaaaatgtactttattgttttaatgtgaatttctttgattataagtaacaattaagaatatttccaaatatttgtgaaccatttttctttttttgtgagctgccttttcttgtcctttgttcattttaaatcgggttgttttagcctcttttaaattgatttttaaaacttgttatatattaatgatatgatttaggtttgtgtccccactcaaatctcatgtcgaattgtaatccccaatgttggaggaggggtctggtgggaggtgattggatcataggggcagatttcccccttgctgttctcatgctagtgaatgagttctcacaagatttggttgtttaaaagtgtagcacctcccactttgctctcttcctccttctctggccatgtaagatgtgcctgcttcccctttgccttctgccatgattctaagtctcctgaggcctccccagccatgcttcctgtacagcctgtaaactgtgagccaattaaacctcttttatttataaa

SEQ ID NO: 5343 - DNA, 977 bp, Homo sapiens
ggcaccaccatgtatctgggaattgccgacaggatgcagaaggagatcaccgccctggcacccagctccatgaagatcaagatcatcatgcccccagagtgcaagtactcagtgtggattggtggctccatcctggcctcactgtccaccttccagcagatgtggattagcaagcaggagtatgatgagttgggcccctccgtcgtccaccacaaatgcttctaaatggactgtgaacagatgtgtagcatttgctgcatgggttaattcagaagtataaatttgcccttggcaaatgcatacacctcatgctaccctcacaaaactggaatagccttcacaaagaaattgtccttgaaggttgtgtctgatataagcactggattgtagaacttgttgctgattttgaccttgtattcaagttaactgttccccttggtatttgtttaataccctgtacatatctttgatttcaacccttagtacatacatgtggtttggtcacttcatggctgaggtaagaacatgcttgtggaagacaagtctgtggcttggtgagtctgtgtggccagcagtctctgatctgtgcaaggtattaatgtgtcagggccgagtgttctggaatttctctagaggctcgcatgggctcctgaaccaattgtttctgtcctgctggtctgtctgtcagggttggaaaagtccaagccataggacccagttttctttcttagctgatgtttcctgctagaacaccatggactgttacttgccttgagttggaagtagtttgcatttatacctgtaaatatatttatccttttaatttatgtaaggttttttttttgtatgcaattctggattctttaaagagatgacaatgaattttggttttctactgttatgtgagaacatcagtccccagcaacacgtcattgtgtaagtagaaataaaagcgctgctgttaaaaaaaaaagaga

SEQ ID NO: 5344 - DNA, 3894 bp, Homo sapiens
gccagatggtgcaggcagtgaggagagactcaggactgcaacctttcggctccttattcctgctcatcactcagaaaagggcagtactaacccctttcctaaccaagacatggcactccctaagagctcttgtctatagagtttggtccttagaggaaagcagataccttcagcgtgagaagggcttggttgacagttttggggtattatgggaagagtaggttggggtaaagcttgagtctaactcttgatccttacatggacctatgaggccctgccattcagtcaggcactgtccttgggtcctcaaattaactgctgagaacactccccactttccgaggacgctgatgggaaatgggctctgtccatgcagctggaaggatccagtgctggtgccactgtcagtggcaccatccttgccttgaatgatctttcttgcaggctcctgcagctgagtgtttcttgtaagatttttcagggggattgggcaagaagaagaggtgcaaattctgttcccttcctaccttgaagccttcccagaccaccacggtctctgcacaagggaggctcccattactgttctgttggcttctagacccaccatcccctctctttctgtggactctgcccgacttctggccacatgcaaccagcagagtaaactgctccaacacctcgggcatgtcctagggcttgccctcccaccagggccagcccaagattaggtcctcagcagcatcaaggtctgggagagccactggcccacatgtcaccattctattcctcagcctccaacaggactcttcattttggggagggaaagggaagatggggccatagcccctaccttgaaattgtacagtgtggaggggatgttagtgcctacctgtgacctttctgctccactgctcagcaagatgaggtaaggttgggtgtcagaggggacctccagcttctctgaagagccagcccttaaggcacttggagcaaaggtcattgagatcagctttatgtggagtaaggaggaggcctgggaaccgcttgtggcatcagttggggcgacaggtggatgagtgtgctctgatggagcttttacggcccacagccactgccaggagcctgagctcttccccatgcttgggacacgttccttggtccccacagcagaatggacattgaattttggtgcttttccctttggtagaaggtggaggtatctgaggagttgtttctgtcttgctacctctgtctactatatagagcaagagtcgggaatagggagatgtgtgagaatcactctcccatggatcagtgtgggccctgtccctcttccccactgtcaccaaccagcagcttggggaaaaggctctgtcgtggatttttgctgcctgcttcccgcttccactcttcttggcggtagatgttcatggtgatccactttgggcggtctgaaagtaggaggtgggggaagaggcaagcctgcacacacacttcctgtccacagggggttgcctgtggcattggagggtggagtctcagagtccagggactgggaggaaggtacttgatgggatggtcttgattctggaactttagactgaggtgttagaaaggggaattgttggctaggggagaagagcagtttaacgctccacttgctaagtcgtctgtatcagtgtcagaaggtcttgacctcccattcagatttaatttcctaactgccaggtgtggggctggggatagagggcccagaagggggcgcagtcactgacgtgaagggaccacatcccgcttcatgtcagtgactcctgccccttggtcttcagtgtttttctcttccccaggagggactttgatcatgcaggatagaattctcccatcgcacacctgggggcaagttttagatgagcttctttcctccatttcacctggtggtctgaggacacacagagggtgggggtgagcaggcagtgtgggtggggaggggctacctcccccagaccccttacaaactctgtacctctcggtgcgcggcagcctcttgctgtagttcttcttttctggatatgactgtcagtttcgtcatgagatttcttgctctcatttcgaactctttctttcttccactttctttgggggcgacccccgatccatgccaggtcttcctgtgaagaccgttccaacctcgtttccatttcttgaatgttgagtattacaacatcactgcgctagggtgcttcatggtgctgttctcgaagaggccagttgggctgaatctccttcctcccactggctcctgatatcttgctgtattttgtcttctttctgatttttccctaggggtttggggtgggtgacttaggggcggcttttgtgttctccctctctctctctttcttttctgtatgtatgtatggactggttaaagtgagtttgggcagctgactttatggtatgggttggctgacttttgttcaacattaaagacaaaccaacaaattgtacagctgcacacagaacacctttgagtgtgaacttgaatggcaactagaggcttactttttgaacttcaggtatgtaactcaaaagtaaataaaaccactattttttcagtaagcttttttttcttctaaaagatgacttagaaatcaaactataagaacatgaaatcggtgctgtaccaaagccttatatgaacatattctacactctgtataacctgtctgtgaggagctccctgctctatcaccctcttctcaaaagcctgggaatgccagcgcgtgccaagcctggggctgggtcttggggacctgtgggccaagggcaccctgggaagtaaaagatgacggtgaggatgggacacccttctgctgcctgagcagactgcaaggaaaccagatgtgtgtgtgtgcgcgcacctgcatatatatgtgtgcatacctgtgcgtgtgtgtgcgtgtgcgtgtgtgcacgcaagagagtgagagcgggagagagctcacaggtgcacagtgtcatggtgaatgtactaagtacgagcttgaagggaggcccaggttggctctgggagtggggcggtgtgggaatgaaggggggatgctctctcccctgttttctgcctccttcccttctccgtcagggaagggaggtgtattggaaacagctacactctcaatcaggtgctttttttccctcaaaatctccaaactcaaagcatttataaggggcccttccaatgggcaggcacccccagccaccaaatcacagacttccaagagtaggaggaactgtctcctcccgaacccttccttgctttcctggggaagagggttcttcctgcagggaccctgggcatcctgctgctgggcctgggcctatagactgccctgccccttcttcccaaacactgagaagaccccgctggagatgaccccaaagccacgcctgctctacggccctaagcaatagacgcctgccctggctgctgatgatggtgatccctttgtcctttgacttggcagtcaaaaatggagtgacaccccagactcagtcaggaagagaacctgcagcctgcctcagctcaggctaccacgccaggctccactcgctggtatttccaggcttgctaagtactaaccaactcatccccagtaacactgcatgttcatatcctgaattacaaatcaaaatgagcaaacacgtgcataagcaaatgagaaaaaagaaggcacacatcaaatgatgagatgtgcagccagtgcaggtaccccgggagtgttgcaagttaaactgatgaaaagacgtttagtatttaattgctcctcatgtaacattactctgcttcagaaatgttttgtattttgatataaataaacatttgctaaaaaagtt

SEQ ID NO: 5345 - DNA, 3402 bp, Homo sapiens
agaagaagaggtgcaaattctgttcccttcctaccttgaagccttcccagaccaccacggtctctgcacaagggaggctcccattactgttctgttggcttctagacccaccatcccctctctttctgtggactctgcccgacttctggccacatgcaaccagcagagtaaactgctccaacacctcgggcatgtcctagggcttgccctcccaccagggccagcccaagattaggtcctcagcagcatcaaggtctgggagagccactggcccacatgtcaccattctattcctcagcctccaacaggactcttcattttggggagggaaagggaagatggggccatagcccctaccttgaaattgtacagtgtggaggggatgttagtgcctacctgtgacctttctgctccactgctcagcaagatgaggtaaggttgggtgtcagaggggacctccagcttctctgaagagccagcccttaaggcacttggagcaaaggtcattgagatcagctttatgtggagtaaggaggaggcctgggaaccgcttgtggcatcagttggggcgacaggtggatgagtgtgctctgatggagcttttacggcccacagccactgccaggagcctgagctcttccccatgcttgggacacgttccttggtccccacagcagaatggacattgaattttggtgcttttccctttggtagaaggtggaggtatctgaggagttgtttctgtcttgctacctctgtctactatatagagcaagagtcgggaatagggagatgtgtgagaatcactctcccatggatcagtgtgggccctgtccctcttccccactgtcaccaaccagcagcttggggaaaaggctctgtcgtggatttttgctgcctgcttcccgcttccactcttcttggcggtagatgttcatggtgatccactttgggcggtctgaaagtaggaggtgggggaagaggcaagcctgcacacacacttcctgtccacagggggttgcctgtggcattggagggtggagtctcagagtccagggactgggaggaaggtacttgatgggatggtcttgattctggaactttagactgaggtgttagaaaggggaattgttggctaggggagaagagcagtttaacgctccacttgctaagtcgtctgtatcagtgtcagaaggtcttgacctcccattcagatttaatttcctaactgccaggtgtggggctggggatagagggcccagaagggggcgcagtcactgacgtgaagggaccacatcccgcttcatgtcagtgactcctgccccttggtcttcagtgtttttctcttccccaggagggactttgatcatgcaggatagaattctcccatcgcacacctgggggcaagttttagatgagcttctttcctccatttcacctggtggtctgaggacacacagagggtgggggtgagcaggcagtgtgggtggggaggggctacctcccccagaccccttacaaactctgtacctctcggtgcgcggcagcctcttgctgtagttcttcttttctggatatgactgtcagtttcgtcatgagatttcttgctctcatttcgaactctttctttcttccactttctttgggggcgacccccgatccatgccaggtcttcctgtgaagaccgttccaacctcgtttccatttcttgaatgttgagtattacaacatcactgcgctagggtgcttcatggtgctgttctcgaagaggccagttgggctgaatctccttcctcccactggctcctgatatcttgctgtattttgtcttctttctgatttttccctaggggtttggggtgggtgacttaggggcggcttttgtgttctccctctctctctctttcttttctgtatgtatgtatggactggttaaagtgagtttgggcagctgactttatggtatgggttggctgacttttgttcaacattaaagacaaaccaacaaattgtacagctgcacacagaacacctttgagtgtgaacttgaatggcaactagaggcttactttttgaacttcaggtatgtaactcaaaagtaaataaaaccactattttttcagtaagcttttttttcttctaaaagatgacttagaaatcaaactataagaacatgaaatcggtgctgtaccaaagccttatatgaacatattctacactctgtataacctgtctgtgaggagctccctgctctatcaccctcttctcaaaagcctgggaatgccagcgcgtgccaagcctggggctgggtcttggggacctgtgggccaagggcaccctgggaagtaaaagatgacggtgaggatgggacacccttctgctgcctgagcagactgcaaggaaaccagatgtgtgtgtgtgcgcgcacctgcatatatatgtgtgcatacctgtgcgtgtgtgtgcgtgtgcgtgtgtgcacgcaagagagtgagagcgggagagagctcacaggtgcacagtgtcatggtgaatgtactaagtacgagcttgaagggaggcccaggttggctctgggagtggggcggtgtgggaatgaaggggggatgctctctcccctgttttctgcctccttcccttctccgtcagggaagggaggtgtattggaaacagctacactctcaatcaggtgctttttttccctcaaaatctccaaactcaaagcatttataaggggcccttccaatgggcaggcacccccagccaccaaatcacagacttccaagagtaggaggaactgtctcctcccgaacccttccttgctttcctggggaagagggttcttcctgcagggaccctgggcatcctgctgctgggcctgggcctatagactgccctgccccttcttcccaaacactgagaagaccccgctggagatgaccccaaagccacgcctgctctacggccctaagcaatagacgcctgccctggctgctgatgatggtgatccctttgtcctttgacttggcagtcaaaaatggagtgacaccccagactcagtcaggaagagaacctgcagcctgcctcagctcaggctaccacgccaggctccagctcgctggtatttccaggcttgctaagtactaaccaactcatccccagtaacactgcatgttcatatcctgaattacaaatcaaaatgagcaaacacgtgcataagcaaatgagaaaaaagaaggcacacatcaaatgatgagatgtgcagccagtgcaggtaccccgggagtgttgcaagttaaactgatgaaaagacgtttagtatttaattgctcctcatgtaacattactctgcttcagaaatgttttgtattttgatataaataaacatttgctaaaaaagtt

SEQ ID NO: 5346 - DNA, 3894 bp, Homo sapiens; identical to SEQ ID NO: 5344

SEQ ID NO: 5347 - DNA, 3887 bp, Homo sapiens
gccagatggtgcaggcagtgaggagagactcaggactgcaacctttcggctccttattcctgctcatcactcagaaaagggcagtactaacccctttcctaaccaagacatggcactccctaagagctcttgtctatagagtttggtccttagaggaaagcagataccttcagcgtgagaagggcttggttgacagttttggggtattatgggaagagtaggttgggtaaagcttgagtctaactcttgatccttacatggacctatgaggccctgccattcagtcaggcactgtccttgggtcctcaaattaactgctgagaacactccccactttccgaggacgctgatgggaaatgggctctgtccatgcagctggaaggatccagtgctggtgccactgtcagtggcaccatccttgccttgaatgatctttcttgcaggctcctgcagctgagtgtttcttgtaagatttttcagggggattgggcaagaagaagaggtgcaaattctgttcccttcccaccttgaagccttcccagaccaccacggtctctgcacaagggaggctcccattactgttctgttggcttctagacccaccatcccctctctttctgtggactctgcccgacttctggccacatgcaaccagcagagtaaactgctccaacacctcgggcatgtcctagggcttgccctcccaccagggccagcccaagattaggtcctcagcagcatcaaggtctgggagagccactggcccacatgtcaccattctattcctcagcctccaacaggactcttcattttggggagggaaagggaagatggggccatagcccctaccttgaaattgtacagtgtggaggggatgttagtgcctacctgtgacctttctgctccactgctcagcaagatgaggtaaggttgggtgtcagaggggacctccagcttctctgaagagccagcccttaaggcacttggagcaaaggtcattgagatcagctttatgtggagtaaggaggaggcctgggaaccgcttgtggcatcagttggggcgacaggtggatgagtgtgctctgatggagcttttacggcccacagccactgccaggagcctgagctcttccccatgcttgggacacgttccttggtccccacagcagaatggacattgaattttggtgcttttccctttggtagaaggtggaggtatctgaggagttgtttctgtcttgctacctctgtctactatatagagcaagagtcgggaatagggagatgtgtgagaatcactctcccatggatcagtgtgggccctgtccctcttccccactgtcaccaaccagcagcttggggaaaaggctctgtcgtggatttttgctgcctgcttcccgcttccactcttcttggcggtagatgttcatggtgatccactttgggcggtctgaaagtaggaggtgggggaagaggcaagcctgcacacacacttcctgtccacagggggttgcctgtggcattggagggtggagtctcagagtccagggactgggaggaaggtacttgatgggatggtcttgattctggaactttagactgaggtgttagaaaggggaattgttggctaggggagaagagcagtttaacgctccacttgctaagtcgtctgtatcagtgtcagaaggtcttgacctcccattcagatttaatttcctaactgccaggtgtggggctggggatagagggcccagaagggggcgcagtcactgacgtgaagggaccacatcccgcttcatgtcagtgactcctgccccttggtcttcagtgtttttctcttccccaggagggactttgatcatgcaggatagaattctcccatcgcacacctgggggcaagttttagatgagcttctttcctccatttcacctggtggtctgaggacacacagagggtgggggtgagcaggcagtgtgggtggggaggggctacctcccccagaccccttacaaactctgtacctctcggtgcgcggcagcctcttgctgtagttcttcttttctggatatgactgtcagtttcgtcatgagatttcttgctctcatttcgaactctttctttcttccactttctttgggggcgacccccgatccatgccaggtcttcctgtgaagaccgttccaacctcgtttccatttcttgaatgttgagtattacaacatcactgcgctagggtgcttcatggtgctgttctcgaagaggccagttgggctgaatctccttcctcccactggctcctgatatcttgctgtattttgtcttctttctgatttttccctaggggtttggggtgggtgacttaggggcggcttttgtgttctccctctctctctctttcttttctgtatgtatgtatggactggttaaagtgagtttgggcagctgactttatggtatgggttggctgacttttgttcaacattaaagacaaaccaacaaattgtacagctgcacacagaacacctttgagtgtgaacttgaatggcaactagaggcttactttttgaacttcaggtatgtaactcaaaagtaaataaaaacactattttttcagtaagcttttttttcttctaaaagatgacttagaaatcaaactataagaacatgaaatcggtgctgtaccaaagccttatatgaacatattctacactctgtataacctgtctgtgaggagctccctgctctatcaccctcttctcaaaagcctgggaatgccagcgcgtgccaagcctggggctgggtcttggggacctgtgggccaagggcaccctgggaagtaaaagatgacggtgaggatgggacacccttctgctgcctgagcagactgcaaggaaaccagatgtgtgtgtgtgcgcgcacctgcatatatatgtgtgcatacctgtgtgtgcgtgtgcgtgtgtgcacgcaagagagtgagagcgggagagagctcacaggtgcacagtgtcatggtgaatgtactaagtacgagcttgaagggaggcccaggttggctctgggagtggggcggtgtgggaatgaaggggggatgctctctcccctgttttctgcctccttcccttctccgtcagggaagggaggtgtattggaaacagctacactctcaatcaggtgctttttttccctcaaaatctccaaactcaaagcatttataaggggcccttccaatgggcaggcacccccagccaccaaatcacagacttccaagagtaggaggaactgtctcctcccgaacccttccttgctttcctggggaagagggttcttcctgcagggaccctgggcatcctgctgctgggcctgggcctatagactgccctgccccttcttcccaaacactgagaagaccccgctggagatgaccccaaagccacgcctgctctacggccctaagcaatagacgcctgccctggctgctgatgatggtgatccctttgtcctttgacttggcagtcaaaaatggagtgacaccccagactcagtcaggaagagaacctgcagcctgcctcagctcaggctaccacgccaggctccactcgctggtatttccaggcttgctaagtactaaccaactcatccccagtaacactgcatgttcatatcctgaattacaaatcaaaatgagcaaacacgtgcataagcaaatgagaaaaaagaaggcacacatcaaatgatgagatgtgcagccagtgcaggtaccccgggagtgttgcaagttaaactgatgaaaagacgtttagtatttaattgctcctcatgtaacattactctgcttcagaaatgttttgtattttgatataaataaacatttgctaaaaaagtt

SEQ ID NO: 5348 - DNA, 959 bp, Homo sapiens
agtctgggatactagctcatgccttgacgccacctccttccctgctcttcctttggtattctctctgttcagagttgcttgggtctttctgatggaaatgtgtatatatgaaaagtttgtaaaataacaaaacaaataacccacctgcaggaaggacaagtgagctgaaggttgtgtggagctgcaggatctgatagccctaaagaaccaggaccaatgtgtctcttgccacttgggagggatgttgacttgaacttctttgcagaggggcttaacagggcaaggctgaggagatgaaaactgtgactccatccccacgtggctgtggaaaggtaaccagttcctcagagaaaacctggcttcacagcattagaaagggggtggttgagactacctagggacctacggtgacacctgtcttggtttgtagcactgtagctcagacagctcagaccgctcatagagggcatggcaatgggagagtttgtgaggctggctgcctgggcttggtcttggagaacacatggcctgtttagtgttgctgcagattcttagagccagtgtgaatgtggtatgtagtataaatatgtcatctatgtttttttcagttatttttaattggaaataaagtgccattgcaaataggatgctccaatcctgggacactgagtggaggatgaggagggagagatgaactgtgggccggcctgggagagggggtcttagtggaaccttccttctggcctccagccggggacttacaaaactgaacaatgtattggcagaactggacccacaatgggagattctggggagcaggagttcacttgtatctgagcaggaagcagtgtgccctgaagaatacctctctgagcaaattccagacctcacacatatgcaagggctctgccttgcagcctcagcaagcgtctcctggtgctagctccttcctgacttgc

SEQ ID NO: 5349 - DNA, 482 bp, Homo sapiens
gccagatggtgcaggcagtgaggagagactcaggactgcaacctttcggctccttattcctgctcatcactcagaaaagggcagtactaacccctttcctaaccaagacatggcactccctaagagctcttgtctatagaggttggtccttagaggaaagcagataccttcagcgtgagaagggcttggttgacagttttggggtattatgggaagagtaggttggggtaaagcttgagtctaactcttgatccttacatggacctatgaggccctgcccattcagtcaggcactgtccttgggtcctcaaattaactgctgagaacactccccaaaccctttccgaggacgctgatgggaaatgggctctgtccatgcagctggaaggatccagtgctggtgccactgtcagtggcaccatccttgccttgaatgatctttcttgcaggctcctgcagctgagtgtttcttgtaagatttt

SEQ ID NO: 5350 - DNA, 959 bp, Homo sapiens; identical to SEQ ID NO: 5348

SEQ ID NO: 5351 - DNA, 959 bp, Homo sapiens
agtctgggatactagctcatgccttgacgccacctccttctctgctcttcctttggtattctctctgttcagagttgcttgggtctttctgatggaaatgtgtatatatgaaaagtttgtaaaataacaaaacaaataacccacctgcaggaaggacaagtgagctgaaggttgtgtggagctgcaggatctgatagccctaaagaaccaggaccaatgtgtctcttgccacttgggagggatgttgacttgaacttctttgcagaggggcttaacagggcaaggctgaggagatgaaaactgtgactccatccccacgtggctgtggaaaggtaaccagttcctcagagaaaacctggcttcacagcattagaaagggggtggttgagactacctagggacctacggtgacacctgtcttggtttgtagcactgtagctcagacagctcagaccgctcatagagggcatggcaatgggagagtttgtgaggctggctgcctgggcttggtcttggagaacacatggcctgtttagtgttgctgcagattcttagagccagtgtgaatgtggtatgtagtataaatatgtcatctatgtttttttcagttatttttaattggaaataaagtgccattgcaaataggatgctccaatcctgggacactgagtggaggatgaggagggagagatgaactgtgggccggcctgggagagggggtcttagtggaaccttccttctggcctccagccggggacttacaaaactgaacaatgtattggcagaactggacccacaatgggagattctggggagcaggagttcacttgtatctgagcaggaagcagtgtgccctgaagaatacctctctgagcaaattccagacctcacacatatgcaagggctctgccttgcagcctcagcaagcgtctcctggtgctagctccttcctgacttgc

SEQ ID NO: 5352 - DNA, 13789 bp, Homo sapiens
tcaagaggaccatgaaaagtactttattgaggtcactgggagtacaagatatctgtccccagccctagcctcagcctctcctcagtacagtctcatgggtggaaaagaccaggcttccggactgctctgggctactacccaggagaggctgggcagtggggaaggggggctggggctccagtccaggacagaggttcggggcaacaggggtgatgaaggctgaggcaggggctgagggaggccaaccccccagggccgaggagggggtggcgtggctaccagccagatgctttttaacaagtcaaacgctgttgggggaccccaggctgttccagatggcgaagacagtgagggaaagtatggtggccagggacctcttggcggtgccagactccccctgtgcgcagtgggcatgctggaggtgtagggcatggggaaggtgaactcctttgtcccttgttgcttcctttgcctctcctgctctgggacttgatcagggctattaatccagaagggtgtcatctttctctcagagaccccaggcttggcccctggcacagaggaaagaagcatagaggctagctgagctagagccgacaaaggaaaggggagtacaggggcaggagggacgctcacctggcaagggtggctggcagccccgaagcaccagggcaaggtcaggcacacaaccatgacaggcctgcaaggtgtgcacgatggcatccctggcatcctgaatcaggttcctccgggggaaggcctgtggcaaactcagctgacactgcagctctgccagcagctgccccacgccagacaactctggggaactgggtgggcctgggcccgaacctccaggcacctggttctctttgtccctggaccgtggggctggttcctgggccctgcctgggcttggggagggcttggcggggagtgtggggctgcctggcaccagggtcccactgctaagcagccttgcaacatctagggatttcacctcgtggttgaagagaccccggtgctcccggctcagccggccctgggttatgaccacgagcttggaggcagtagggaccacaggtggatcccgaatggccacaggaggatcgtggtgggctaatggccggcggctgcccaccagggccttgttacgttcccgcctagtcttccgacgacggacacgaccaggtttctcaggctgctgaaaaggctgggagactggtccctgggtatccatggtgtcctggaatataaagatagggtggccatcagcatgcagataagtcaaggggagtagcaaagtgaatagggagggctgggcgcggtggcttatgcctgtaataccaacactggggtaggccaaggcaggccgatcacttaggccaggtcactttagaccagcctagccaacatggcaaaatgctgtctttactgaaaatacaaaaattggccagccgcagtggcccatacctataatcctagtactttgggaggccaaggcaggcagattacctgaggtcaggagttcgagaccagcctggccaacatagtgaaaccccatctctactaaaaatacaaaaattagccagacgtggtggcatgcacctgtaattccagctactcaagaggctgaggcaggagaatcacttgaacccaggaggtggaggttgcggtgagctgagatcatgccattgcactccagcctgggcaacagagcaagactccatctcaaaaaaaaaaaaaattagctgggcatggtggtgcacgcctgtaatcccagctactcaggaggctgaggcaggagaattgcttgaacccagaaggcagaagttgcagtgagtcacgattgtgccactgcacttcagtctgggcaatagagtgagactccatctcaaaaacaaaacaaaacaaaacaagtgaatagggagatgttttggggtgtggtgggaatactatttagaatgaccagatgaggccaggcatggtggctcaaatctgtaatcctagcactttgggaggctgaggcgggagtatcgcttgaggctaggaattcaagaccaacctgagcagcaaagtgagaccctcatctctacaaaaaataaaaataaaaattagctggatgatgccaggtgtggtgactcatgcctgtaatcccagcactttgggaggccaaggcgagcagatcacttgaggccaggagttcgagaccagcctggccaacatgccgaaatcctgtctctactaaaaatacaaaaattagctgtatgtgatggtgcgcgcctgtaatcccagctactctggaggctgaggcaggagaatcgcttgaacccaggagacggaggttgcagtaagccgagattgcgccactgcgcttcaacctgagtgacagagtgagactctatctcaaaaaaaaaaaaaaaaaaaaaaaaaagctggattcggtggcccacacctgtagtcccagctgctagggaagctgaggtaggaggatcacttgagcccaggagttggaggttactctgagctatgattgcatcactgtgccccagcctgggcaagagagtgagaccttgtctcttaaaagagagagagaagatgagagaaaataagtgagcagagagagattggaaaaggtttggtcagataaggaatcacaggggtaagatgaagtcgaaggagtcacagctaatgggaagataagccaggaaacagagagaggctattaggaacagggacatggggaaacagttaaaagatggagggtgagccgggcgcggtgactcacacctgtaatcccagcactttgggaggccgaggcgggcggatcaccaggtcaggagatggagaccatcctggctaacacggtgaaaccccatctctactaaaaataccaaaaattagccgggcgcggtggcgggcgcctgtagtcccagctactcgggaggctgaggcaggagaatggcgtgaacccaggaggcggagcttgcagtgggccgagatcgcgccactgcactccagcctggatgaccgagcgagactccatctcaaaaaaaaaaaaaaaaaaaaaaaaaaaagatggagggtgggggccaggcgcagtggctcacgcctgtagtcccagcactttgggaggccgaggtgggtagatcatttgaggtcaggagttcgagaccagcctgggcaacatgtgaaacctcgcctctactaaaaatacaaaaattagccggcgtggtggtgaatgactgtaatctcacctactcaaagaggctgaggcaggagaatcgcttgaaatcgggaggcggaggttgcagtgagccgagatcgcgccactgcactccagcctgggggacacaacgagactctgtctcaacaacaacaacaacaacaacaacaacaaaagatggagggtggtgaaggggtcatgagattggagggatttgggggaccagaaagtgattctggacggagaaatccaggggtagacgaggtacaggggaatgcagaaagtggaaagagatagtagagaaagagaagcaggagagggagagcagcaagagaagtctggaaagcctgagaaaacctcaagagaacaggaagggagacagaggcgcgatcagggacagggcctgatcacaaaggaagggcctagggtaggagaggaagcatggtggccagccgcggtagggcagggtgggcagagtgaagggagtggggtacggttggcaggagcagggtgtgggaagggcacctctctcgccccaacgaaccccggcccttcccacttcacgtagctgtggggcgcaatggcttcttttccgcggtgaccccagctctcgaagtcacctggcgctgttccgggcctcgggctcccccacacgcatgcgcgtgccctttccatgccctttggcttcgtggctctgagaggacggaaacctagcggcgcgtgccagggaagcgccggttatagcccctcccctcccagcctcaatttcagaaatctccctttcttggtctcagcacctcccagccctcaattggctgtgaggttcactaggtccgcccccttcctgaatgctgattggttcagatagctatcagcggtctttcgagggctagttgagaccaggcgtgccaaagggaagaagggtcatggtagcccccatgcacagctgtcccccaagcagccacagacataatccctagaaaacttatacagttggccgggcgtggtggctcacgtctgtaatcccagcactttgggaggcagaggcaggaggctggcttgagcccaagagttcaagaccaccctggacaacatagggagaccctgactacaaaaaataaattagctttgggcgtggtggctcacgcctgtaatcccagcactttgggaggccgaggtgggcggatcacgaggtcaggagatcaagaccatcctggctaacacggtgaaaccccgtctctactaaaaatacaaaaaattagccgggcgtggtggcgggcgcctgtagtcctaactactcgggaggctgaggcaggagaatggcgtgaacccgggaggcggagcttgcagtgagccgagatgcatttcagcctgggcgacagagcgagactccgtctctaaataaataaataagctgggcgcagtggctcttgcctgtgggcccagctacttgggaggctgatgcaggaggatcacttaagcctaggaggtggaggcagcagtgagccatgatcacgcccgcctgagggagacggcaagaccctgtaaaagaacaaaaattaggccacatgcattggctcacgactgtatattcagcgactcagcaggctggggcaggagaattgcttgaacctgggaagtggaggatgcagtgagccgagatcacaccactgcattccagcctgggtgacagagaaagactccatctcaaaaaaaagttagtgtagtgttgtgattcatagctaggcttggtttaaatgcccaaaatggcacaactgggctgtgtgaccttggaaatgtttgtaactggtcagacttagttttctgacctgtaaaattgggttggtaataaaactaccttcctcatttggttgctagaaggataaactagaccaatatgtctaacttgaaatgggcctggtgaatgaagaatgcctggaagctttgtttctcactaagctttgcttcaggaactgctccaacttatcctctaagactttatttttaaaaatttttttctcggttgggtatggtggctcacgcctgtaatcccagcactttgggaggccaaggcaggtagatcacgaggtcaggagatcgagaccatcctggctaacacagtgaaacctcttctctattaaaaatacaaaaaattagccgggcgtggtggcacacgcctgtagtcccagctactcaggaggctgaggcaggagaatcgcttgaacctgggaggcagaggttgcagtgagccgagatcgcgccattgcagtccagcctaggcgacagagcgagactctatcaaaaaaaaaaaaaattctctcttatatcactgacttgaaggcataattaagacttttttcttttcttttcttttctttccttttctttttgagatggaatttaaatctgtcactgaggctggagtgcagtggcacagtctgaactcactgcaacctccacctcccgggttcaagcgattctcctgcctcagcctcccaggtagctgggactacaggcgcagaccaccttgcccagctaatctttgtattttttaatagagatggggttttgctatgttggtcagactggtcttgaactcctgacgccaagtgatctgcccacctcagcctcccaaagtgctgggattataggagtgagccaccgtgcctagctgattatgacttcttttttggagacagggactcactctgtcacccaacctggagtgcagtgacaccatcatgggccactgccacctcatctcccaggctcaagctatcctcctgcctcagcctcccaactaactgggactacaggcacttgccctttttttttttttttttttttttgagacggcgtctcgctctgtctcccaggctgaagtgcactggtgccatctcggctcactgcaagctctgcctcccaggttcacgctattctcctgcctcagcctcccaagtagctgggacaacaggcgcctgccaccacgccccgctaattttttgtatttttagtagagacggggtttcaccgtgttagccaggatggtctcgatcctgacctcgtgatctgcccacctcggcctcccaaagtgctgggattacaggcgtgagccaccgcgcccagcctttttttttttttttttttagacagggtctcactgtgttacccaggctggtctcaaacttctgggttcaagcgatcctcgcacctcagcctccccagtagctgggactacaggcatgcatcactgcacctggctccctcagactttatttgtttgtttatttttgtaattaagacagagtctcgctgtgtcacccaagctgggccactgttgcccaggctgggctgcagtggcgcgatctcagctcactgcaacctctgcctcccagactcaagcaattgtcctgcctcagccttcccaagtagctgggactacgggcgtgtgctgccatgcctagctaattttttttttttttttgtatatttagtagacacgtggtttcgccatgttggccaggctggttgacctcaagtgatccgaccatgtcagcctcccaaagtgctgggattacaggcatgagcctccatgctggcctccctcagactttaaaatcaagctattccacgatattccccaaacctaataagaaagtgattacctgtgtcttttctttctgcttgcccattcttcattatctttcagacccagctgagatactactcctaggaaacccatagtcctcagagtccttctcctcttcctccccagaggtccctgtctctccctcaaacacaactttgacacccctacacctctgtgtctggatctgtctccctaaacacattgggacaaggtcaggagctgacccactcatttactactcattcagcaagcacttgtggaataaccactgtgtgcccggcccagttccaggaaagtggattgaaaacataaacacaatgaataacactcatctctgtctcagtatcaatccacctcgaaggaatgaatacatgggaaggtcccacctggagtgaggctacaagaacatgaccaggacgtttagcagggagtgagccccccacctggtcccagagaagagggagatctgagaagacactgaggtctgagattaatttggggcagcgttgggggagaggcgcgaccctaggtggccttggctatggatgtaggtttcagagctcagacatacccagttggcctgtgggtttagagagagtgtagaggctgcagatctgcaagatgatctgccggagggacgccagactggacctgagccctggaggcgtctctaatttcctttctctttctgcaccttcttctaccctccaagcaggtcctatggtgtcttgaatgcaaagatatgtagtttatatgttatgccacgcgcgcgcacacacacacggtgttttgagtaggggtcctgtgatgtcttgaatgcaaagatatgtactttagatttcaacacacacacacacacacacacacacacacacacacacacacccacggtgttttgagtaggggaagcccacgagtagataggctcactaaagccctggcgcggccttagagtggctccttagaagggagcctcgaattttcacattttgtcatcttccttttctgtcccccacatcagtagaaaataggagcgtcccccccagccaggtgcattcgagccaccccttcaagggaatataagaatggactcgtccactcgctcccctccccccaccacgtgaatgggtcacccccccccccgcaacagtaggtggtcccttccgcacatttcactctgtacagcaaatggtttcttcccatttgctagacagagggctagattttccccgcccactctcgactcttcaggtagttcgcccctccccgtgaccggtgggtggtttctccctcctccccgcctcgggagctggatggtctcgcctctccctccccccaccccgtgccgggtgcgcggcctgggagtcagcggcccgagcgggaagcgccgggcgagcccactgtgcggccgtcgtgggggaagcgaaggttcctgattccacctacctcctaagtgaaggcttccgtccctggagaggaggcggcgccctgtatcggccttcgtcctccgcgggtgtgctagcgttgggacggtcctttgttgccgcgaggggtaggagtgggcgtggcggagccagctccgttcggaacactcccgggccgacccgactcgctcatcctgcaggagctgcggcgccaagatgagtggagaggagaacccagccagcaagcccacgccggtgcaggacgtacagggcgacgggcgctggatgtccctggtgagcgttcccacctgggatattgaggagtccgggggcgcggggggtggctcaggagaacggctggttcgtgccactctcactacctgattgggaaactgagggcagttgaggaggcgctgcctaagggagcagggcggggcgggccctggagcgtgcatgccattgactccctctcgcgcgctcccgcagcaccatcggttcgtggctgacagcaaagataaggaacccgaagtcgtcttcatcggggactccttggtccagctcatgcaccagtgcgaggtgagggcagtccctctccccctgccccatccagccctgtgtccatgctgacacatctggaccagaacccaggccaggtgaggtattatgagagtacccagattggcctcaggcagcccgaggctctgagaatcttggtgtaaggtgcaacattctattgagaaagaaatgtatgccttggttttatcagattggatttgtgtataatgtactaagacctaaaatgaggctttcctgccataggcttgcctaaagtgaggctctttcttgtttgctttaagtagtgcgcagccctgttgggtttacacaaagctatagtcactttacaggaagcgaagggcaactctaatggcactccacaaagaggactcaatcataataatatctttccacaaagcatgtccaactgtaatgggtttcatcaaaataagtttcaactgtaatgccattgattcaatgcatggctcaagcagactggattttcatgaagtgagtcttgcttctatggggcttggtttgttttgttggttggttggttggttggttggtttttgagacagggtcttgctctgtcacccaggctggcgtgcagtggtatgatctctgttcactgcaacctctgcctcctgggctcaagtgatcctcccaccttagtctccgagtagctgggactacaggtgcacatcaccatgcacctggctaatttttgtaatttttgtagagatggggttttgccctgttgcgcaggttggtcttgaactcctgggctcaagcagtccgcccacctcagcatgagcaacagagcctggggcttggtttaaagtgagagactctaggcagggtgtggtggcttacgcctgtaatcccagcactttgggaggccaaggcaggcggatgacctgaggccaggagttcgagaccaccctggccaacatggcgaaatcctgtctctactaaaaatacaaaaattagctgggcatggtggcacatgcctatagtcccagctacttggcaggctgaggcaggagaatcgccagaacctgggaagcagagattgcaatgagccgagatcgcactactgcactccagcctgggcaacaagagcaaaactccgtctcaaaaaataaataggctgggcaccatgggctcacgcctgtaatcccaccactttgggaggccgaggcaggtggatcacctgaggtcaggagttcgagaccagtctggcccacatggtgaaaccccatctctactaaaaatacaaaaaattagctggacgtggtggcgtacacctgtagtcccagctactcaggaggctgagacatgagaatcacttgaactagggaggcggaggttgcagtgagccgagatagtgccagtgcactccagcctgggtgacagagtgagactctgtctcaaaaataaaataactctgtctcaaaaatataaaataaaataaaataagtgagagactctaatagatttctataaagtgaggttcagccatgctggagtttgctccaggtaaaattttaagactgcttccatgaagtaaggttcttccataatggcatttggttaacacctggacagagggggatggtccatgcggacagtgcccttgtgcccctaccacttcttgcccacaccacttcttgcccacagatctggcgcgagctcttctctcctctgcatgcacttaactttggcattggtggtgacggcacacagcatgtactgtggcggctggagaatggggagctggaacacatccggcccaaggtgagcggggcttgggtggggctctaaaacatcttttggctgccccctcaccgctgcttcatgtctctttttccacagattgtggtggtctgggtgggcaccaacaaccacggacacacagcagagcaggtgactggtggcatcaaggccattgtgcaactggtgaatgagcgacagccccaggcccgggttgtggtgctggtgagaggctgggagagtgggaaaggaagaatggcagtggtctgggaccccctcagatatagccacagttggcacagttctaggcagcttgacatagagcagtggcttttaggcagaatctcacgttggagcttgctatacccttcagagtggctgtggttgagaatatgctccgagaccaattagccttttttgcccagggatggcttaagactttgggggtattgaaaaactaaaaaacgggccaggcacggtggctcacgcctgtaatcccagcactttgggagaccgaggcaggtggatcacgaggtcaggagatcaagaccatcctggctaacacggtgaaaccccatttctactaaaaatacaaaaaaaaattagccgggcgtggtggcgggcacctgtagtcccagctaacttggcaggctgaggcaggagaatggcatgaacctgggaggcggagcttgcagtaagctgatactgtgccactgcactccagcctgggcgacagagcgagactccgtctcaaaaaaaaaaaaattagttgggcatgggctgggcgcagtggctcatgcctgtaatcccagcactttgggaggccgaggcaagcagatcacctgaggtcgggagttcaagaccagcctgaccacacgtggagaaactccatctctactaaaaatacaaaattagctgggcgtggtggcacatgcctataatcccagctacttgggaggctaaggcaggagaatcgcttgaacccaggaggtggaggttggggtgagccaagattgcaccattgcactccagcctgggcaacaggagcgaaactctgtctcaaaaaaaaaaaaaagccgggtgcggtggctcacgcctgtaaacttgtaatcccagcactttgggaggctgaagagggtggatcacaaagtcaggagatcgagaccatcctggctaacaaggtgaaaccccgtttctactaaaaatacaaaaaattagccgggcgtggtggcaggcgtctgtagtcccagctacttgggaggctgaggcaggagaatggcatgaacccggggggcggagcttgcagtgagccgagattgtgccactgcactccagcctgggcaacagagcaagactccatctcaaaaaaaaaaagaattagctgggtatgatggtgcgcaaaacctgtaaccccagctacttgggaggctaaaggagaaggatcacttgagcccaggaattcaaggtaacagtgagctgtgatcatgctactgcactctcgcccgggtgacagagaccctgtctcaccagaaaacaaaagaaaaaccctcaaaaaaccttgaataggccaaaagttgtcaggcattcctggggtaaatctaggctccatcacttgtaggtagctaggatatttcctcttctgaaaacggattgatcccttggcatgagccatgatgttgatatcttttatttatttatttattttgggacagagtcttgctctgttgccaggccagagtgcagtgacgcaatctggcctcactgcaacctcctcctcctgggttcaagtgattctcctgcctcagccttcacagtagctgagactgcaggcgcgtgccaccacacctggctaatttttgtatttttagtagagatggcatttcaccatgttggccgggctggcctcaaactcctgacctcaagtgatccacccgtctcagcctcccaaagtgctgggattacaggcgtgagcaacctcccttggcctatttattttttgagacaggatctggctctgttgcccaggctggagtgcggtggcatgatctcagctcactgcaacttctgcttccagggctcaagtgattctcccacgtcagcctcccgagtagctgggactacaggcacacgccatcatgtcccactaatttttgtgtatttttgttagagatggggtttcaccatgttgcccaggttggtctcgaactcctgggctcaagcgacctatccagctctgcctcccatcatgctgggattacaggcgtgagccactgaacctagccaatgtcaacatttttctaagtgatacttggaaagaggctaggccgcgcatggtggctcacgcctgtaatcccagcactttgggaggccgaggcgggcggatcatgaagtcaggagatcgagaccatcctggctaacacggtgaaaccccgtctctaataaaaatacaaaaaattagccgggcatgatggtgggtgcccgtagtcccagctacttgggaggctgaggcaggagaatggcgtgaacctgggaggcggagcttgcagtgagtcgagatcgcgccactgcactccagtctgggcgacagagcaagactctgtctcaaaaaaaaaaaaaaaagaaaacgaaagagggtaaaacccagaagtctcttgctaaatgagggctaggatgtgatatttaggaactaccctcccaccctccccacttgcccatccctagtgttttctgcagctggaaacttcatggtggtgggtggaggacaggttggcacagagaacaagatactcaaatgcttgtttccttactacgcctcgtgttcctgctcagggcctgcttccgcgaggccaacatcccaacccacttcgggagaagaaccgacaggtgaacgagctggtacgggcggcactggctggccaccctcgggcccacttcctagatgccgaccctggctttgtgcactcagatggcaccatcagccatcatgacatgtatgattacctgcatctgagccgcctgggctacacacctgtttgccgggctctgcactccctgcttctgcgtctgctggcccaagaccagggccaaggtgctcccctgctggagcccgcaccctaagcatcctgctgccttcccacaacattaaactctccttcctcagtg

SEQ ID NO: 5353 - DNA, 3500 bp, Homo sapiens
cacacaggtgtgttaaacagctttaatctcgctcattgcggcttctcggcacagtaagaaatattgcacatgatcaacatgttttgttctggggaagggggcaagggcagggggaatcaccttcttagaaagtacaacccaagttgggagggcagagggggtgaggagaaaaccctccccgtgcctgtggcaaagtgcaggagcccccacccccaaactaacctgagtccagcccctctggggaaaaaaggggtgcatgaactccccctattccacaggcgcctccctgtggcccaaggcctgcaccaccctccagcttgcagccctcacaggagccattttgcataaagtgaaaagctctgaaggtcacacgctccaggttatgtacaggggcttggaggagggagactgcccctgcagcccctcagctgccccccagcaccgggagggagcttcgagggaagggggtatttacaagaggagcaggcctcattccgccccaaactggagaggacgaaatggctttacccgggaggagataaccttcctgcccccacatactgtccatgtcctgagggggtactataagtcctggcatcttctcaggggtccctcacctgcctgtggcagctgtggagggacctgggggtgggggggagggctggggagccccctcccagccaggctgtccaggccccgactctgggggtggaggcagtggcggggcagcctgggccgtgccagagtccgagctgggtgaggtggggtcagggccccctgcggggctgggagtgggggcaggggcagcagcggtgccagtggggggcggtacagggagaggagcctcagctccagggggctgctccgtgggagtggcagcctgcatgatcttctggcgcacctcacggatcttcaactgcagacaaaccttggagggaaagatgtctgcatagcgggcctggaaggcggctgtggcctgggctggagatagaaaaacggtggggagcacaggatgagatgtacagataagtcccacccgagtgaccccaagactccgagacaggctcacctgacgggaagaagccatggtcctgaaagagctgcatgaccagggcccggcgctggtccagggtgcgccgcagggaggagtatggcaccttgtcatactctagctccccaagcacgtcctcggcttctgtacctgtgcagggcacaggcagcatggcaaggctgcagcagcggcagggccttcctgccaccgtctgagtgcccacccaagccctcactgcattctatttcacaggggagtcagagaggggtcctgcccacagtcacagggcaacctaggggcctgccagactccagaacccaccactgacaggctgtgcttcctcccagcctggatggacccaccctacctctctcactctctaaccgccttccagagacccactcctcttgcaggtccccaggcccccaaagttctgcccaccacggcacctgtacggtcaaaggtgaagatgtccccctcgcacttggcactcttgggggtgttgggctccgagctgcagctggagcgtcttctcatcttgcgcttgggcgaggtggggtcctcgggtgctgaatccaggtctggccaaacagaagcagactcagtgcaggtggccccagtctgccctccacctaaggaccctgggtgcccaatgctcgcctacccgtggagttcttcctcttcttgcggtaagagcccaggatggcccggggtgaggtggccagagactgcagggtgggggagggcagcacctcctcaggccgaaactcaggcaactcagcaaagcgctcttcgaagtccacttctgacaggaccctgctggagggccggcagggtcacctcccccgcctcagcctgcagctgctcccactcccgccaccctaacacgctccaccaaggccccagcccatgctcacttgtccacagagtcaaaggtcttcttcaggggcgggggccgcaccttcaccttcttgccagtaccagccgcctccttgcgctccggggtgtccccggctgcccgcccactgctgctctcgctgctgccaccaggggctacagctggagctggggccgggctgggaggagtgggaggctccccacgattctccaggccctgcccagggacgcgccagtctgaagatgagctggggaatttgctggcctggggtggagatgggcagggagatggcgaacactgagctcagactctggggcaaaggccagaaacaaagagttggatctgagcccgcccagcagaccccttgagaaggctgtcacacggcctcaggaaggccaagacaggggcctcagatgggagaggagacaacacaggcaggcagaagggacagaggggaccctttaacctgagagacacacaggcatggaaagaagagtaggacagaaaagcaaagacgtcaatggagaggcacagccaagtggcagtgggagccccacggcctgcaggcgctcaccatggtctcagggcccttggcgctggtccgctcctcagcaggtgggggcagtggggggctgctccgggccgtgggagtccaggtctctggcaggggtggaggggctggtggtgtgggctgcccctcaagctcagactctggggcagttggctctcggactgggccaggctccagaggctgccggggtgcagggccaggccgcccagaggcacctgcctcaaaggaccccacgggaatgctggcgatggctgccttcactttctggggggccttcgggctgggccgctgggccttgggggccactaagctgtaggtcatggaacctgctagtggggagaaaattgtttgctgagccaggcctgactggagcccatcccctgggtcccccaactcactctgctctgggttgatctgacacctacctgtggcgctggggaaagggctagtcggggctggggtggcagtggcaggggctggcgggcccttgggcagaatggtggctgcaggtggggttgtgctggtggccacagtgtagaccaggcttgggggggcctgggatggctgggccaggggtgctgaggaggtgggtgcagggctgccagagtaaaatgctgttatgacaggacctccgggggctgcacaggcaggcggcagctggggactgggcacaggtgacacgcccacctgaccgggagccagcagtggggcttggcctgctgaaagacagagaagaagaagcaggagaccaagttagggcccggactgcctcagccccaccctgggtccccagcactgcctgccaggccgcccctcacctgagagcaggggctgcacgaaggcggggccgctgggccccagcgaggtgaagcctagagctacagagctcgtgggcccgtacgaggtgactgttccagcctggctggacgcagggctggtacccaggggcagcgcgtgcccgcccgctgactgcacatagg

SEQ ID NO: 5354 - DNA, 1477 bp, Homo sapiens
atcttctaaaccagcctctacatcagaaaaatcagagctgtcctctaaacacagcagatcgcttaaacctgatggacgtatgagccggactactgctgatcagaagaagccaaggggcacagaaagtttatctgctagtgaatccctcatcttaaaatctgatgctgcaaagttgaggtcagattcccacagtaggtcattatcccccaaccataacaccttgcagacattgaaatctgatgggaggatgccttctagctccagagctgaatccccaggaccaggttctcggttgtcatctcctaagccaaagactctcccagccaataggtctagcccatcgggtgctagttctccacgctcctcctcaccacatgataaaaatctacctcaaaaaagtactgctcctgttaagacaaagcttgatcctcctcgggaacgttctaaatcagactcttacacacttgatccagataccctccgcaagaagaaaatgcccctcacagaacctttgagaggacggtcaacgtcaccaaaaccaaaatcagtaccaaaggattctacagattcccctggatctgaaaatagagctccctctccccatgtggtacaggaaaacctccacagtgaggtggtcgaagtctgcacctcaagtactttaaaaacaaatagtctaacagacagcacctgcgatgacagcagtgaatttaagagtgtggatgaaggttcaaataaagttcattttagcattggaaaagcaccactgaaagatgaacaggaaatgagagcatctcccaaaataagtcgaaaatgtgctaatagacacaccaggcccaaaaaagaaaaatcgagttttcttttcaaaggagatggatccaagcctttagagccagccaagcaagccatgtctccttctgtggccgaatgtgccagagctgtgtttgcttccttcctctggcatgaaggcatagtacatgatgcaatggcttgttcttctttcctaaagtttcatcctgaactttccaaagaacatgctcctataaggagtagtttaaatagccaacaacctacagaggaaaaagaaaccaagttaaaaaatagacattcattagaaatatcatctgcactgaatatgtttaatattgcaccccatggaccagatatatctaagatgggtagcatcaacaaaaacaaggtattgtctatgcttaaggaaccacctctgcatgaaaaatgtgaggatgggaaaaccgagaccacttttgaaatgtccatgcataacacaatgaagtctaagtctcctcttcccttaactttacaacatttagtggcttttgggaagacatctctttggctactatcaaagctgcttcccagaatatgatttttccaagtcctggttcctgtgcagttcttaaaaagaaagagtgtgagaaagagaataagaagtccaaaaaggaaaaaaagaaaaaagaaa

SEQ ID NO: 5355 - DNA, 1188 bp, Homo sapiens
  SITE (919): n equals a,t,g, or c
gttaggcccaggggtaatttgtttggagagatggcccagctggcagtaggaggaccagagaaagataccatctgtgaactgtgtggggagtcacatccatacccggtgacctatcacatgagacaagctcacccaggtaaatgatactgttgaatgtacgtataagtgcttttttctttaatgaaccagatcactttatttgagctgttctatgaattttgtcaaaggatagggaatttatagtatcttagaatgtcatttttaaagtacattatcagtacagggttttgtgaaaaacagataaattctaatattatgatggccaggtcatttagtgctatttcactttcatgtagcatattttaaaaaatattatgtgttacccaaagggtgtgccattaatgtgtctgtctcacacagcagaaacagtggcatgcccatacacacagggcatctcctttgattttactattttcctgttcagaattgcaaattaaattagattagattgatttctataggctttttcctacggaagtgatattgttttatcagaagactgcattttcagtaaatgtaatgatttctgtaacattgactaatattccaaattcacctaatacaaatttggttaatttttttctttgtctacatattatacctcaaatgtcttatgaatatgtgatttctgaaaatatatcattgttatagaacttttatacttgtattgtctaattttattgacataattaagtatatctaaatatacctatattctatctctcttttaatatgcctgattagaaactaagtatctctcatatttggggcatcatttaattgatgcttttttgatcaagtaagctatttttctgatatagttaatagcctgaaaaataagatatctacttcagtattntgctttctttgagaaggtaaatctgtcattaatgtatgagtaataaggatcaaactattaaggacacttggagtgttaaatatttatttttggtattgtttcaaggttgtggccgatatgctggtggacaaggttacaatagcattgggcatttttgtggaggatgggctggtaactgtggtgatggtggcataggaggaagcacttggtatctggtatgtgatcgctgtagagaaaaatacctccgcgaaaaacaggctgctgcaagg

SEQ ID NO: 5356 - DNA, 1668 bp, Homo sapiens
gtttaagaaaatgtttggatggggcgattttcattccaacatcaaaacagtgaagctgaacctgttgataactgggaaaattgtagatcatggcaatgggacatttagtgtttatttcaggcataattcaactggtcaagggaatgtatctgtcagcttggtaccccctacaaaaatcgtggaatttgacttggcacaacaaaccgtgattgatgccaaagattccaagtcttttaattgtcgcattgaatatgaaaaggttgacaaggctaccaagaacacactctgcaactatgacccttcaaaaacctgttaccaggagcaaacccaaagtcatgtatcctggctctgctccaagccctttaaggtgatctgtatttacatttccttttatagtacagattataaactggtacagaaagtgtgccctgactacaactaccacagtgacacaccttactttccctcgggatgaaggtgaacatgggggtgagactgaagcctgaggaattaaaggtcatatgacagggctgttacctcaaagaagaaggtcacatctgttgcctggaatgtgtctacactgctgctcttgtcaactggctgcaaaatacactagtggaaaacactctgatgtaatttctgcccagtcagcttcatccctcagtataattgtaaatcatcacagattttgaattcacacctgaagacatgctctcacatatagaggtacacaaacacaccgtcatgcacatttcagcttgcgtctatcatgattcctgttgagagggctttcattgtctgactcataatggttcaggatcaactatcatcaaacggaaggattaactagacagagaatgtttctaacagttgctgttatggaaatctcttttaaagtcttgagtacatgctaatcaataatctccactcatgcattcctactgcttggagtagctgtactggtaaatactactgtaggagtatctgcttgttaaaatggaaaaatgtgtctttagagctcagtattctttattttacaaacacaacaaaatgtagtaacttttttccagcatacagtaggcacattcaaagtggtccaagatggctcttttttctttgaaaggggcctgttctcagtaaagatgagcaaacatttggaatttacatgtgggcagacattgggataacaactttcatcaccaatcattggacttttgtgaagttgacaccagctaaggctgcttaaaataagttctgatcattatataagaagggaaatgcctggcagacaccatgtaagttataagtgtctgtcttatctttactacacatattgtaacaaattcaatatcctagtcttcatttgtatgaatggtttgtattgtacatagtttaaccaagtgttatttgagctgcttattaatattaacttgtacttgtctctctgcttgttattggttaagaaaaaaggatatgaggaattcattttatcaatgtagctgtgaaggccattaaaaagacaaacttaatgtacagagcatttattcagatcaagtattgttgaaagctatacatatacaacattacagtctgtctgtatttagatattttatttctggaaaaaatgaaatgtacataaaaataaaacacttaaagttgagtttcaat

SEQ ID NO: 5357 - DNA, 13422 bp, Homo sapiens
cagtgtgatgcggtgagtgtcctggagaaggagcacgattacagggatgagcatttggactttatccagtcacacctgcggaggttctgccttcagtgtatcctttgggcgctgtgtggggcctgggtcacaggctttcttccaaatggggcatcttcaaagagataaagcacctcccaaacccagaatagtgttctgccaaagagaatttgtatatatctttttactaggtttatgttttactgtatcggagttttaggtttattaacttgtgtctacctttgatcactcatttatttgtttgtttgtttgtttgttttaagatggtgtttcaccactttggccaggctagtctcaaattcctgacctcaagtgatcacctacctcagcctccgaaagtgctgggattatagctgttagctactgcgctcggcgtattttttaattttttttctgagacagagtctgctctgtcacccaggctggagtacagtggtgcagtcttagctcttgtgctcctgggttcaagcaatcctcctccctcagcctcctgagtacctgggacaacaggtgtgcgccaccacttccagatttttgtttgtttgttttgagacagagcttcactcttgtcgtccaggctggagtacagtggcatgatctcggctcactgcaacctccacctcctatgttcaagcgaccctcctgcctcagcctcccaagtagctgggattacaggcatgagccaccacacccggctagtttttgtatttttagtagagaacagggtttcaccatgttggccaggctagtctcgaactcctgacctcatgtgatccacccacctcggccccctcaaagttctgggattacaggcgcgagccaccatgcctggccatctggataatttttgtatttttagtagagacggtttcagcatgttggccaggctattctcgaattcctgacctcaagtaatctgccctccttggcctcccaaagtggtgggattacaggcgtgagccactgtgtctgcccacttttaattaatgctatacatttgataagctttcctattaagaatttaatgtgatcattttatcatcaaattacttttatcatactgtcttagaaatatttttaaactttgcttttatgtagaaaaggtcaattaccaaacagggtattgttttataggctactggtgtttcccatatgtttatgttttgtgctgtccatgatagagaggtggtgtctgtagtcttttgagtcctgttaactataaaaagccaatagcagttggtgccgtggttccacaccctggggtggaggtgagagatgagttcctgccatcttttttgggatggcccattagcctgttggcacccatccctcaaaagatgggtttaatgataaatttggtcgcatgtaggcatctgtctgggaaggaatctgtgtaccttgatactctgagagtgttttcctgggctaacctcagagccaatactttacttctcaggaagtaatctgtgggatcaagacaacaatttacacgttaaaaaataaactctacagcccactagcatcaacatagctttatgcttttgacttcattcatctgctactatgacctttttacttttttatttatttatttatttttaccagtgtgcagtatgcctatgtaatactataagcgttttagtttttaaaattgtaatgctttctgttgctcatatattgatcaaaaactgatcaacctatgagtagtactttgaggttgtatgtgttcgattttgtctcctcctgcagtgaattgatttttcttgagcagattgattagatggagctgccttgatttacacatcagtgaaagaagagaaaaacctcgacttgttgtataagtatattgttcataaaacatacggtttccacttcaccacacctgccttagttgtggaaaaggatgccgtttttatgtgagttattttgagctgatgctttgaaactcttctttttaaagtacatttgctttttacattttaccccttcaaggaaggtgccttctgtctgtgtcttctacagccagctctctcactgcaccttctctctgttcctttccggattatgaggcatctgcctgagggaagtgggtggtgtggtcaggggtgctgcctttcttcctcgagagcaagttgccaaaacctaagccagccatttttggcactcactgtcaactctggtaaaatactggctggggagggaatatagggaattgtgcttgggggatcctgaatgtcttctattaaagcgcctgctttatctgtgtgttggcagggatgactgcaaacatcctctcggcatctctgtcagcatgggctttcgctatattaagtgcttactgtgcttctggcatttcacattttgggagccaccgggattgattgtcctcgatagagacttggatacctgttttcctaagctggtgtctttctctcactggagaatcatagtgttgctggatgcataaatatgaagctgtggtctctgacaagacttgtgttagcagattgatgttcaggcttcagtatcctcctgacttaacaaacaattacattattcattcaggaaaccttattcagcacccactaggtgctcaggttctctgcaaaggacacagaaatgaatgatacgtgttccttgcatatggcactgtctagaggggacatacacagctgaagaagggaagggcagtgatggggttatggaggaagtatggcagggaaagcaggagggtgatgctggaagacaaatggtagatcccaggcggactggaaagaattgcaatagggggagccggggagtgcagtctgtgagaggctggaaatgtgaaagccaggagctctcagggatttgggttgcctcctgcacagtcaaggagagtgtcactcaggctagtcatagatggcatacctacaggcttgggctgattttagatagttgttcagagcagtcaggcaggcgccagaggcacaagccctgtgagaggtgtgtttggaatcacttggtatccaaatcacatgtcatccctaggagcaaggagaccggttggatttggggctggtctggaatgaagaagcatctctcagcttccgaaggctgcatggctcacggcagtatctcaatcatgccctgcccgtttgcacatttggtcctgttggtagttacctctctggtgactggcaaagtcagcaaggatattggggtggagcaccctggctaagcaccctcttgattatagagctatggagtagaagacagatggagaatgagaggcctgtgagaacaatcagtcagttgccatctttcagagctgctcgagttcaaaagtgtgtcatacagggtattttaccattgctacctttaagggattcaggtgggaaccctaggctgtggcttcacataatggaacttgggtgccatcctaccctgtgatgttgagctggccagcactggtgtaggaacctcaaggactctgtgcttctctggtttggggcctaggataaacacaggccctgcttgccccttggttctaggacacatcttcccatgccagcaaagttaatgaaccagtctacaagataactgttgaaagaattcttagagaaacaacccacaggaggggagccatgtcagagcccaagaaaaccatcccatcctgagctctgccttctgtgctgctctctgcatcctattctctgtcggaacaggaccccactgtgtccttgctcttctaggcagagttgtgggagagtgctaaatgcttttgagtggggcagcctgtggaatgggatctcatactggctccttagaccttgggcccatgaactcagtatggagcaggacctgcgatgttctgatggattatacccacagtgtattttggcacatctgccaaaagctacaaacaacccccaacaactacacactatatcttgtgagaagtgtcctacccaggagtcctgaatgtgatctgagtatgctctaaggcagccccaggaaaagcaattcagtccctctctctttgcctttagacctgcaggctgggacaatgaaaagaaaatagctattttacatgaaaattttacaaccgtgaagccggaagatgcatatgaagactttattgtgaaacctcccgtgagaaaggtagtcaaagacaattgctttaagggtttagggccgggcgcggtggctgatgcctgtaatcccagcactttgggaggccaaagcgggcagatcacatgaggtcaggagtttgagaccagcctggcgaacatggcaaaaccccatctccactaaaatacaaaaattagctgggtatggtggcaagcgcctgtaatcccagctacttgggaggctgaggcatgagaatcacttgaacctgggaggcagagattgcagtgaacccagattgcgccactgcactccaacctggcaacagagtgagactccatatcaaaaaaagaaaagaagaaaaagggtttaggtgttttttaatgcaaaaagaagcctataaagatggggcgtggtggctgattcctgtaatcccagcagttgggaggctgaggcaggagaattgcttgaacctgggaggcggaggttgtaatgagccgagatcgggccactgtactccagcctgggtgacaagagcgagactccatctcaaaaaaaaaaaaaaaaaaaaaactataaagaaacaggtcttacacattgtatagtttgtggggggtagtggggagtagtaagtcccagggcctttttgttgatctttaaatgaggtctggcgttatgtaaatggctcagggctggtgggaaggagtgatggaatgctcacctggagttggtggtgtttcccattaagtcctgccagtgctgccgttgcctctggattactgttactggatcccctcatgtgatgtcctgcagaccctgaggtgtttagaacctgccagacttaaaaatgccagttggctacatgctgcggctggttttgggagaggtctgtgccaggctagaaaaatattactctgcagtctcagtagggatctcccagacctgtgttgaagcctgagcctcggactctcctttcggcatgaagtttgacagtggttaggagtattcttggcctgtggccacaaacatgtatgttgtttcacagctggtccacgacaaagagttggcagcagaagatgagcaggtgttcctaatgaagcaacaggtaagaagaccagtgaggttagaacagaggccttctcatgcatgaaatgccagtccctagggtggggttgggggtgtctgcatgtgggaagtcacaaagagcttgcagtggtagaggggttgagaccaggtctcctcattccctccttatttctaggattagttggggatggaccacctccttaggagatcacctacctgccttgcagactctcctacaggaatagtaggattcgcatcttttaagtgctctttctttggaaatgtggttttctggcataatacttcctatgttgacagttaaccaagtaacctgaccacacttccattatttcatgtagcctcacacagccctgtacataaaggcaggtgatgcctgttttgcagatgaggagagtaacttccccaagctgacagtttagaatgcagacttcccatttctgtcacccagattattgttagatgtgtcctgggtccacctatcatctgcccagtggtacaggcaggtcagcaggaagttttgatggttctttttccaactgtttccttctttttccatctttttcctttctgtcctttgcttgcttccttagcttcaaaactggttacttggagtattttttttcaccatataccaaacggctcaattaaaattttttggcatctgtggtataaaacataggacttagttgttgttaatagtgccctctagtggagtacttggagtaagtttttctctagaccttcagtgctctctgcaggccttggttaatagccagtttgtccctctctttgcagtcactccttgccaagcaaccagccactcccacgagagcttctgtgagtaccttacactaaacagagggtcaaggcccagtgttgtgggtgtcatcaaactttataccattatttgtgagagcgtatatttgtgtgggttttgtattttcagtgggaatttggtttccctaaagacccatgaccagaaacataaaagaaactcaagaagtttctgatgaaagaatacaactctgggaattagagtgagctggctttgttatctggatgtctttctctcaggagaaagagagccagaaagggcttgaattgagagcatactcccagtcctgtaccatagcctgtgaaaaatatccctcagaagcatgtctccatttgtggcatatgtattttttgttattgttatgcctgtgtgtgaccttagctgcttttggacttaggaatctcctgcaagaggaccctctggctctccaaggacccagggtcggggagggccagccagtgtgcctagctcctccccaggcacgtcagtaaaaaagccggacccaaacatcaaaagtatgtattcctcaaaagtatgtctctttggagagtagtttagttttagacctgagccctgcaggggctgggtggctgagtctataaggtggagactcatggaagccaggctattctcttccccgataagggctactttccatttcccccattccagaggaagaaggtccatggtaggcagagaccagggcctgttcctttgttagaattggtagcccatgcacctggctctgtgtgagacctcacttaggccctgctcattccttcagagaggaatgcaaaatagtaactttatttttttagagacagggtctcactctgtcacccagcctgtggcacagtgatacgatcatagcacactgcagcctcaaactcctgggctcaagtgatcctcccatgtcaactctggagtagctgggactataggcgtgtgccaccatgcccagctaatttttaaaatttttattgtaggccagatgcagtggctcatgcctataatcctagtactctgggaggccaaggtgggaggatagcttgagctaaagagttcgagactagcccgggcaacatagtgagacctcgcctctacagaatattgaaaaattagctgggcatgatggtgcttgcctgtagtcccatctactcaagtggatgaagcggcaggattgcttgggcccagggcattgaggctgcagttgagctgtgattatgccaccatgctccagccagggtgacagagtgagagactgtttcaaaaaaaaaaaggcctggcgtggtgactcaagccagcactttgggaggctgaggcgggcagatcacttgagggcaggagtttgagaccagcctggccaacatggtgaaaccttctctgtacaaaaattagccaggcgtgatggtgggcacctgtaatcccagctactcgggaggcagaggcaggagaacggcttaatcctgggaggtggaggttgcagtgagccgagattgtgccattgcactccagcctgggtgacagagcaagactccatttcaaaaaaacacaaacaaaaatattttttatagaggtaggggtctcacttacgttgccgaggctgatctcaagctcctagcctcaagcagtcctacgcccttggtctccccaagtgatgggattacaggcgtgagccaccacccctggctgagggagtcactttaaaatgtgtattttgaatctgtaactttgtttctcattatgtttatatgatgactgtctatgaattgtggggatttttcccccttcacttctcttgtcaagctcaattacttttcagattaagtagcttttatcccagtaacttagtgatactcacagatactgcctgcagtaaaatcattaaaaaacagttttatttaatgcttgtttgatgggtgtcttctattcaggatgtgagcttttcacagcaggtttggaatgttaagtgctcatgcaactttgaaaaacactgtctcatggacggggaggtggtgtggagcacaggttatctattctgctcccaaacaagtgggaaatgtaaacatggttccacttagtaatcatgctaagtagcctcagcagtagcagtgtaaaggcatcgtagcgaatgaatgttatcaatatcctaggaagctgatagccacaagtggctaatgccaagctgagaactagggtgtttaattttaagtcttccagtttatatgatgcttttttttctctttaattttccttagataatgcagcaagtgaaggggtgttggccagcttcttcaacagtctgttgagtaaaaagacaggctctcctggaagtcctggtgctggtggggtgcagagcacagccaagaagtcaggtacagaagggccctggagacttgtgactcttgtggttgagtagtgctgcaaggatggagaggcagacacctgccctgcagaccctgcagtgtcctgaatagccaagcaaggaagcaggtcttcatttcctactgagcagtgtgccgtgctttcagtgggattgccttactaccatgcaggtttccttggcacattgagagtgggatttgtgtacatttgggttctcgggaactgggtgttgggtgagttgaggtatagcctaaattacatatgtggccctgttgtagaacctctccagtagaagtcatggtccatggagggtgtaccagtgactttttttttctttttccaaggtggagttttgctcttgttgcccaggctggagtgcaatgacgtgatctcactgcaacctccgcctcccaggttcaagcgattctcctgtctcagcctcccgagtagctgggattacaggcgcgtgccatcatgcccagctaattttttgtatttttagtagagatgtggtttcatcatgttggccaggctggtcttggaattcctgaccccaggtgatccctccatcttggcctcccaaagtgctgggattacaggtgtgagccaccgtctgcggctgactttttttttttttttgatagagatggagtcttgctctgtcgcccaggctggagtacagtggcatgatctcaactcactgccaacctccaccacccgggttcaagcaattctcttgcctcagcctcccgagtagctgggactacaggcacgcgccaccacatccggctaatttttttgtatttttagtagagacggtttttcgccatgttggccaggctgttctcgaactcctgacctcaggtgatccacctgccttggcctcccaaagtgctgggattagtgcacctggcctacttttaattttttaaaattatactaaagccttagttgttctgaaccagtgatgttttatttgttctatttttttttctgtgatgctttgtaaggatttttgtttactccactgcccccagtttggctgtgaaccctcactgtctcactgcagagtcaaggcctcctcctccctgaagctccctacttgtcacatacacacctctgtggcagccacccacctgtccttccatgtaagcaggtagggcgggtctatgtcttggagatctctgaaacaaaacaaaacatgttttccttgggaattacacattttcccaagaagctggaggacattttaaggggtttttgctttccattttccattggctataaggtatgtttatacattgttttccctaattgatgtcttcagggcagaggagaccctcaggaaatcacttggggcagcctgggcctccagtggctcctatgttctaagaaactcagagtctggtctagtggcccagactctgggctggtagtattcccttctgggaaataggtgtctatttctaggcctgttcgtgtctgacagcagaaaaatacaagtatagattttgtgcaggactgaactatcttattcttattgaaacataatgttttcaggctatccatttgagtcagtctagaatgttataaacaaaaacacctatctggggcaaagaaaatagtttccttcgttgctgaaattcaggtactacctctaggaagatggtggtgagagtgcacaggggtcagggttgggtggtgagagggttttcagaaaggttcttgtatttggcacaaaggcaccccccgccagagagcagtcaagtcactcccttggagttggaggaagcactggcctgtgacttttgggattaggatgtgccgagttggggtctcctcaccactgcagtagaaaagggctttcctcattcttattaaggttactgtcatcaagtgattatagaaggcgtataattttaaatgctcctttaaaaaaaattgtttcctcttctcacatcattactttgcttttttgctttttttttttttcaggacaaaagactgtgttgtcaaatgttcaggaagaactggatagaatgactcgaaagccagactctatggtaacaaactcttcaacagaaaatgaagcctgaacctccttaaaaagtgcatatgtcgaatgaccaaataactatgtatattgatctgctaagaccaggatttttctgatatggcacatgctatcagttttttggggcaggggagatgaactttaaaaaaaaaaaaaaaacttcattggcttgtccgagtgtgaaatgcacatttaggaaggttacatgtcagaccctttgttaaggataacccttggactctggggcatgtggctcttttgtgggaggcaagcacatctgggcttcttgtggaggggaaggtagagtgaaagaaagagggcccactttctaacagggtggagcaaatgagaccaagaaatcattggtaagatgatggttagtctgaccagtttcatgttagtaaattcacttgttcttgggaagcagattaagtagcagaaagtccaggaaagaaagaccagaaggagtaatgagacaagtgatggtggggaagctgaatgttgagggaggtggaggaaggaggagatgagcagtgtcagtaaatactgtgcattcagtagaagttgaagaatcattgttagaagcatttccaaacaaaacactaagcaaaatgggaattaggcttattttgaatgcatctttaacttacgaaagatgtactaattgtgggggtgcctgagtcaggcggagctgacccaggggtgggaacgatggcagctgcccaggacccatgtgcttggcccaggctatgtcctcgtgagaggtactggggtccacggatatgtgttgtggggcagacagtcactgtgggatgtcttcaaagtcagcagttacagaattagtttactttgaattttgttgtctaaatagctcctgctttattttttaaattaaattttttgtttttactatcacaggctggcctaactaatacaaaataggtgatgaacctctggttttaccataatgcaatgtgccacggaaagtttgggggaggtttttaatgtaattgcactctggttaattggctcgtaccaagccctgccttatgacttgtggaaagcttcaaggagttccactgatgcaaaagggtcttttcctagcttcctggtctgatcagtgctatgagatggacagataagtgtgaatgttttatacagaaaatggaaatgatacatttctcttgttaggtgttttcataaaatgtagcattttttttcttatggaaataagagtttcaggtgtctccccacctagggcaaattcatgcacattgtcatgttataccaccattctggaaatgatttctgtggatttgaaattgcacttttaattttatatatgacagcatttaaatgcaaacactaccatgaatttaatgtataaaatgttgtcaaaccaagggaaaaaaccacagttcaccatgtggagtttactttttttatatgaatgtttgttgtactgtgtctaagcataacttccctaatgtcattacttttacataccagatttgactgaccactaatgtagtactggggataacttaatatcctatgttgtgtcaagactctttgaagactttcttgaattgctttcgtaaaggtctgaacactgttaaggagaaagctgagtatcaacttgcctttctgatagaaatgtttcttgtgccagttttattgttgagatatactatttttttccttttttaattcagttttttaaaaaaacaaatgtattgtggcttccagttaccaggttgtctaggtaatgacagtaaactgactgtagaatgataattgtggtatagtgaccaatagatgccaaacagcttgtggcctcactaaaggtggggtcgcttagtccccgggagtaaaatgagtgacctcagaaacaagaattcctggaaaggcacatgccgaagaggaatatggtataattttaaattttaatgcaaaattttaatttgtctttattttttatcatttgaactgataagcactttttgtgtcaatataaaatatactaaaactgatgaaatgctaagacatgtcttgtgaaggaaggtttcttggagaccacttttatttactcatgagaagtggaagctcctagtatcagaagaagctgatacatagtgtcatgtgctcagtggttgccaaagtctaccaactttggggagctgcagggttctttttgggaggtgggaggaagggagatgagttttgttattttggggttttcaagcattggaaccaaaggccaaataataaacagcctttagtttttaaagtaaaattcattttatttgcagagtacacttgtatggtagactgttaaagacaattttatgactatttatgcacattataatggttacatctgctttttgtctttaaaataaaaaaaaaaatcagagaaaagcccacctttgaatacgtggctgaagataacagccaagaattggtctttcctaaaaatgcaacagataatgctgctagattgttattttgtttgcacttttttttgattggcattttaaaatcggtatttaaactgaagacattgtcatgttttattaatttaacaaagttgaaagtgactgctctgtacatcatgaccttaacaatgttaatgctgtaagtgaaagttcactgtcgtctgtatactaaatttattggtgtttctaacttaaaagtaagactgcagattatcccccaccagccttagtccaggggtgtggctctgtccgggtgcagtatgcagtcatgtggaaccttgctttctagtcctgggaaaaaaagatgtctctaattactggcttcaataaacacgaatccagactgcttacaa

SEQ ID NO: 5358 - DNA, 102 bp, Homo sapiens
tttctttttcttttctttcctttttttttttttttttgagacagtcttgctctgttgcccaggctggagtgcaatggtgcaatctcagctcactgtaacctc

SEQ ID NO: 5359 - DNA, 779 bp, Homo sapiens
gacacaaattctgttttctgttttgaagattagcaccacagacaggtgatcattaatgaaatatggcccttaaaatacacattacaaaagagaaactgatggtaaaattgctggtgaagttaacttttatcatttctccactaattaaaagttcagattctgggatcacatctctaagctgttcatatcaaagagctattttttaaagatcctgattataggcaacaaaagcaaaaataaacaaataggattacatcaaaactgaaaagcctctgcacagcaaaggaaacaacagaatgaagagccaacctacataatgggagaaaatatttgtaaattatacatctgataaggggttaataatcaaaatatataaggaactcaaagaatgcaatagtaagaaaacaacccaattaaaaaacaggcaattccagcctgggcaacatggtgaaaccctgtctctacaaaaaatagataaaattggccgggcacggtggctcacgcctgtaaccccagcactttggttggccgagtgggtggatcgcctgaggtcaggagatcgagaccagcctggccaacatggcaaaaccccacctgtactgaaaatacaaaaaattagcccgggtgcagtggtgggcgcctgtaatcccagctactcgggaggctaaggcaggagaattgcttgaacccgggaggcggaggttgccatgagccgagtttgcaccattgcactccagcctgggcaacaagagcaaaattctgtttcaaaaaaaaaaaaa

SEQ ID NO: 5360 - DNA, 801 bp, Homo sapiens
agattactaacatttttaatatgacacaaattctgttttctgttttgaagattagcaccacagacaggtgatcattaatgaaatatggcccttaaaatacacattacaaaagagaaactgatggtaaaattgctggtgaagttaacttttatcatttctccactaattaaaagttcagattctgggatcacatctctaagctgttcatatcaaagagctattttttaaagatcctgattataggcaacaaaagcaaaaataaacaaataggattacatcaaaactgaaaagcctctgcacagcaaaggaaacaacagaatgaagagccaacctacataatgggagaaaatatttgtaaattatacatctgataaggggttaataatcaaaatatataaggaactcaaagaatgcaatagtaagaaaacaacccaattaaaaaacaggcaattccagcctgggcaacatggtgaaaccctgtctctacaaaaaatagataaaattggccgggcacggtggctcacgcctgtaaccccagcactttggttggccgaggtgggtggatcgcctgaggtcaggagatcgagaccagcctggccaacatggcaaaaccccacctgtactgaaaatacaaaaaattagccgggtgcagtggtgggcgcctgtaatcccagctactcgggaggctaaggcaggagaattgcttgaacccgggaggcggaggttgccatgagccgagtttgcaccattgcactccagcctgggcaacaagagcaaaattctgtttcaaaaaaaaaaaaa

SEQ ID NO: 5361 - DNA, 235 bp, Homo sapiens
gttgcagtgagccgagatcacgctgctacattctagcctgggggacagagtgagatgctgtctcaaaaggcaaaggaccagatagacatttcttaaaagaagactggccaaaaggtatatgaaaaactgcttaacattaaggcttaacactaatgatcagggaaacacacttaaaaccacaatgagatatcatattacaccagttagaatggccgttaccaaaagataaatgata

SEQ ID NO: 5362 - DNA, 651 bp, Homo sapiens
aaaatataaaaaatcagccgggcacggtggcaggtgcctgtagtcccagctactcagtgggctgaggcaggagaatggtatgaacccgggaggcggagcttgcagtgagctgagatcacgccactgcactccagcctgggagacagagtgagactctgtctcaaaaaaaaaaaaaaaattattttaaatgtaaggatgcaagaatagtacaaaaaattcttgtatatccttcactaagtttcctgattattacattttttaccatatttgcctgattatattctctctctttataagcatgcacatatatgtattattttgctaaactagtcttgagtaaattgcaggcatgatatcccattattcttaaaaacttaagtctgcacttgccaaaaacaaggacattttcctgcataaccacagtgtgcaatcaaatcaggaaattaacattaataccgtttattttatagtccccattcaaatttttccaattgtcctaataatatccttttttaattatttttaattaatagagatgggatctcgctttgttggccaggttggtcttgaactgctggcctcaagcaatcctcttgcctcagcctcccaaagggctaggattataggcacaggccactgcacccagcccta

SEQ ID NO: 5363 - DNA, 235 bp, Homo sapiens; identical to SEQ ID NO: 5361

SEQ ID NO: 5364 - DNA, 1601 bp, Homo sapiens
tctgaaataagtattaatacctaacatttaatattaattctgtcctatgtgcaacttacaaatacgtcatataagtatataaattgactttacctattatatgcagaaattgaaggggggaatttctgtgtttctagctttcttgttaatgtgaagggtggggcattttatgttttttcaggattgccttattcaatgaagcaagctgggtttcctttgggaatattgcttttattctgggtttcatatgttacaggtaaaatactatataatttcttatttctgcaacttcaactgtgcaataactacacacatacacacacacacacacacatgctgcaactgaatttcctagttaattaaaaagtgcatcaaagaatcctaaagaatttaagcatttatgcctgaggagatttacttttcttactaatcctttaaacagattagaaaaagtagaaaagcattatatattaccaagcctaaatccttttcatgtgcctttttcactttttgcagaaagtagtagatggggaagtcattttaaagcttcattaaggctaagagacgactgtgctctgaaagtgcagatagcagggcttcgtgggcaggtgcgtgtgaatgagcaaccttattcagctgttgtttgtggaggtagaaatgaagctctggtgatcaaccagcagggctcatcaagcctctccgcctggcttatgcctgcccaaactcgctgcctgctactgtctttaaatgcagcaataagttgcttctgtatcacatcttctcttctgcttccccttcttcatgtaaatagttcattcacacccacgttttgtcactctcccatttaaatgcaggctttacaactcataatcatctcctctttttgttgtcctcgtccccgccttgtcatcccaccatctcaccttatgacaaacatggcgtctcctctaccttaggatcactgtgaaagaggtggtggcaatgatcaaaaacagacaccactcacaggagttgctgctgtggtggattagatgcccttttaccagctagtgcaaaacacctcagctgccctttgctctggagtgttgccctgggcctccagggggtctccttgcctccacggggaccaatgtgtggtacagttggagctccagggctccaccactgcagtacttgctgaactctttcccctgccctgtcctctcattccccttcttctggagcatttcatccacagaccccttgcccaagaatgtctgtctcagctctgcttctagagatcctccaagatgccatccctcgtaaaacctcaggcttccaagacctgcccaacactcagctattttttctcaggctgacgaagacagagtaaagcatgaaatagttttcaaattcaaagctagagaggcattgagctccctgccttcttcctaccacctccacccttaagacctaaactgcttctagttattacagctcttaatttgtaacttaagacccataaattagcagcatgagacctaagtgtgcttattaagagttgctggtgtttaaaaattgcagtctacttattggggcatttattacactaaaaaaaaaaa

SEQ ID NO: 5365 - DNA, 781 bp, Homo sapiens
gcaagtttttctaagttctgttttcatgttatgaaatgttggggaacaaaaagaattataaaaatttacagcaaataattctaatttgctttaagattttcaaatttgttgattaacataaaataatttttattgtctgagcatacaaaattatttaaaagaaaattcttttgttaagtaacagattcattcatgaatttttaaaaaggttgcatacaatatattcaaagggagatcaaaatattatagtgattaatacctaagatacctaaaacttttaagggaatatatttgtagcctgtattttataagcaaatgaaagcatttacatttattattgactaaattcttaacacatctttacctttaagtgatcattgtgaacttttataaaatgctcagtgttctcatcccaaccatacccttcttcagcaagccttcataccatctctgaaattggttgcctcctctctgtgacataagtatataaattgtatataaattatatgagaatcaatgagaatcaaggaggagaatcaatgccaactctgttgccagtaacttcagaccttggctaagccgttttaacctactgaagtccaaattttctcctccaaaaaagtaaaacatgaacacctacctcaaaaagatttcacgttatggctgcattattctcagcatctagctctttgattctccttggccagtgacctgctgttcagttttcctgcttccagcatctgtctactttctcatcagtcctccatgctgctgcaagtta

SEQ ID NO: 5366 - DNA, 233 bp, Homo sapiens
agtgtaacagtatgtatgcatgtcttttatgctgaagatggggctgtaattcacactgtttccacagttgagagcatcttccacatgtggtagattaaggtgaaactgcatatgggtggtggtgaatcatttttctgtaggctgcgtggttgattgctagtgttaccgaatgtactttttccacttactgaagggtccatcattatttgaatcatctttctttaactttctag

SEQ ID NO: 5367 - DNA, 648 bp, Homo sapiens
agggagacaataatgagggactttcagttttactttacataattttcttttaagtattggaatttaggtgatttttcctttggggttttctgtattttccaatcacaataaataaaataagttataaatatttgttgcatgaatgaaatgtataaacccatttatgtatgtatttttttaaaattagtatattattaagtctatacaatattagtatattgttatgtatgtataagctttttaacatgaagtttgcagaatatagtacttcttccaaactctatgacatggggggaactgaagtatggggatatcttgtaccagtgtaagaattcaagaagagaccgtgtgtggtggctcatgcctataatcccagcactttgggatgccaaagcaggatgatctcttggagctaggcgttcaagaccagcctgggcaacatatcaagaccccatctctaaaaaaaaaaaaaaaaattaactgggtgtggtagtgcgggcctatagtcctagctattccagaagctgaggtgggaggattgcttgagcccaggagtttgaggctgtagtgacctataccagtgattataccagtgcactctagcccaggcaacagagtgagacctggtctcaaaaaaaaaaaaaaaaa

SEQ ID NO: 5368 - DNA, 648 bp, Homo sapiens; identical to SEQ ID NO: 5367

SEQ ID NO: 5369 - DNA, 102 bp, Homo sapiens
atcaggcctccattttttactaagagaaaaatgcaccctttttttttttttagacaggatcttgctctgttgcccagggtggagtgcagtggtgcaatcacg

SEQ ID NO: 5370 - DNA, 102 bp, Homo sapiens; identical to SEQ ID NO: 5369

SEQ ID NO: 5371 - DNA, 1045 bp, Homo sapiens
tttaaaagttaccttgatgacagagtcattgctatacttgcaacttattttattgtgggggatcagtgaaataccctctagtaatactgagatgtatagaaaatgcccctaaactaaatgcccccactgttttaagttaaactgtattgttggcctgggagcaagggtaatgggtagtttttccttgtagttaagctttgagctgtcatttcttattttagttattgtacttgcctatgaaggctcttctaatttttaattcttaactcgttttggtgaagtagatgaacaaccaagtttattgaagctttaatcatagttgaacatgtaattgagtcactgggatctgcataaaagtttgcagattctgatatacagtctttataggagttagaatatgaagattgtagtagctattttcatcacccatcagacttatatgtttattcagtagagctgaaattattaaatgtatgaatattactggctttttcctgaccattcacacttcatggtgatttcacaagagaaggtatatgattctggtttccttgcagacttgttttttataatcacgtttattgaggcttaattttcatacaataaattttatatatattttaagtttacaatttgccactcagatcaagatacggaaaattctcatctattggagaaagtttcctcatacttctttgcagccatcctccccaacctgccacttggcccaggcaatcactaatctaatttttaacactacagattagtttgccacttcatctaaatagaaacatattttatgtagttgtttgtctggcttttttccttcaacaatgtctgccaataatattgcatttattgaaagttacttcatttttattgctgagtagtaagtagtctattgtgtaatggataccacagtttatacattcgtctgtggatggacatttggggtttttacgcttttaagttgcaatgaacatgcatacaagtattgctgtgatcattgtttttccttctcttgaataaataactagaagtggaa

SEQ ID NO: 5372 - DNA, 1045 bp, Homo sapiens; identical to SEQ ID NO: 5371

SEQ ID NO: 5373 - DNA, 1045 bp, Homo sapiens; identical to SEQ ID NO: 5371

SEQ ID NO: 5374 - DNA, 564 bp, Homo sapiens
tagcttgtgattttttttttttactattttttactgtgataaaaaatgctgtggtaaacacctttgtgtcacatacattgtcattctgtccagttttctctatagaaaccaatttttagaatttcttggttaaagtatatacatttcacgtgcttttttactagtttttatattagacaacttctgattaaacatttagtttaaatgattaaaagtatggcattacaataagaatttatggcttatttgattttaaaagtaggtcttaaaacaggcaatatactgtgacaagcaaaatatttccatgtcattatttcgtaagtatccttaagaggaacagtatctctctcaggacttggaccaaggaatgagatcaaaggggaataatgattagcagcttaattcagctgatctcaaatgcttaggggaaaagtttttttaaaaagttcaaacatatgccctatttaacatgtgataacacatattctatattaaatatcctgaattgattatagtgcatgccacacaatcacttgttctgttgctaacaatcagatattgatt

SEQ ID NO: 5375 - DNA, 520 bp, Homo sapiens
ctgttttcaaaagtgattttaccattttacattcccacactcacaatgtctgagaattcatgttccttgctataatttagggaattttcttttactttctgccacacaggagttttttacttcattagattaacactttgctaatataattattaacttttaaagagcaaaaaaaaaaggctttgcagatgaaaagaccaaagcctataatcaaaacatgacatgaaaagagtttagaacaccctggcttcataagttatcagaaaggtgaattttatcctcagacttttagcaacacctttaatggctagccacttgagaccttctataatacttctttcagagttcctgctgctgcttgaattgtaaaagctgcaatagaaatatgtttctttacttctttccaggccaaacgagagttggctttattttcaatatcaaagatagcatcatagattccaggaaatgattctccagcatatttgttgtggctacttggagcaaatatgatgtgcctaaa

SEQ ID NO: 5376 - DNA, 1688 bp, Homo sapiens
gtctcactcagtattgggtttagggctcctctagattctagtacatcatgatagatcatgcagtcagtaaaagtcctgctgattttccccagtaaagtgctttagtccacacaaagcctgatctttaatccatgcctagaattggcaaatgatgccaggaaagaaaacagttggtagtctcagctatgtagaaaagacaaagacttttagtacatctagtcttaagcgcttccacagctctttcgtatctgtaatgtattttgcatttgatccattttttcctagttactgcacctgggagcgactgccagtactaccacatcatttcggtagtggaggtccccattgaaggtttttttcatagcacatagcatgatcacgtctaggaagatcgttctggctgtagatagtataattatctactaatacaaagggggaaaggacgtgagatgatgtgaaaggaagttttgcatcatttacttgaaagatactgttcttctgaatttaatcacattggggattggaaaaagtagatgaataaaaattaaaaagaaaaaaacaaatgagttcatgaagttaagcaattaaagaaaaagacaaatctaatacagtactgtaattatttcaaaggttactattttaccctaaactcatttctatacttgaaagttcaaggatcgattgatatttttgaaattctgaactaaatggaaatattaagatggctcatgtgtgcatatataaatgttatttgtatcctcagaataaactaataaatttcaagggtacaaaataggattactatttgtgaactgtattgtatcccagaactctgtacttttgtctgttcaaaatgaaaacagtagttattatattattttaacccttataaaagggaatatgatgtaaaaaattttagccattcagtacagagtacaagtcacataaaagtctaccaccgaaatgcaagcactatttgtattttgtttgatattcatatatttagttttatcactttttttaaccagtaagtcatggacaacttactatataagtgaaaaatgtatatatgatcattgtatgatcatttttatattatactataatccattctcccttgatatttagcttgtgattttttttttttactattttttactgtgataaaaaatgctgtggtaaacacctttgtgtcacatacattgtcattctgtccagttttctctatagaaaccaatttttagaatttcttggttaaagtatatacatttcacgtgcttttttactagtttttatattagacaacttctgattaaacatttagtttaaatgattaaaagtatggcattacaataagaatttatggcttatttgattttaaaagtaggtcttaaaacaggcaatatactgtgacaagcaaaatatttccatgtcattatttcgtaagtatccttaagaggaacagtatctctctcaggacttggaccaaggaatgagatcaaaggggaataatgattagcagcttaattcagctgatctcaaatgcttaggggaaaagtttttttaaaaagttcaaacatatgccctatttaacatgtgataacacatattctatattaaatatcctgaatgattatagtgcatgccacacaatcacttgttctgttgctaacaatcagatattgatt

SEQ ID NO: 5377 - DNA, 518 bp, Homo sapiens
ctgttttcaaaagtgattttaccattttacattcccacactcacaatgtctgagaattcatgttccttgctataatttagggaattttcttttactttctgccacacaggagttttttacttcattagattaacactttgctatataattattaacttttaaagagcaaaaaaaaaggctttgcagatgaaaagaccaaagcctataatcaaaacatgacatgaaaagagtttagaacacccgggcttcataagttatcagaaaggtgaattttatcctcagacttttagcaacacctttaatggctagccacttgagaccttctataatacttctttcagagttcctgctgctgcttgaattgtaaaagctgcaatagaaatatgtttctttacttctttccaggccaaacgagagttggctttattttcaatatcaaagatagcatcatagattccaggaaatgattctccagcatatttgttgtggctacttggagcaaatatgatgtgcctaaa

SEQ ID NO: 5378 - DNA, 4507 bp, Homo sapiens
atgtagtaattttgcctggatggttttggatataatagccaattcatcacttgtgatttgatgactcttagggtctctagtttttcttaacagcctccaaattgaagtttcagaatccttactgcaaaaagcacaaaagttttcattgccattttgatagtgatatgtagctcgtaaataataattcttacctctgtgttagataaaacatccagtaaaacagcatcaagtttagctttgatagaagggaacaattagagttggtgtagagacagaccagttaggatgagggcatgaaatacagcagaagcagtaggaagagaagagagactgaggatcttgaattagggtctagatgaaaatttaggatgattcctaggtttgggaatggagggagagcttaaacaagatagagaatatagacacagattttggaggaaatgattttctcaagggactgctgagtccaaggaatgtttacaaatcctcaagaagtactccaggctatttgtaagatctgaggctcataggccttttctggctctcaggatttagagtcgtaataggcagtaatgtaaattcactagctaactttgaggttgcaacattcatagcactctgaactttgagggcatcttgttttaattcaaaaaactggtaatccctgcttttgattgtgatgtaagtagcagtacacaagcatgggaataagtaaatccaataaaggagtatttaggctcacctgctaaatactcagtgtgccacccaaaccatctgtaatgggtccccttattgaaaacattctttttccagaatgggcaaggaaggctggatgggcaaaagcaaaataaatgtaccacagacccttgattctgttagtatcagtgataaaacatgattgataaaactaggcatgatacattcttaaggtacagaaaaatgtggaaattgtgtcaagaaaattcacaaattttaaatggttctttaggctgatagtaataaatgggatcattataattttatgtaaaaccttcaaaggcttcctactaaagaaagctgaattccagtaacagattgagcccagactactcagttcatatttgaggccaacttagactatttttgatgccttaaagattccttcaagtcccctttctctttctaccatacccccagtaaagctacttaaaatcctctgtaggaaagagctgagtaattgggggcagagatggaggacaaatttaagggaacagaaagccattgggaagacaaatgaaagccagaatctgaagataattttaaaaccttcagggaaagtaggtgtctaatcacaggacttaattcacttgagtagaaatttgtaatttagccataggaatttaggaagtgttagttacaagaggtaacttgaagctgtggacatgatgatagcttttgttgcataattagaatgtgccaaacactttgctaagtgcttatgatagcttttctcttcagaacatcaccatgattatttacagtataacctgtattttacagatggagaaatgtaggcaaaggaaaggggcataacttgcctccagggtcacatagatagcaaatgatgaaatttaattttaaaattagaaactgattccaaagtccttacactcttaaccatgaaactgaagacatctaagtcaccacgcaaaacccagaatctaaatggccatttattagtgcttattcctttatttcctaatattaattaaatgacttaattaccatgagaagataatgtgctttcagttttcgcagtagttagttcagccattgattttcttactaagaacctctaaaaggccaatgggcagttgacaaaaattagggatggattctgcagctgtaagaccaagtgaaagtaaaaggcccatggcggtaaatttgtcccttgcaggcagtttgttctaaatgcttgtgcctagaaataaacttagccttattatcatctggactctgagcaatttttgcatctcagtattcttagatgtggatgattaaaaggccacgtatgaaggcagctaacataagacactttgtgggagtgagataattcattaaaatcaaatattagtgtattaggcaaacaaattcaatcatttcagttatgtaaagctagctgggttctcagttttagcaagttagggaagatatcacattacaggagaaagacaatctaaaagtttttgaagttttaatggatttaaccacttgtaaaatgttataaattgtaggacacttctcccagagagatcctctagcatacatggatgatttacttttcatatttatgatttggcaggaaagtttgagttcatttgaagttaggctttttaatagtttttctcctcccagtgaatttttctgagttgataggtgtaaaatttatagattttattgataataaaagtttgtaagcatctttaatgtagcgattccattgcttattttttattcagcactcaggtcacttcctatgtgctggagataattaaagactccacttccaagaaaggatacaacaaggaaaataagaggttgttaaataaaaattatgccaaagataagcctgtagaaagcttctgtggtgcgtatttggtagattttatggatggatttcgtgaaggataaatagcagagtcctgaggggggaaaaaaggatagaagtggccaaatacaagagaggaaatgggagaaagaataggatatgaagaagcctggcattgagaggtggtattggcctgttaagaaaacttgtttgcctagcccctaagttctagtctcactcagtattgggtttagggctcctctagattctagtacatcatgatagatcatgcagtcagtaaaagtcctgctgattttccccagtaaagtgctttagtccacacaaagcctgatctttaatccatgcctagaattggcaaatgatgccaggaaagaaaacagttggtagtctcagctatgtagaaaagacaaagacttttagtacatctagtcttaagcgcttccacagctctttcgtatctgtaatgtattttgcatttgatccattttttcctagttactgcacctgggagcgactgccagtactaccacatcatttcggtagtggaggtccccattgaaggtttttttcatagcacatagcatgatcacgtctaggaagatcgttctggctgtagatagtataattatctactaatacaaagggggaaaggacgtgagatgatgtgaaaggaagttttgcatcatttacttgaaagatactgttcttctgaatttaatcacattggggattggaaaaagtagatgaataaaaattaaaaagaaaaaaacaaatgagttcatgaagttaagcaattaaagaaaaagacaaatctaatacagtactgtaattatttcaaaggttactattttaccctaaactcatttctatacttgaaagttcaaggatcgattgatatttttgaaattctgaactaaatggaaatattaagatggctcatgtgtgcatatataaatgttatttgtatcctcagaataaactaataaatttcaagggtacaaaataggattactatttgtgaactgtattgtatcccagaactctgtacttttgtctgttcaaaatgaaaacagtagttattatattattttaacccttataaaagggaatatgatgtaaaaaattttagcaattcagtacagagtacaagtcacataaaagtctaccaccgaaatgcaagcactatttgtattttgtttgatattcatatatttagttttatcactttttttaaccagtaagtcatggacaacttactatataagtgaaaaatgtatatatgatcattgtatgatcatttttatattatactataatcaattctccattgatatttagcttgtgattttttttttttactattttttactgtgataaaaaatgctgtggtaaacacctttgtgtcacatacattgtcattctgtccagttttctctatagaaaccaatttttagaatttcttggttaaagtatatacatttcacgtgcttttttactagtttttatattagacaacttctgattaaacatttagtttaaatgattaaaagtatggcattacaataagaatttatggcttatttgattttaaaagtaggtcttaaaacaggcaatatactgtgacaagcaaaatatttccatgtcattatttcgtaagtatccttaagaggaacagtatctctctcaggacttggaccaaggaatgagatcaaaggggaataatgattagcagcttaattcagctgatctcaaatgcttaggggaaaagtttttttaaaaagttcaaacatatgccctatttaacatgtgataacacatattctatattaaatatcctgaattgattatagtgcatgccacacaatcacttgttctgttgctaacaatcagatattgatt

SEQ ID NO: 5379 - DNA, 520 bp, Homo sapiens; identical to SEQ ID NO: 5375

SEQ ID NO: 5380 - DNA, 3915 bp, Homo sapiens
gggagctgctctgggcagggggaaaatgtgctcatctcaggaagctggtgtggatggtactggacctggctaggcctgatactgaccagcagatgggcgctgtgtttgtagccccagaggtggtaggccggcagcggtatggacgccctgtggactgctgggccattggagtcatcatgtacatcctgtgagtggacagatggacaagcaggcttgcagtcagatggggtgggggcatgtgtctgtggcctttctgtgtgacccttcccccatgcaggctttcaggcaacccacctttctatgaggaggtggaagaagatgattatgagaaccatgataagaatctcttccgcaagatcctggctggtgactatgagtttgactctccatattgggatgatatttcgcaggcaggtgaggaggtgcctgcccagcacttggtagaacgcaagggagtggggagggtgtcctgctctcatcttcctctgtggtattctgcttctgtcccccagcccatttatcacctctagacattgagatggggtgcccatgactatcccctccttggttttgtccacagccaaagacctggtcacaaggctgatggaggtggagcaagaccagcggatcactgcagaagaggccatctcccatgagtggtgagcagggtccaggggagggtgggagaggccagggtccccctcacacccagcagccccatctttgaggcctagaaggggtgcaggtacctagagctcagggcagcccagaggctctgcctggtagtccctggatgccacatagaagggctgagcagagtctccacaaaggctcattctctcagatccagacacacttgcaccctttccaggatttctggcaatgctgcttctgataagaacatcaaggatggtgtctgtgcccagattgaaaagaactttgccagggccaagtggaaggtaaggcttggataactcccttcttggctctatcccaagtattgcttctggcactcagtttcttgcctgcatcacacccctgcagccacacacaagcttttctcaggccatcaggtgtgggtgtagccactgtgattaccttaagtaggagtgctgagcagctgagtacttggccctggggtggatggaggtggccgggggtactatggaaggagtttggtttggtcactgccaagcaatggatccagcaagcctcacccttagcctttctccactgtgctcctttcagaaggctgtccgagtgaccaccctcatgaaacggctccgggcaccagagcagtccagcacggctgcagcccagtcggcctcagccacagacactgccacccccggggctgcaggtggggccacagctgcagctgcgagtggagctacctcagcccctgagggtgatgctgctcgtgctgcaaagagtgataatgtggcccccgcagaccgtagtgccaccccagccacagatggaagtgccaccccagccactgatggcagtgtcaccccagccaccgatggaagcatcactccagccactgatgggagtgtcaccccagccactgacaggagcgctactccagccactgatgggagagccacaccagccacagaagagagcactgtgcccaccacccaaagcagtgccatgctggccaccaaggcagctgccacccctgagccggctatggcccagccggacagcacagccccagagggcgccacaggccaggctccaccctctagtaaaggggaagaggctgctggttatgcccaggagtctcaaagggaggaggccagctgagtaggcagcctggtgagggggggcaggggatgggcaggagggtgggagagtggatgaggggcttctcactgtacatagagtcactggcatgatgccctcgctcccccatgcccccacatcccagtggggcataactaggggtcacgggagagcagtctcgtctcctgtgtgtatgtgtgtgagtggtgggcaggccagtggcagggccggccccagcccctgcatggattccttgtggcttttctgtcttttgctagcttcaccagtttctgttccttgtgggatgctgctctagggatactcagggggctcctgctctccttccccttcccttcttgcctcaccattcccctaggcaggccctgcaggtcccacactctcccaggccctaaacttgggcggccttgccctgagagctggtcctccagcgaggccctgtcagcggtcttaggctcctgcacatgaaggtgtgtgcctgtggtgtgtgggctgctctaggagcagatacaggctggtatagaggatgcagaaaggtagggcagtatgtttaagtccagacttggcacatggctagggatactgctcactagctgtggaggtcctcaggagtggagagaatgagtaggagggcagaagcttccatttttgtccttcctaagaccctgttatttgtgttatttcctgcctttccgagtcctgcagtgggctgccctgtaccctgaacctcatgagcctctaagggaaaggaggaacaattaggacgtggcaatgagacctggcagggcagagtacaagcccagcacccagtgtcccagccttaatgggtccttaccatgggccaaacagggagggctgatacctccttgctcttcctagatgcccacctcctacaatctcagcccacaagtcctctccacctagggggcttgctgcatggcaataactcataatttgatttggaggtttgccctttacaggggcagattttctgctcagttcaacaatgaaatgaagaggaactccctctttctacagctcacttctatcagaggcccaggtgcctcagagccacattgagttgctttttctgggatgaggaagtagggttaaactccccagtttcctgagggaggctcctgacaggtgccctttgtcagaccctaccacagcctggataggcagccacattggtcctcgcccttgctcggcactccgtggtggtcctgcccttctccctgcatgcctgtgggtctgctctggtgtgtgaaggtcggtgggttaactgtgtgcctactgaacctggcaaataaacatcaccctgcaaagcctctggccaccctctcgcctttgcttcctctgtcctactggggaggagcccctggaaggcagtggggaagggagaggctgggagcaggttcacaagtagtggctgggagtagtagtgaacagtgccctgtggatttcttgggctgagggtgaagatcatcctcaccacagtgtattcctcaatggtggtggtggtgggggtcctctgaactctagaaatccatgtgagtagtgggtcttgggctgcatttggaccaaggaatactccctgggctgagagctcaagtaagggctgctgtttttgactcctgttgaccgaggagccttactcttgatttaggcatagagctggaatctacctgggccagccagcgcaaggacagaccctgctcatagccaaagatagcttccctgagctagggagagggtgtagggtgagcaatgcacaaagattctatgctgctctgtgttgattccttctttctgtgaacacctgtgctttccacctatgccccaaatgaaatctcactctgggtctatttcagctggagcagatcagctttatattatgggactatgcacagggtttcttctgggtagagggagtaacactgccacagatactaagcctaaaaacccaaaagttgacttactccagcccaggtgggcctgggtgaactcaccagggatgctgctctctgggaggacctcaaagataacctcctcaaggataacttctctgatgtgggaataataaaaaggatttgttagtctcta

SEQ ID NO: 5381 - DNA, 148 bp, Homo sapiens
aagccggacctgtagcagtttctttggctgcctgggccccttgagtccagccatcatgcctatccgtgctctgtgcactatctgctccgacttcttcgatcactcccgcgacgtggccgccatccactgcggccacaccttccacttg

SEQ ID NO: 5382 - DNA, 3915 bp, Homo sapiens; identical to SEQ ID NO: 5380

SEQ ID NO: 5383 - DNA, 148 bp, Homo sapiens; identical to SEQ ID NO: 5381

SEQ ID NO: 5384 - DNA, 20268 bp, Homo sapiens
attatagctacctgttaaagaatcatctggattatagaccagtggcactgttgtttcacaagatgatgtttgaaactattccaatgttcagtggcggaacttgcagtaagtgcttgaaattctcatccttccatgtattggaacagttttcttaaccatatctagaagtttacataaaaatttagaaagaaatttaccacatttgaaatttatgcaggagactatatttctgaagcatttgaacaaattaattagctttgttgttcaactcattgggctaaagaagccaaaagcaatgggttttaatgtagtcgaagccaaattatatttatgaaagaaatattctgtgttataaccaccaaatacagcccaattctgactagatgatggaagaacctgtcccatcagaggtccagcatgaggtccagcagaggtccaccagaggagttcagcaatttgctgctcttagggcagggatcaattccttaatatcttaggaagactaggtattgacagtaatggtgacaaagcaatgaaaaggaaaggaagaagtgataagacatggcagcaagctgaagtatgatgagtaaagaataggaatcaaagtatgtggagtgttagagaaaacctggatttagatccagattctagtcctatctctgtcattaatctattgcgtaaccctgagcatatcatctacctctctttgagtttgcttgtcaataaaatgaagagactttgaaatctgagacttcctggataagtactaaatacagattatgtcactgatgtctgcctctatttatttctcccttttaccctaatctctataagtctacctcagtcatcctgatcctattctacttctctgatgttgttgtcagataggtgtgatcatcctcatcagatcttttctgtattcttagagacagataactttatcaaagaccacagatttattagtatagcatgttaaagtcttctaaagagtctcattgatgctcttttcatctcagtacaatttttaaaactgctgaatgcaaggtactgagctgttggaagtgactgacagatgaatgtaacagattcatagagaaggaaaaaggaagaaaaactcatgctcttcctatagtattgatatcagtgtaagagccaagagaaaggtataaagtatcatgcagatattaagggaaagaaaacattcactttagtaatctttcctcattttctagtttcctcttatgtactatgatttaatactgtagtaaagttttaataaaatatgagctatatgtaattaagtgggaggttgtggggctaggcacgaggctcacacgtgtaaccccagcactttgggaggctgaggcaggcggatcgcttgatctcaggagttcgagaccagcctggacaacaaggtgaaaccccatctctactaaaaacacaaaaattagctgggcatagtggcacacacctgtagtcccagcttcttgggaggctgaggcaggagaatcgcttgaatccaggaggcagaggttgcagttagccgagatcatgccactgcactgcagcctggacatcggagcaagactttgtcttagaaataaataaataaatataaaataaaataaatgggaagttgtgtatataaattataaatgctacattcagaaaagcttttgaaggttgtcagacagtttcttaaaggaagttcaccagttctttattgaacattgaagaaaacatacagtttagactggcattaaaactgaaagaagtggccagacgcagtggtagacgcagtggttcacgcctgtaatcccagcactttgggaggtcaaggtggatggatcacctgaggtcaggagtttgagatcaggctggccgacatggtgaaaccctgtctctactaaaaatacaaaaattagccaggcatggtgatgcgtgcctgtagtcccagctacttgggaggctgaggcaggagaattgcttgaagccgaaggtggaggttgcagtgagccgagattgcgtcattgcactccagccagggcggtaagagtgaggctccgtcttaaaaaaaaaataagtaaataaattaaaaactactgaaagaagtattacaggcaatgggaaatagcttgagtggaagtgcagcagaaggaaaaagctggacaagaatgtagtgtcagagaataggtatggaacgtgtgagtgactgttagaggatcttgaatggggataacagacttgatttcataaatactgagatgtcatgataatacttgaggactaaaccatgttttaaggacagttgtatgcaaagttgtaatcgcaagaggaaaaaatagtggaaaagaaaccagtaataaaacttgccttaatgcaggtatgctaagacaatcaaatgggatttcattaattttttatttgccatttatagccaaagattttgtaaaagttttgagcccagtcaggtgaaatagtctcagaaagaaagaaaagtgaatctgagacttggagacattaatgttgatattttggttttaaacgtgttttaaatccggtaaaagtgagcttctcacatgacaatattcagtgggtacttgggagtatgggttcgaatctaggtaggagatatatcgatattttgggcatcatcaggaaagggagagtagttaagcctttcatataaataatggtgtggcgtttgggcatgggaagtcttggaggaaaggaagaaaaggagagggtgaggactgagataagaatggcaacttgggtttaggaagaagaagaggaatcaatgtagagaacagatagtgctgaaaaatacagcatcttctgtagggattggcagctttttcttgatttttgtcttaatatttctaagagatggaaaaagctactatattctagacatttaacagggttaaaaatgttactaaaagatgatcaatgtggttttcattcaagactataacaatatgtatatatccaaggaaatttaattctgacttaaaaaaattgttttgcttgtatagatttagggacacaagtgtaattttgttacatgcatagagtgtatagtttcaagtcagggcttttaggttgtccatcatctgaataatatacattgtacccattaagtaatttctcatcttctactcaccgtttcaagtctccactatttatcattccattctttacattctgattttcatttactaggtgtattagtctgtttttgcattgctttaaagaaatacctgagactgagtattaaacaggtttaacctgttttctttatgaattcttctttaattggctcatggttctgcacgctgtacagaaagcatagcagcatctgcttctggggaggcctcaggaagcctccaatcatggctgaaggcaaaaggggagcatggtgagaatgggagcaagaaagagaaggagtggtggggagaaggtgccacccacttttaaatgccagctcacttaccaccaagaggatggcccaagccattcatgtgggatctgcccccatgattcaagcttcttccaccaggccccacctctagcactggggattacaattcaacctgagatttgggagggaaagatatccaaactatatcactaggtctggatcttgttatttattttttggaacatagtcatatatatccaaggatatatattgtagaagtccacagaaccatactaatattggacttctgcttagttaggtcttatctatctgaaacatgatattcatattgcagagaagattattttctttagtgattgaggaaatctttactacttatacatttttaatataatactataatatttgaagatgcacattttagatgtagtttaattgaaacctggaaatactattaatttgctttttaaagtcctaaaatcaggattatcagattctgaattaatggagtttaaatcaaaaagattacaaggcagtttttcagttttattctggttaattttatcacagctttggaatcctactttgtttatttgcttcttgaagttagatttcccagtgaaatttcagtatcacataaagtcttatgaaatggctcattgcactttgaactttgagtcaaggaagtgaaatttattgatagattgttggtgtaatatttatcctgtttgtggtagcttttttgaataataagtgtcttagaagaccatgttggagtagcctgcatgcttttatcaaacatattaattatgtgatggctgatactgctttagatattacatagaaatagtagtaggtgtttactaaactggaaatttcatttaacttggtttagctttgccttgttctcagtcacattgataaaaatgtaagacttttgtttatcttttagaataatgacaccttttggtgctgagaattttttgttttatatatatatatatatatacgtaatataaatacaaaatatatttaaatatgtataatatttctcatacactttatgtaactttgtgttcctgtttctctattatcttggcatgttttcttcaaatggcacttcttaacctcctaaggttaataaatttctttgtaatggacttttgttttctaattcctcagcgtatgacaaatgaattatactttgtcaaattatttaggtaactttcagtttttgaagtcctgggatcataacattcatcagtctttaatttctgtcattaaggtcattagctataaatgaatttatgagtagatttaaaaaataaaacatacaatccttcccttaacacactttcccaccatttggttcaactgctagtgtaaaagcatgatgaattttgagaagttatattttaccagttactttattttttaccagttatttaaaacagacatgagccaaagccagaatacttgttaatgaaaatgaggtgttttggaggaaaggaaggttgtgctgcagtttttacttgaaatctgttacatttctttacagaaatttcaaatctcttgtttcctgttatgatggtggcattatatacctttaaaatgtgagctataggaaaatgaatgatggttaattttttaataaatatttagacttgtgtttttgaaattttttataacattgttataggttttatcctctttctcttgtgaacatgtagtgatttgtattttgtgatctttgccgcatgctagagacttaagaatactatagcaaatatctgtcttctttacatttaaaaatttttcgtgactactccctgttgatatctgtcttaaaagttacttttgatgtagttcacaaatgtaccagataattatttcatcgtttttaatgcttaaagtttttatttgtattaggatttttagtatgattttaatgttaaagttttgaagttactctgccactagaagtctaattttgggacttactattcatgaaataggaattgacttttatataagtaataggaccttattttgaaggttcaaactggagaaaatcttacattgtttatatttttatttcatttatttcagttgatttgcttgagatcaagattgcagatacagaatccatatttcgtgtatattgctgatattaatcattaaaatcgtttttgacagtttgacagttaaaggcatttcctgtgaaataatactggtatgtatttaaccatgcagatcctcagtttgtggtctgccagctaaaggtgaagatatattcctccaattcaggacccacacgacgggaagacaagttcatgtactttgagttccctcagccgttacctgtgtgtggtgatatcaaagtagagttcttccacaaacagaacaagatgctaaaaaaggtttgtactttactttcattgggagaaatatccaaaataaggacagattaaaagctatattttattttatgacatgtaaggaactataatttgttttctattagatctgcaggtgttttgcttactctggcattggtgagacattataagggtaaataatcctgtttgaaggaaaaggccttatggcattgtaacatgagaggaatttttcttaacaaggatggttaactgagaagaaattagcatgggaccaatattttaaaaattttggtctataggtagaaatgagatctgttctgtggtcttatgtagtgacacaaaccactttttctccattttggcttatgtttctttttctttccttttttttttttttcctttttgttagagacagggtcttgttctattgcccaggctgagtagctaagactacaagcatgtgccaccacacccagctaattttttttatttttatttttgtagggacagggtctcactatgttgcccaggctggtctcaaactcctgggcacaagcagtcctcacgctttggcatcccaaagagttggaattacaggtgtgcgccatcatgcctggccttaacgtttcttaagacttgattattttctatttagcttctgtggatttactgattaattttttaactaggagagaaatcagtatgaagaggaagtaataaagaatgaaaacatggtatttaaatgtgcaggtttagaaagttaatgaagtttgaatttgattgatctgtatttagagaaggcaacgtcttattattttaaaaccaactatccgccctgtgcggtggctcacgcctgtaattccagcactttgggaggctgaggtgggcagatcagctgaggtcaggagttcgagaccagcctggccaacatggttaaaccccatctctactaaaaatacaaaaaaattagccgggtgtggtggcaggcgcctgttttcccagctactcaggaggcttgaggcaggataattgctgaacccgagaggcggaggttgcagtaagccaagaatgcaccattgtactccagcctgggcaacaagagtgaaactccatctcaaaaaaaaagaaaaaaaaaacaacaactatcttcatttaaaatattaaatgtgaatatttaaagtgagactaaggtgcaacatttttagatagtaatgaagaaaaggactaactttgtagtgttgctgccttgttaaacatactagatagcatattgccaatctttaaacattctcaatgataggatttatttactttttctgatttttagcttttcttttgaaagaaaataagaggaagtttcatttactgcaaaattttaaatgctgctttgatgtatcagtagagatataattttcctttatccagaatccaagtagctggaaaaaaaaatcaaaatatgctgaacttttttttttttagccagaaacccatttcctatcgtctgtacaaataaaagttaaatatatctcaataacttagaaaaattattttttgataatccaggaagtattagcaactgttttaaaattaagataactagtaagttttatttagctttcaaaaataggcatctacatcatcatctctgcatacctttaggaatttcctaattcttatttcccttcatctgtactttaacacatgcaaaattgaaggttagattaaatatttatgatttatttgtttatccttgactacataaatttccattttattgattttccctgccttatttaagaatatgctatgattaaaacacaaaaaattttagtataacccatatatatatagaattcacctttttgttatttaaatattattggcttattttcttctaagtaaaatacaattactggctaaaataattgaaataagcaaaaaaaaaattttaaagaccttgtatacaagattactttgccaggtactgttaaaagatgcaatgacatttaagacgtaacatccttaaggatcttattttctgggggataaaaaactttaagataaattagaataaaagatttaaatggcattttaaggtaccaggtaccagataagatgtcacaaggctgtatatcattaattgccaaatgatttatacaggccagatttctttgttggtcaatagaggtttaaagtgatgaacttctgttgtgtttttttattaagaaggtattatcttattagtaagaagtgattttttttaagaacaagcattttataacatcaaaagaaatcagtagtactctttcctaccccctcatatttattctgaaagtattcaagcattatattgtcatgtaagaaactggagcttctcatgtttgtattgctgtagaagtaaacatgtatttgccatgcgtcatcagggaagttgcactcaccgtccaagaacttttgttaaagtaaatcttggaataggtagctcatttgaaatgtagaaaaaattaaatccatatctgaattttgtttatatgtatgtacacgtaaactaaaaacgtatttaaagctagtattagatgagaaaagaggtttttttacttaaaattttaaggcaaaagtagtttatcttagatcttgtgagattgtatttttggtttaaaatttgagaatttgagtgaagaaaaatcatgtgaatgaaaatgcaacagataactcagattgccttataatagtctttgtgtttacctttattcagaatatcaaatgatagtttattttgttgactttttgcaaatgtttaacataggtgacagattttcttttttaaaaaaataaaacatcattaattaaatatgtcatttcatttctttttcttttctttttttttttttttaggacaaaatgtttcacttttgggtaaatacattcttcataccaggaccagaggaaacctcagaaaaagtagaaaatggaagtctatgtgatcaagaaatcgatagcatttgcagtatagagcgtgcagataatgacaaggaatatctagtacttactttaacaaaaaatgatcttgacaaagcaaataaagacaaagccaaccgatacttttctccaaattttaaggtcagttaaattaaacattttgtgggggttggtgacttgtatgtatgtgatgtgtgtttaattctaggagtacagctgatgaagaacttgcttgacaagtttttaacttatgtattatttcgaagcagtgtttacgtagcagtaacatgaaagtttctaataaaatacccaatgtacacagcgtcaaaaaagctgcatttttccttttcctaattctttgttgtttgctgaaatctggggcaaaggtgcgggagggggctaaatgactgggatatgaagtaggaatgggagaggaaagaaatagatgggaactcagtcatttgggaatgattcatatggaatgtttttactgcttccactcctgtctgccttccaatttattctcaatccctcagagtgatcttaaaaatagacttgattgtgtcacttctgtttacactttataaggaccttgtgtttttttttttaccatgacctacaaggcccagcataatttagcacagggctacctcctacatcagcactagtcaccttctctccttgtttcttgagattcagtcatactggtctttcttcagttcttcaaaatgctaagcttctgcctcttctagtctttccagttattttccttctccctgtaccttttcatctcagccttttcccctgaccttccatagctatcttcatatttccagccttagcttcaatctcatattctctgaagtcctttgattgtcctcccgttattctttttttaaaaatcctatttccttatattgtatcttagaattatttggtttgtttcatttttgcctatgtgtgatatatgtatttctacataggtatatatatctacttatagacaagaattcttcagattaaaaaaatctgatttgtaaacattcccaagtggttgtttaccatttttttcttcccccttcctatttcttattctacctgattttcccctgttcattcaccacactcgtttctttctcttttttactctctcttaatttttcattcaatttttataacatgtaataaatctaactgtagcgtctgagtattaagaatattgctagtaatacttcacctgtaatcccagcactttgggaggctaaggcaggcggatcacttgaggcccaggagtttaagaccagccggccaatatggcgaaaccctatctgcactacaaatacaaaaattagctgggcatggtgtcgcacacctgtaatcccagctacttgggaggctgaggcacaagaattgcttgagcctgtgagatggaggttgcagtgagccgagatcacaccagtgcacgtgcacttcagcctgggcaacagagcaagactctgtcttaaaaaaaaaaaaaaaaaaaaatatatacacacacacacacacacacacacacacacacacacacactattactaccaatatacatacatatatgtatgtatgtatgtatgtatattggtagtaatagtaatacttgggcccctgcacgttttaagtgaaaatagatctaatattaaatgtctttagcccttaaattttttttaagtgttcagaagtttccctttaaaaaaatttttaatatataataattgtacatatttatgggatacagagtgatattttcatgtatgcagtgtgtgatgatcaaatcaggataattagcatatggatcacctcaaacatttgtcatttctttgtgttaggaacattcaaaattctgtcttctagctatttgaaaatatacagtaaattattgttgactagttacagttctatagaacactataatttattcctcctgtgtgtaattttttatcttttaaccaacatctccctatcctcccctcccactccctttcccggcctctaataaccacactcttatgagctcaacttttttagcttccatatatgagtgagaacatacggtatttatctttctgtacctgacttattttacttaacatcatgtcctccgggctagacattctctttagaatccacaggtttcctttcttttctctaaatctgcattttgctcagccattaacttttaaaatgtctttttccctttagttttattgttttctattttaatattgcaagatgttttatatttgtgattacaaataaaaactccattattagtaaacaaatacaatgtcatatagtagtaagtgctataaaaaatagacaggatagaaagtaatcttggtttgtatgttttttgttttttagcaaagatgattagagaaggcccaaccaagcagataacatttaagcagaggcctaaatcatataagtgagttatacaaatatctgggaaaagagttaagagtacagatgcaaaagcccttagacaagagaatgagcttggtatatctgaagagtggataagtcattttgactgaaacagagtggacaagaaaaccagtccaagtgtaaagatactagtgtgtgttcagcataggaaggatgtaatctgaattttgtgtttaatattccctgtgttcatgctttcaaaatacagatgagtgaggaaagtagggagaaggggtaataaaggaagctgagagatcagttaagaggtacttgaatagtttagtaaagatgagagaagatgtttgcttcttgttgcccctcactgcttagaatagtggcagtgaagggtaacaagaagctgtcagattaacttaaagagtttactgatgcagtggatgttggttgtaagagaagaattgataatgactcttggataataggggagggaggggctgtcaatataatataatgaagaagggatttgaagtcatttctgatttaaatctcacatccactacctacttttaatagatatgtagcctttaacaagttccctaacctttctgggccttagctacctccccttggaaatggaaatacctaacatgtaaggttgttttgacagttattttcactaggcatgtaaaggcacttgactctctgttatagaccactgtattatgttaatgtccctctccttcctccctttaggtaaagtttttagggctaataaatcccaaatatcaatgttgatcagtagtttgtgtttgtgtagtgttgtttatatcaaaaactacattgaagccgggcacagtggttcacgcctaaaatcgcaacactttgggaggccaaggtgggcctcccaccttgaactaaggagtttgagaccagcctgggcaacatggtgaaatcccatctctacaaaaaatataaaagctagctgggtgtggtggcatgcacctgtagtcctagctacttgggaggctgaggttgatcctgggagtttgagcctgcagtgagctgtgaagatgccactgcactctagtctgggtgacagagcaagaccctgtctcaaaaacacacacacacacacacacacacacaaagaaatacattgatttttcacataggtagtaagagaaacattctttttgaactcagctgtttgtgaattgaattttgtaattcaaatgctatattatgtaaactattgatgactttcaatctgcatttattttgtataattatttagttaatatttgccacttatattccttaaaaaataaaattgaggttgggcgtggtggctcacacttgtaatcccagcactttgggaggctgaggcaggcagattgcctgagctcaggagtttgagatcagcctgggcaacatcatgaaccccatttctactaaaatacaaaaaattatctgggcatggtggtgtacacctgtagccctagctgtttgggaggctaaggcacgagaattgcttgaacccgggaggcagaggttgcagtgagccaagatcatgccactgcactccagcttggcaacagagcaagactcttgtctccagaaataaaaataaataaattgtattaacatcctgatagtttatctgtttagtacctagcaagaaagaaaatgttgaacatcttaagaagagggtcatttaaaaggcctcttaaagatcatgtttgttacagtgcttaaaaattaatatgttcatctgcaaaatggaataaaaaatctgttaaaaatatatttcactaaatagtttaagatgagtcatatttgtgggttttcattttaaattttctttctctaggtgaagctgtacttcacaaaaacagtagaggagccgtcaaatccagaggctagcagttcaacttctgtaacaccagatgttagtgacaatgaacctgatcattatagatattctgacaccactgactctgatccagagaatgaaccttttgatgaagatcagcatacacaaattacaaaagtctgaatttttttttatcaagagggataaaacaccatgaaaataaacttgaataaactgaaaatggacctttttttttttaatggcaataggacattgtgtcagattaccagttataggaacaattctcttttcctgaccaatcttgttttaccctatacatccacagggttttgacacttgttgtccagttgaaaaaaggttgtgtagctgtgtcatgtatatacctttttgtgtcaaaaggacatttaaaattcaattaggattaataaagatggcactttcccgttttattccagttttataaaaagtggagacagactgatgtgtatacgtaggaattttttccttttgtgttctgtcaccaactgaagtggctaaagagctttgtgatatactggttcacatcctacccctttgcacttgtggcaacagataagtttgcagttggctaagagaggtttccgaagggttttgctacattctaatgcatgtattcgggttaggggaatggagggaatgctcagaaaggaaataattttatgctggactctggaccatataccatctccagctatttacacacacctttctttagcatgctacagttattaatctggacattcgaggaattggccgctgtcactgcttgttgtttgcgcatttttttttaaagcatattggtgctagaaaaggcagctaaaggaagtgaatctgtattggggtacaggaatgaaccttctgcaacatcttaagatccacaaatgaagggatataaaaataatgtcataggtaagaaacacagcaacaatgacttaaccatataaatgtggaggctatcaacaaagaatgggcttgaaacattataaaaattgacaatgatttattaaatatgttttctcaattgtaacgacttctccatctcctgtgtaatcaaggccagtgctaaaattcagatgctgttagtacctacatcagtcaacaacttacacttattttactagttttcaatcataatacctgctgtggatgcttcatgtgctgcctgcaagcttcttttttctcattaaatataaaatattttgtaatgctgcacagaaattttcaatttgagattctacagtaagcgttttttttctttgaagatttatgatgcacttattcaatagctgtcagccgttccacccttttgaccttacacattctattacaatgaattttgcagttttgcacattttttaaatgtcattaactgttagggaattttacttgaatactgaatacatataatgtttatattaaaaaggacatttgtgttaaaaaggaaattagagttgcagtaaactttcaatgctgcacacaaaaaaaagacatttgatttttcagtagaaattgtcctacatgtgctttattgatttgctattgaaagaatagggttttttttttttttttttttttttttaaatgtgcagtgttgaatcatttcttcatagtgctcccccgagttgggactagggcttcaatttcacttcttaaaaaaaatcatcatatatttgatatgcccagactgcatacgattttaagcggagtacaactactattgtaaagctaatgtgaagatattattaaaaaggtttttttttccagaaatttggtgtcttcaaattataccttcaccttgacatttgaatatccagccattttgtttcttaatggtataaaattccattttcaataacttattggtgctgaaattgttcactagctgtggtctgacctagttaatttacaaatacagattgaataggacctactagagcagcatttatagagtttgatggcaaatagattaggcagaacttcatctaaaatattcttagtaaataatgttgacacgttttccataccttgtcagtttcattcaacaatttttaaatttttaacaaagctcttaggatttacacatttatatttaaacattgatatatagagtattgattgattgctcataagttaaattggtaaagttagagacaactattctaacacctcaccattgaaatttatatgccaccttgtctttcataaaagctgaaaattgttacctaaaatgaaaatcaacttcatgttttgaagatagttataaatattgttctttgttacaatttcgggcaccgcatattaaaacgtaactttattgttccaatatgtaacatggagggccaggtcataaataatgacattataatgggcttttgcactgttattatttttcctttggaatgtgaaggtctgaatgagggttttgattttgaatgtttcaatgtttttgagaagccttgcttacattttatggtgtagtcattggaaatggaaaaatggcattatatatattatatatataaatatatattatacatactctccttactttatttcagttaccatccccatagaatttgacaagaattgctatgactgaaaggttttcgagtcctaattaaaactttatttatggcagtattcataattagcctgaaatgcattctgtaggtaatctctgagtttctggaatattttcttagactttttggatgtgcagcagcttacatgtctgaagttacttgaaggcatcacttttaagaaagcttacagttgggccctgtaccatcccaagtcctttgtagctcctcttgaacatgtttgccatacttttaaaagggtagttgaataaatagcatcaccattctttgctgtggcacaggttataaacttaagtggagtttaccggcagcatcaaatgtttcagctttaaaaaataaaagtagggtacaagtttaatgtttagttctagaaattttgtgcaatatgttcataacgatggctgtggttgccacaaagtgcctcgtttacctttaaatactgttaatgtgtcatgcatgcagatggaaggggtggaactgtgcactaaagtgggggctttaactgtagtatttggcagagttgccttctacctgccagttcaaaagttcaacctgttttcatatagaatatatatactaaaaaatttcagtctgttaaacagccttactctgattcagcctcttcagatactcttgtgctgtgcagcagtggctctgtgtgtaaatgctatgcactgaggatacacaaaaataccaatatgatgtgtacaggataatgcctcatcccaatcagatgtccatttgttattgtgtttgttaacaaccctttatctcttagtgttataaactccacttaaaactgattaaagtctcattcttgtcattgtgtgggtgttttattaaatgagagtttataattcaaattgcttaagtccattgaagttttaattaatgggcagccaaatgtgaatacaaagttttcagtttttttttttcctgctgtccttcaaagcctactgtttaaaaaaaaaaaaaaaaaaaaacatggcctgagagtagagtatctgtctactcatgtttaattaaggaaaaacacttatttttagggctttagtcatcacttcataaattgtataagcacattaaatagcgttctagtcctgaaaaagtccaagattcttagaaaattgtgcatatttttattatgacagatgtttgaagataattccccagaatggatttgatactttagatttcaattttgtggcttttgtctattattctgtactctgccatcagcatatggaaagcttcatttactcatcatgacttgtgccatataaaaattgatatttcggaatagtctaaaggactttttgtacttgaatttaatcatgttgtttctaatattcttaaaagcttgaagactaaagcatatcctttcaacaaagcatagtaaggtaataagaaagtgtagtttgtacaagtgttaaaaaaataaagtagacaatgttacagtgggacttattatttcaagtttacattttctccatgtaattttttaaaaagtaaatgaaaaaatgtgcaataatgtaaaatatgaagtgtatgtgtacacacattttatttttcggtatcttgggtatacgtatggttgaaaactactggagtctaaaagtattctaatttataagaagacattttggtgatgtttgaaaaatagaaatgtgctagttttgtttttatatcatgtcctttgtacgttgtaatatgagctggcttggttcagtaaatgccatcaccatttccattgagaatttaaaactcaccagtgtttaatatgcaggcttccaaaggcttatgaaaaaaatcaagacccttaaatctagttaatttgctgctaacatgaaactctttggttcttttatttttgccagataattagacacacatctaaagcttagtcttaaatggcttaagtgtagctattgattagtgctgttgctagttcagaaagaaatgtttgtgaatggaaacaagaatattcagtccaaactgttgtaaggacagtacctgaaaaccaggaaacaggataatggaaaaagtcttttaaagatgaaatgttggagccaactttcttatagaattaattgtatgtggctatagaaagcctaatgattgttgcttatttttgagagcatattattcttttatgaccataatcttgctgtttttccatcttccaaaagatcttccttctaatatgtatatcagaatgtgggtagccagtcagacaaattcatattggttggtagctttaaaaagtttgtaatgtgaagacaggaaaggacaaaatagtttgctttggtggtagtactctggttgttaagctaggtattttgagactacttccccatcacaacaacaataaaataatcactcataatcctatcacctggagacatagccatcgttaatatgttagtgactatacaatcatgttttcttctgtatatccatgtatattctttaaaaatgaaatttatactgtacctgatctcaaagctttttagcttagtatatctgtcatgaatttgtaggatgttccattgcatcagaaaacggacagtgatttgattactttctaatgccacagatgcagattacatgtagttattgagaatcctttcgaattcagtggcttaatcatgaatgtctaaatattgttgacattaggatgatacatgtaaattaaagttacatttgtttagcatagacaagcttaacattgtagatgtttctcttcaaaaatcatcttaaacatttgcatttggaattgtgttaaatagaatgtgtgaaacactgtattagtaaacttcatcacctttctacttccttatagtttgaacttttcagtttttgtagttcccaaacagttgctcaatttagagcaaattaatttaacacctgccaaaaaaaggctgctgttggcttatcagttgtctttaaattcaaatgctcatgtgacttttatcacatcaaaaaatatttcattaatgattcacctttagctctgaaaattaccgcgtttagtaattatagtgggcttataaaaacatgcaactctttttgatagttatttgagaattttggtgaaaaatatttagctgagggcagtatagaacttataaaccaatatattgatatttttaaaacatttttacatataagtaaactgccatctttgagcataactacatttaaaaataaagctgcatatttttaaatcaagtgtttaacaagaatttatattttttattttttaaaattaaaaataatttatatttcctctgttgcatgaggattctcatctgtgcttataatggttagagattttatttgtgtggaatgaagtgaggcttgtagtcatggttctagtgtttcagtttgccaagtctgtttactgcagtgaaattcatcaaatgtttcagtgtggttttctgtagcctatcatttactggctatttttttatgtacacctttaggattttctgcctactctatccagttgtccaaatgatatcctacattttacaaatgccctttcagtttctattttctttttccattaaattgccctcatgtcctaatgtgcagtttgtaagtgtgtgtgtgtgtgtctgtgtgtgtgtgaatttgattttcaagagtgctagacttccaatttgagagattaaataatttaattcaggcaaacatttttcattggaatttcacagttcattgtaatgaaaatgttaatcctggatgacctttgacatacagtaatgaatcttggatattaatgaatttgttagtagcatcttgatgtgtgttttaatgagttattttcaaagttgtgcattaaaccaaagttggcatactggaagtgtttatatcaagttccatttggctactgatggacaaaaaatagaaatgccttcctatggagagtatttttcctttaaaaaattaaaaaggttaattattttgactattcggttttaaactttttattcaacaaataccaagtccctgctgtatatatgggtttggaatacattagtgatcaaaacacaccctctatccctgcccttgaagagtttacactccagtagaggaaacagaatttacattaacaattataaattgtgatacatgctgtggaaagtgaggtgcatgtgataatggttatcaaacattatgctccccaaaatttccatcaccttgcagttgaatgaggcctatgtaactagtttattctaatgtaatacagaaagtagtgtgacactccactttctgtaaaggcaatgaaaaaaatttaccatccagtttcttcccctactgctgtgattaaggattttgcatgttctagatggtgcagctttgtcagcctgggtcttgagtgatactggagcagaactccctcaaattgttccttctgccacgctaaacttgttagatattagcataaataagaaataaaccatt

SEQ ID NO: 5385 - DNA, 4312 bp, Homo sapiens
aaatagtttaagatgagtcatatttgtgggttttcattttaaattttctttctctaggtgaagctgtacttcacaaaaacagtagaggagccgtcaaatccagaggctagcagttcaacttctgtaacaccagatgttagtgacaatgaacctgatcattatagatattctgacaccactgactctgatccagagaatgaaccttttgatgaagatcagcatacacaaattacaaaagtctgaatttttttttatcaagagggataaaacaccatgaaaataaacttgaataaactgaaaatggacctttttttttttaatggcaataggacattgtgtcagattaccagttataggaacaattctcttttcctgaccaatcttgttttaccctatacatccacagggttttgacacttgttgtccagttgaaaaaaggttgtgtagctgtgtcatgtatatacctttttgtgtcaaaaggacatttaaaattcaattaggattaataaagatggcactttcccgttttattccagttttataaaaagtggagacagactgatgtgtatacgtaggaattttttccttttgtgttctgtcaccaactgaagtggctaaagagctttgtgatatactggttcacatcctacccctttgcacttgtggcaacagataagtttgcagttggctaagagaggtttccgaagggttttgctacattctaatgcatgtattcgggttaggggaatggagggaatgctcagaaaggaaataattttatgctggactctggaccatataccatctccagctatttacacacacctttctttagcatgctacagttattaatctggacattcgaggaattggccgctgtcactgcttgttgtttgcgcatttttttttaaagcatattggtgctagaaaaggcagctaaaggaagtgaatctgtattggggtacaggaatgaaccttctgcaacatcttaagatccacaaatgaagggatataaaaataatgtcataggtaagaaacacagcaacaatgacttaaccatataaatgtggaggctatcaacaaagaatgggcttgaaacattataaaaattgacaatgatttattaaatatgttttctcaattgtaacgacttctccatctcctgtgtaatcaaggccagtgctaaaattcagatgctgttagtacctacatcagtcaacaacttacacttattttactagttttcaatcataatacctgctgtggatgcttcatgtgctgcctgcaagcttcttttttctcattaaatataaaatattttgtaatgctgcacagaaattttcaatttgagattctacagtaagcgttttttttctttgaagatttatgatgcacttattcaatagctgtcagccgttccacccttttgaccttacacattctattacaatgaattttgcagttttgcacattttttaaatgtcattaactgttagggaattttacttgaatactgaatacatataatgtttatattaaaaaggacatttgtgttaaaaaggaaattagagttgcagtaaactttcaatgctgcacacaaaaaaaagacatttgatttttcagtagaaattgtcctacatgtgctttattgatttgctattgaaagaatagggtttttttttttttttttttttttttttttaaatgtgcagtgttgaatcatttcttcatagtgctcccccgagttgggactagggcttcaatttcacttcttaaaaaaaatcatcatatatttgatatgcccagactgcatacgattttaagcggagtacaactactattgtaaagctaatgtgaagatattattaaaaaggtttttttttccagaaatttggtgtcttcaaattataccttcaccttgacatttgaatatccagccattttgtttcttaatggtataaaattccattttcaataacttattggtgctgaaattgttcactagctgtggtctgacctagttaatttacaaatacagattgaataggacctactagagcagcatttatagagtttgatggcaaatagattaggcagaacttcatctaaaatattcttagtaaataatgttgacacgttttccataccttgtcagtttcattcaacaatttttaaatttttaacaaagctcttaggatttacacatttatatttaaacattgatatatagagtattgattgattgctcataagttaaattggtaaagttagagacaactattctaacacctcaccattgaaatttatatgccaccttgtctttcataaaagctgaaaattgttacctaaaatgaaaatcaacttcatgttttgaagatagttataaatattgttctttgttacaatttcgggcaccgcatattaaaacgtaactttattgttccaatatgtaacatggagggccaggtcataaataatgacattataatgggcttttgcactgttattatttttcctttggaatgtgaaggtctgaatgagggttttgattttgaatgtttcaatgtttttgagaagccttgcttacattttatggtgtagtcattggaaatggaaaaatggcattatatatattatatatataaatatatattatacatactctccttactttatttcagttaccatccccatagaatttgacaagaattgctatgactgaaaggttttcgagtcctaattaaaactttatttatggcagtattcataattagcctgaaatgcattctgtaggtaatctctgagtttctggaatattttcttagactttttggatgtgcagcagcttacatgtctgaagttacttgaaggcatcacttttaagaaagcttacagttgggccctgtaccatcccaagtcctttgtagctcctcttgaacatgtttgccatacttttaaaagggtagttgaataaatagcatcaccattctttgctgtggcacaggttataaacttaagtggagtttaccggcagcatcaaatgtttcagctttaaaaaataaaagtagggtacaagtttaatgtttagttctagaaattttgtgcaatatgttcataacgatggctgtggttgccacaaagtgcctcgtttacctttaaatactgttaatgtgtcatgcatgcagatggaaggggtggaactgtgcactaaagtgggggctttaactgtagtatttggcagagttgccttctacctgccagttcaaaagttcaacctgttttcatatagaatatatatactaaaaaatttcagtctgttaaacagccttactctgattcagcctcttcagatactcttgtgctgtgcagcagtggctctgtgtgtaaatgctatgcactgaggatacacaaaaataccaatatgatgtgtacaggataatgcctcatcccaatcagatgtccatttgttattgtgtttgttaacaaccctttatctcttagtgttataaactccacttaaaactgattaaagtctcattcttgtcattgtgtgggtgttttattaaatgagagtttataattcaaattgcttaagtccattgaagttttaattaatgggcagccaaatgtgaatacaaagttttcagtttttttttttcctgctgtccttcaaagcctactgtttaaaaaaaaaaaaaaaaaaaaacatggcctgagagtagagtatctgtctactcatgtttaattaaggaaaaacacttatttttagggctttagtcatcacttcataaattgtataagcacattaaatagcgttctagtcctgaaaaagtccaagattcttagaaaattgtgcatatttttattatgacagatgtttgaagataattccccagaatggatttgatactttagatttcaattttgtggcttttgtctattattctgtactctgccatcagcatatggaaagcttcatttactcatcatgacttgtgccatataaaaattgatatttcggaatagtctaaaggactttttgtacttgaatttaatcatgttgtttctaatattcttaaaagcttgaagactaaagcatatcctttcaacaaagcatagtaaggtaataagaaagtgtagtttgtacaagtgttaaaaaaataaagtagacaatgttacagtgggacttattatttcaagtttacattttctccatgtaattttttaaaaagtaaatgaaaaaatgtgcaataatgtaaaatatgaagtgtatgtgtacacacattttatttttcggtatcttgggtatacg

SEQ ID NO: 5386 - DNA, 169 bp, Homo sapiens
ttttaagggaggagagttattctgatatcctttgtattgatattgctcttatttattattgagctggatttaagtattaatcatttaaggtcaaatttctaatgtatatatgttcttaaatggctacgacccagttaccatagcaatttagtgaaataactataatgga

SEQ ID NO: 5387 - DNA, 4826 bp, Homo sapiens
tttttttttttttttttttgagactgagtcttgctctgtcaccaggctggagcagtggtgcaatctcggttcactgcaacctccgcctcccgggttcaagtgattctcctgcctcagcctcccgagtagctgggattacaggtgtgtgccaccatgtccacctaatttttgtagtttttagtagagatgaggtttcaccatattgatcacgctggtctcaaactcctgacaggtgatccacccacctcggcctcccgaagtgctgggattacaggcatgagccaccacccccagcagacatacttcattatacagtgcaaaaaaagtcacattttaaaaatatcaccaccgagctcaccaggatagtctttacatattcggaagctgtcaagttcatggtagcaggtataagattttaaaaatactaattttggcttaaaagcttgaattttatcacttataacccacaggggtcatgggccacactttgaggatcactggtgttagaggtttggttggagagacgcaagtaagagaacatttccctaacatgcccaaacacattccttttcagagtgctgaaggaatttgaaaatgaggtctcagaattaccagcagtaattcctgataaattaagaaaaatgggagagagttcagagacaaagacatgagaaaagattgccataactctccagaaggatggattctgggtaatgaaggccagtatgtttaacactgattcccagaaaaagactttaatatattcagtagcagttagtttaagaacattagaagataattcggtgattaccagatgtcaatgagggctaggtaggtcatttcaaagccttctcaaatttcattttttctttatgatcacctgtcacagtgctttacgtgatgtacatacaaaaatatttgcataactgtataaaacagttgaataataactgtatagcatattgcttatataaactgcacaaatctcatttgaataaaaaccatttataaagtacttgcagtatgcaaaatgtgttgggcaaagggcaggtctgagaggcacacacgaggaaaactaaaacagaacagaagtctaatggtattttcaagtgttataaaatatgtgaagtctgccttgtgagagaaggtagcattggcttgtggaaagagcatagcacaggaaattagaacatctggttgctcatcctggctttaccatcaacttaatgaatgacctggagtaagttacttcacttcgagacctatgctctatatctgcaatattgaaaatgctggataagataatctctaaagccccagaaaaagatggagttgtactctttcactcccaggaacatatactggaacttatgagtagaactttggagagaccaagtttgcctcacaatgagtaatattctagttctgcactgtcgtatagtgacttcagtcactaagctacatgtctcctatggaagcacttgaaatggactggttcaaagtgagatttgctgtaagtatacatttacacatcagattttgaaaacttagtataaaaagtagaaggcaaaatatcttgtcaattttttagcattgattacatatgtgataatatttttgatatagtgagttacaattatatatataaattttttttttttttagatggggtttcactctgtcgcccaggctggggtgtggtggtgtgatcttggctcactataacctccaccacccaggctcaagccatcctcccacctcagcctctcaggtagctgggaccacagttgtgcaccaccatacatggctaattttctgcatttttggtagagatagggtttcaccatgttgcccaggctggtctcgaactgctgagctcaagtggtccaccttccttagcctcccagagtgctgggattacaggtatgagccacctcccagtctaaattaatatattttaaaaacatttcacctgatttcttttactttttaagatatatatggctaatggaacacttaaaattacatatatggctcatattatatttctactggacagggtaattctagctaatagagtttccaacaaaataataataacttgaagaggaacctaattttacttttcattttgcattttgaggtacacaagcagagactgggtcatagttctgacaagaggacctcacagaagactccatttggtgtgcatttgatctaaatttgtgttctcaatctgtgctcagatgaatgcttgggctccagcagcacccagatttgtcataggggaaggaggaggaggacaaagaggtctttctgtcttcccttcctctttcaaacagagagctgatcagtatgtattactgaataaatgaatgagtgtacaaaatatatttatgtatttcaggtaaaatggatgaagtttagggttcaggctttggaccaggtctggccgctggtttaattcttggtgccactgtttactagctctatgaccttacttactccctctgtgcctcagtttcttcatctgtaaatgtggggtttgcatgtacagttttgaatacagtatagtatatttccctagaaacatggcttgctcctaaacatttggcaatgctattgcataaattaatcttgcaagacaaaactacacacaacaagaaactcttatcttgcctgtaaacaggttgttaaacatgttctcacttccttctgtcaccacctgtacagcatgtttttgaaggaattccacagtgcttgtgattaaagcaaatttgtacactgcctggacacccttagcaacttgatcttatggtagaagaacaatttgtggagatttggagacttcatattcaataaggacctgttaggggcaaagtgatacaaggtgccttctctttacttttgcctttcccatccaaacatgaccctgaacatctggcagcatgaaaaggggacatgcttatccaatacacctgctagctgactgccaggattctaaaacttaggtccaaatggtgagtagtgtttgcttttgtaatctaacactagttgacatcctactacagttctcttccattccacagactttctttcttatttatttatttatttatttttgagacagagtctcatttcgtagcccaagctggagtgcagtggcgtgatctcgactcactgcaagcgttgcctctgggccttaagtgattctcctgcatcagcctcccaaacacctgggactcgaagtgtgtgccaccacacccagtaaatttttttttaatttttagtagagacggggtttcaccgtgttgccctggatggtcttgaactcctgagctcaggcgatccatctgcctcgccctcccaaagtgttggaattacaggcgtgagccactggatccagcttccacagactttctttgcgctgcttggtccaaccctcgcacctcttttattctcagaaacttcctttgccttctactgaatagagaaaattaaggctatcatgctgcctggactgcttcaacatcctgtccttcttttctctattatcaaccaactctctacctcccttgacctgcctccctctcattttagaggaaaaaaatatttcctttcttggttttttttttttttccccaagagggaatttcgctcctgttgcccagtcaggagtgcaatgtcacgagttcggctcactgcaacctctgcttcccgggttcaggtgattctcctgcctcaagcctcctgagtacttgggattacaggcatgcaccaccatgcccggctaatttttgcatttttagtagagacagggtttcaccatgttggtcaggctgctgttgaactcctgacctcaggtgatccgcccaccccagcctcccaaagtgctgggattacaggcgtgagccaccgtgcctggcctcccttcttgtttaaagctaacttttctacagtgctctttctttcccaggacaaagattgtgttttattggattatctctttctcttcttattttcaacatttgactctcttttggatcatttcttggagttgaaaaatattcttaaatctctccatttttatcaataaacagagaaaaaagaaagctttctctatcttgtattctatttagttatcactctcctctttctcttaaaactcaagttcaaaaaggaaaatctacccttgtctctacttcctcacatctcattcactaatttttctatttgtaatatctactattttaatttagttacaaatgcacatatgtgaaagaatatatgtaaaataatatatttaatatcaatttggatatattctatacccccctgacccaatcatttccactgaccttttccttccctccaccccaatcaccagctcccattgtaataggcttgattctgccatttccagttagcaaagatctcgcaaacctgtgttttccagcatccacctctctatcacctccagaattttcactcacttatttttttttattttttttttttattttttttttgagacggagtctcgctctgtcgcccaggatggagtgcagtggtgggatctcggctcactgcaagctccgcctcccgggttcacgccattctcctgcctcagcctcccaagtagctgggactacaggcgcccgccactacgcccggctaattttttgtatttttagtagagacggggtttcaccgttttagccgggatggtctcgatctcctgacctcgtgatccgcccgccttggcctcccaaagtgctgggattacaggcgtgagccatcgcgcccggcccactcacttattttta

SEQ ID NO: 5388 - DNA, 1363 bp, Homo sapiens
actaactgtaataaatgtatgacattattttgattgatacattaaaaaagagtttttagaacaaatatggcatttaactttattatttatttgcttttaagaaatattctttgtggaattgttgaataaactataaaatattattttgtattgcagctttaaagtggcacactccataataatctacttactagaaatagtggtgctaccacaaaaaatgttaaccatcagtaccattgtttgggagaaagaaacagatcaagaatgcatattattcagtgaccgctttcctagagttaaaatacctcctctttgtaaggtttgtaggtaaattgaggtataaactatggatgaaccaaataattagttcaaagtgttgtcatgattccaaatttgtggagtctggtgtttttaccatagaatgtgacagaagtacagtcatagctcagtagctatatgtatttgcctttatgttagaagagactttcttgagtgacatttttaaatagaggaggtattcactatgtttttctgtatcacagcagcattcctagtccttaggccctcggacagagtgaaatcatgagtatttatgagttcaatattgtcaaataaggctacagtatttgcttttttgtgtgaatgtattgcatataatgttcaagtagatgattttacatttatggacatataaaatgtctgattaccccattttatcagtcctgactgtacaagattgttgcaatttcagaatagcagttttataaattgatttatcttttaatctataacaatttgtgttagctgttcatttcaggattatattttctacaagttccacttgtgggactccttttgttgcccctatttttttttaaagaaggaagaaagaaaaataagtagcagtttaaaaatgagaatggagagaaaagaaaaagaatgaaaaggaaaggcagtaaagagggaaaaaaaggaaggatggaaggaatgaaggaaggaagggaggaaggggagaaggtaggaagaaagaaaggatgagagggaaggaagaatcagagtattagggtagttaacttacacatttgcattcttagtttaactgcaagtggtgtaactacgtttttcaatgatcgcatttgaaacataagtcctattataccattaagttcctattatgcagcaattatataataaaaagtactgcccaagttatagtaatgtggggtgtctctgagacactaaaagatttgagagggagaatttcaaacttaaagccacttttgggggggtttataacttaactgaaaaattaatgcttcatcataacatttaagctatatctagaaagtagactggagaactg

SEQ ID NO: 5389 - DNA, 5878 bp, Homo sapiens
cacgttgtcatatagcagaatcagatatgaacttcagtctgtctgactccaatgtcagtgctttccccgatgcacctggctaccttttgattattgtcaagatcctggaagacacaaattagattttgatttaatcttttccatttctttccagctccaagtacagcccagtatggaattaccgggagcgctgatgttcttttctcctgctggtaccttgtgttgacactgtcctctttcaccagcatattctacctgaagaatgccattctacaataaattcaaagacccataaaaggcttttaaggattctctgaaagtgctgatggctggatccaatctggtacagtttgttaaaagcagcgtgggatataatcagcagtgcttacatggggatgatcgccttctgtagaattgctcattatgtaaatactttaattctactcttttttgattagctacattaccttgtgaagcagtacacattgtcctttttttaagacgtgaaagctctgaaattacttttagaggatattaattgtgatttcatgtttgtaatctacaacttttcaaaagcattcagtcatggtctgctaggttgcaggctgtagtttacaaaaacgaatattgcagtgaatatgtgattctttaaggctgcaatacaagcattcagttccctgtttcaataagagtcaatccacatttacaaagatgcatttttttcttttttgataaaaaagcaaataatattgccttcagattatttcttcaaaatataacacatatctagatttttctgctcgcatgatattcaggtttcaggaatgagccttgtaatataactggctgtgcagctctgcttctctttcctgtaagttcagcatgggtgtgccttcatacaataatatttttctctttgtctccaactaatataaaatgttttgctaaatcttacaatttgaaagtaaaaataaaccagagtgatcaagttaaaccatacactatctctaagtaacgaaggagctattggactgtaaaaatctcttcctgcactgacaatggggtttgagaattttgccccacactaactcagttcttgtgatgagagacaatttaataacagtatagtaaatataccatatgatttctttagttgtagctaaatgttagatccaccgtgggaaatcattccctttaaaatgacagcacagtccactcaaaggattgcctagcaatacagcatcttttcctttcactagtccaagccaaaaattttaagatgatttgtcagaaagggcacaaagtcctatcacctaatattacaagagttggtaagcgctcatcattaattttattttgtggcagctaagttagtatgacagaggcagtgctcctgtggacaggagcattttgcatattttccatctgaaagtatcactcagttgatagtctggaatgcatgttatatattttaaaacttccaaaatatattataacaaacattctatatcggtatgtagcagaccaatctctaaaatagctaattcttcaataaaatctttctatatagccatttcagtgcaaacaagtaaaatcaaaaaagaccatcctttatttttccttacatgatatatgtaagatgcgatcaaataaagacaaaacaccagtgatgagaatatcttaagataagtaattatcaaattattgtgaatgttaaattatttctactataaagaagcaaaactacatttttgaaggaaaatgctgttactctaacattaatttacaggaatagtttgatggtttcactctttactaaagaaaggccatcaccttgaaagccattttacaggtttgatgaagttaccaatttcagtacacctaaatttctacaaatagtccccttttacaagttgtaacaacaaagaccctataataaaattagatacaagaaattttgcagtggttatacatatttgagatatctagtatgttgccctagcagggatggcttaaaaactgtgattttttttcttcaagtaaaacttagtcccaaagtacatcataaatcaattttaattagaaaaatgaatcttaaatgaggggacataagtatactctttccacaaaatggcaataataaggcataaagctagtaaatctactaactgtaataaatgtatgacattattttgattgatacattaaaaaagagtttttagaacaaatatggcatttaactttattatttatttgcttttaagaaatattctttgtggaattgttgaataaactataaaatattattttgtattgcagctttaaagtggcacactccataataatctacttactagaaatagtggtgctaccacaaaaaatgttaaccatcagtaccattgtttgggagaaagaaacagatcaagaatgcatattattcagtgaccgctttcctagagttaaaatacctcctctttgtaaggtttgtaggtaaattgaggtataaactatggatgaaccaaataattagttcaaagtgttgtcatgattccaaatttgtggagtctggtgtttttaccatagaatgtgacagaagtacagtcatagctcagtagctatatgtatttgcctttatgttagaagagactttcttgagtgacatttttaaatagaggaggtattcactatgtttttctgtatcacagcagcattcctagtccttaggccctcggacagagtgaaatcatgagtatttatgagttcaatattgtcaaataaggctacagtatttgcttttttgtgtgaatgtattgcatataatgttcaagtagatgattttacatttatggacatataaaatgtctgattaccccattttatcagtcctgactgtacaagattgttgcaatttcagaatagcagttttataaattgatttatcttttaatctataacaatttgtgttagctgttcatttcaggattatattttctacaagttccacttgtgggactccttttgttgcccctatttttttttaaagaaggaagaaagaaaaataagtagcagtttaaaaatgagaatggagagaaaagaaaaagaatgaaaaggaaaggcagtaaagagggaaaaaaaggaaggatggaaggaatgaaggaaggaagggaggaaggggagaaggtaggaagaaagaaaggatgagagggaaggaagaatcagagtattagggtagttaacttacacatttgcattcttagtttaactgcaagtggtgtaactacgtttttcaatgatcgcatttgaaacataagtcctattataccattaagttcctattatgcagcaattatataataaaaagtactgcccaagttatagtaatgtgggtgtttttgagacactaaaagatttgagagggagaatttcaaacttaaagccacttttggggggtttataacttaactgaaaaattaatgcttcatcataacatttaagctatatctagaaagtagactggagaactgagaaaattacccaggtaattcagggaaaaaaaaaaatatatatatatataaatacccctacatttgaagtcagaaaactctgaaaaactgaattatcaaagtcaatcatctataatgatcaaatttactgaacaattgttaatttatccattgtgcttagctttgtgacacagccaaaagttacctatttaatcttttcaataaaaattgttttttgaaatccagaaatgatttaaaaagaggtcaggtttttaactatttattgaagtatgtggatgtacagtatttcaatagatatgaatatgaataaatggtatgccttaagattctttgaatatgtatttactttaaagactggaaaaagctcttcctgtcttttagtaaaacatccatatttcataacctgatgtaaaatatgttgtactgtttccaataggtgaatataaactcagtttatcaattaaaatatgtatttgactcattttaaaactctattagcttaagagaaagaaggaagaaataataatttgaagatatttctgctattctctttatttcctgtattacactcatctttctgcttactctaaagcagtacagggtaaaaattctagatgctacagtttcaaatgactccacactatattctttcttgctgttgctgattcctaaaaggtttgatgagctgaactacatctaaactaaaaataaattttctggaaacattttattattaattatttagaacctttacctggtaaaatacagcagagttagcaacagagactaaatatcctgttgataaaatcctgatgatcttacaggctaaacaactgaaaactcaaacgcttgtaagagccaggcagagtgtaatttcttaacagctgggtataaaacaacgggcacctgaaggtattcagatacaatttccttaaaaataccttggtttccaagcaaaacacgttatttggctgagaacctttagtttgtaaataccaaaccataatatacaaatgagatctcaagccaaatgaattttttaagccctctttcccatatctgttcatctatgatagtcaactgaataaatgagaacaatgtgatagataaaacaacaaagcataaaaaagattcatgcttggttttataagctattttgaaatataagtatcattgctattctgagaaatctatatacaccaaagccctccctccacaaaaaaactggaaatgttctaataaatgtctgatttcccccacagcttcattatttcttcccttttcaacatctatcttatctatcttgcataaattacatcacagaaacagaaacatcaagtatcagacatggaaaaccagcacatgaaacagagctagtttccctctcaaaagaatagggcaaaacatagatgcttcaaaatcatatcttggtatacagaaaataattattcactttaacctgacagtcagaaatgtaagtaagaatttgtagagataattttccaaggtaattcattcaagttagtggaatttgatccaaacacccgtcaatgtactccctctgaactttccaagaatcatacaccttcacatttacattcactgtttttctagtaattccaaacttactcaaaagtatttcagaattgatatcactggtggaaagagagcaatttagcaaacaaatacatgctttccggtattcctagagaaaaggaaaagaggaatacgtctcattcttctccctagaagctctacccacagtcatcctaaagctagaccaatctctcccagggctttccttcagtctaagaaacatgcttcatttcagagacaattgtggcaactatagttttccccaaagggtcacaactacctctcctttgcattttacaatggagcacttttgcaagcgttgctattgtggctttctcaacactttcaaatacttaaaggagaaaatattactattgtcatgtattgatggtgaaaacgagattcagaaattttgagtcacttgctgaagattatacttcaactaagtggcagatctgagccaaatatgcaatgaaaaatgttcccaatttgtttccagtcccagactacctaggaaaaagaaaagcatataatcacattgctagcttcatagacaactatttgcatatttttatttatatatttatataaatataagcacattttaaatataaatatagatatttatgacatccttgtattttccaatacctgcagagggtatgagatttaaaggctaatcagattgtacatgtcatctaaaactttggaaacgtgaaactcacagtacagttgcctttggacacacagccttgggt

SEQ ID NO: 5390 - DNA, 1465 bp, Homo sapiens
cacgagggagatcagtgtgaagggcattgccaaagtggaatcagtaaggcttggcagttgaccttgtttgttggagagaagggataagattttaaagctacatgtctgaaagaatgatgctgctgattgaaataaaggaagaaaggatgcatttcgggctccaacctgtcctaggaaggcctagacctcaaacaccatcacctccatgcatttcctctttggctactatgtcttttccctgacttctgcctctccagctctctgggctgctgcttccacctgttcatctgacttagaccctccctgctgggtccttgttcacctactcatttggtgcttcgtctgccatcagtacctccattgcagctggtgggatgtcagtcaccatctcttatatttgcttcccactagaaagatcaagagaagttatttctttcccttgcgctccaatttttctctagacagttggtatccacaattttaaaaaatgttccatgttgtataaacaagcattcgctgagaggggctgttaatacacatcgtgccccttttataaaaattcatgcatggaatcctacattattatgcatcaaaatctccagaaatgtcttaggatttttgcagggagaatattaaatgcattgttttgctttgttttgaagagactagatgtgcagaggaagagaggtggcatggtgggagggtacatttgagttgtcaacagtctctgcagtgtcaggtcaattacatcagcacttggactggaccagggaaaggaatgattctgcttcctgggaatgtcagaaggacctgatgattatatttggcaaagccaggaggagtggctttgaatgtcattgctaagaattacactttgagtagcatttctggatgtctgagcttttcaaatgatacttcttttctgctgtggctttcctttctgttggactggttcccagagggtcctcttgtttgtccttgccctcgcttttatatcagttcatgttttctcttctgtcatcttccttcccagcgctgtttctccaccccctcctgctgcactcacaacagcttcccctctcctgtttagaggtggaagcatgtaagaatgcgtttgagggggatgcttgccaaaggacagcatattcaacatctggtatcaacaaggtaatgtttaaccttagactagccaaactagtgatgacctgcttccatgctgcatctgctgctttttgtgttgatgggactcagaaatcatgagaaaggtcttcagtgatccatgactgcaacaaattcttttcctaattgtgccgtatattatgcccctcaatacaacttactaatctctgcctcagtttctccatctgtgaaagtggtgtaatacttatctacctcccttgaatgttgtgaagattagtatatgttggtaaagcacttttaaaataaagaatgatataaagcattg

SEQ ID NO: 5391 - DNA, 1465 bp, Homo sapiens
cacgagggagatcagtgtgaagggcattgccaaagtggaatcagtaaggcttggcagttgaccttgtttgttggagagaagggataagattttaaagctacatgtctgaaagaatgatgctgctgattgaaataaaggaagaaaggatgcatttcgggctccaacctgtcctaggaaggcctagacctcaaacaccatcacctccatgcattttctctttggctactatgtcttttccctgacttctgcctctccagctctctgggctgctgcttccacctgttcatctgacttagaccctccctgctgggtccttgttcacctactcatttggtgcttcgtctgccatcagtacctccattgcagctggtgggatgtcagtcaccatctcttatatttgcttcccactagaaagatcaagagaagttatttctttcccttgcgctccaatttttctctagacagttggtatccacaattttaaaaaatgttccatgttgtataaacaagcattcgctgagaggggctgttaatacacatcgtgccccttttataaaaattcatgcatggaatcctacattattatgcatcaaaatctccagaaatgtcttaggatttttgcagggagaatattaaatgcattgttttgctttgttttgaagagactagatgtgcagaggaagagaggtggcatggtgggagggtacatttgagttgtcaacagtctctgcagtgtcaggtcaattacatcagcacttggactggaccagggaaaggaatgattctgcttcctgggaatgtcagaaggacctgatgattatatttggcaaagccaggaggagtggctttgaatgtcattgctaagaattacactttgagtagcatttctggatgtctgagcttttcaaatgatacttcttttctgctgtggctttcctttctgttggactggttcccagagggtcctcttgtttgtccttgccctcgcttttatatcagttcatgttttctcttctgtcatcttccttcccagcgctgtttctccaccccctcctgctgcactcacaacagcttcccctctcctgtttagaggtggaagcatgtaagaatgcgtttgagggggatgcttgccaaaggacagcatattcaacatctggtatcaacaaggtaatgtttaaccttagactagccaaactagtgatgacctgcttccatgctgcatctgctgctttttgtgttgatgggactcagaaatcatgagaaaggtcttcagtgatccatgactgcaacaaattcttttcctaattgtgccgtatattatgcccctcaatacaacttactaatctctgcctcagtttctccatctgtgaaagtggtgtaatacttatctacctcccttgaatgttgtgaagattagtatatgttggtaaagcacttttaaaataaagaatgatataaagcattg

SEQ ID NO: 5392 - DNA, 1464 bp, Homo sapiens
cacgagggagatcagtgtgaagggcattgccaaagtggaatcagtaaggcttggcagttgaccttgtttgttggagagaagggataagattttaaagctacatgtctgaaagaatgatgctgctgattgaaataaaggaagaaaggatgcatttcgggctccaacctgtctaggaaggcttagacctcaaacaccatcacctccatgcatttcctctttggctactatgtcttttccctgacttctgcctctccagctctctgggctgctgcttccacctgttcatctgacttagaccctccctgctgggtccttgttcacctactcatttggtgcttcgtctgccatcagtacctccattgcagctggtgggatgtcagtcaccatctcttatatttgcttcccactagaaagatcaagagaagttatttctttcccttgcgctccaatttttctctagacagttggtatccacaattttaaaaaatgttccatgttgtataaacaagcattcgctgagaggggctgttaatacacatcgtgccccttttataaaaattcatgcatggaatcctacattattatgcatcaaaatctccagaaatgtcttaggatttttgcagggagaatattaaatgcattgttttgctttgttttgaagagactagatgtgcagaggaagagaggtggcatggtgggagggtacatttgagttgtcaacagtctctgcagtgtcaggtcaattacatcagcacttggactggaccagggtaaggaatgattctgcttcctgggaatgtcagaaggacctgatgattatatttggcaaagccaggaggagtggctttgaatgtcattgctaagaattacactttgagtagcatttctggatgtctgagcttttcaaatgatacttcttttctgctgtggctttcctttctgttggactggttcccagagggtcctcttgtttgtccttgccctcgcttttatatcagttcatgttttctcttctgtcatcttccttcccagcgctgtttctccaccccctcctgctgcactcacaacagcttcccctctcctgtttagaggtggaagcatgtaagaatgcgtttgagggggatgcttgccaaaggacagcatattcaacatctggtatcaacaaggtaatgtttaaccttagactagccaaactagtgatgacctgcttccatgctgcatctgctgctttttgtgttgatgggactcagaaatcatgagaaaggtcttcagtgatccatgactgcaacaaattcttttcctaattgtgccgtatattatgcccctcaatacaacttactaatctctgcctcagtttctccatctgtgaaagtggtgtaatacttatctacctcccttgaatgttgtgaagattagtatatgttggtaaagcacttttaaaataaagaatgatataaagcattg

SEQ ID NO: 5393 - DNA, 565 bp, Homo sapiens
agcctgtgaagactagtcttctttgaaagaaaagatccttttgtaaggatttatgttcttaatttagtttttaccaaatggacccttttagagaaagaagcatcaggataaagtcccaatcttcagtggtttgtggaagagagaatctgatgattcatgccctcctaccctgttagaattaggacagggaatggcagaccctaaacatacatgtgaactgagcaaagattgcctttgcttcacctattgacacatttaagaacctcgttttatagagagtacggagtggggtctgagattctacatttcttacaagttcctggtttatgccagttctgtttgtctggtcaccacacttctgaatagcaaggtttcagaggactctatgaagtttttatttctcaaaaatttggcttaggtacatctttacatacagtggtgctagatattattctttcagaacttaaccatgcaacaatgcagaagaatacaaaaaatgcttgcacacagtagtgtattttaatggaactataaaagcattgaactgattcctaactttacatat

SEQ ID NO: 5394 - DNA, 565 bp, Homo sapiens; identical to SEQ ID NO: 5393

SEQ ID NO: 5395 - DNA, 240 bp, Homo sapiens
gatcacgaggtcaggagatcgagaccatcctggctaacacggtgaaaccccatctctaactaaaaatacaaaaaattacccgggcgtggtggcgggcacctgtagtcccagctactcgggaggctgaggcaggagaatggtgtgaacccaggagacggagcttgcaatgagccgagatcgcgccactgcactctagcctgggcgacagagcaagactccgtctcaaaaacaaaaaaaaaa

SEQ ID NO: 5396 - DNA, 1275 bp, Homo sapiens
cagaattcctttctcatatttcaagtgtccctgtgaattatgaggggaaaaaaatctttattaaagaaaaaagtgaaaataaatatgcatggatacttggatttttcttttagtaacaaagatatttaaattatttgtatacacacacacacacacacacacacacacacacacgtatctgtacctagaaatgtttataggggaggtcagttttctgaagattaaatgcagccctaatgtcagattaatgttataaacacatcgtttaatcacaagttttcagagagcaggctccacagatagtctctaactttctatcattacaaatcgctatttttatatcattgctaatttaaataataaagtaaattatgaagaggaatcattggttgcaagtcaccatgggagtttagtccctgtgaaaatataaagcatttaaataatttgtattcttttaccattttttattacatctctttaatttttgtcacttgaatatattaggatgatgatgatactataatcactggaacaaagacatttgcttggacatcttttcttttttcccccatttttgttctgttaataatttttaactatagcttttcctttcttgtccttatctgtcccttatcgatcatagatagtttcactactatttttaagtttttattgttaaattgaagatgaatctgtacagttacttgtgaattaagatgcagctaagttaaaatcaagtataattttgaagctgattttacatttaactagatgattaaatatattttttcaggtgcttcttcaatttaaatcaagttttatggtttcagcaaaatttagaaaatatgtactttacctaaaaacttttcttttagtgctttggatatatacagaagcttaaatgagtagagtatcccaaacatccagatgcttctcaaaatagcatttccggccgggcgcggtggctcacgcctgtaatcccagcactttgggaggccgaggcgggcggatcacgaggtcaggagatcgagaccatcccggctaaaacggtgaaaccccgtctctactaaaaatacaaaaaattagccgggcgtagtggcgggcgcctgtagtcccagctacttgggaggctgaggcaggagaatagcgtgaacccgggaggcggagcttgcagtgagccgagatcccgccactgcactccagcctgggcgacagagcgagactccgtctcaaaaaaaaaaaaaaaaaaaaaaaaaaaaaaaaaaaaaaaaaaaa

SEQ ID NO: 5397 - DNA, 242 bp, Homo sapiens
tcacgaggtcaggagatcgagaccatcctggctaacacggtgaaaccccgtctctactaaaaatacaaaaaattagccgggcgaggtggcgggcgcctgtagtcccagctactcgggaggctgaggcaggagaatggcgtgaaccccagggggcggagcctgcagtgagccgagattgcgccactgcactccagcctgggcgacagcgagactccgtctcaaaaaaaaaaaaaaaaaaaggc

SEQ ID NO: 5398 - DNA, 90 bp, Homo sapiens
gatcgcgccactgcactccagcctgggcggcagagagagactccgtctcaaaaaaaaaaaaaaaaaaaaaaaaaaaaaaaaaaaaaaaaa

SEQ ID NO: 5399 - DNA, 181 bp, Homo sapiens
aattagccgggcgtggtggcaggcgcctgtagtcccagctacttgggaggctgaggcaggagaatggcgtgaaccagggaggcggagcttgcagtgagctgagatcgcgccactgcactccagcctgggcgacagggcaagactccgtctcaaaaaaaaaaaaaaaaaaaaaaaaattgtg

SEQ ID NO: 5400 - DNA, 142 bp, Homo sapiens
cgggcgcctgtagtcccagctactcgggaggctgaggcaggagaatggcgtgaacccaggaggtggagcttgcagtgagccgagattgtgccactgaactccagcctgggcgacagagcgagactctgtctcaaaaaaacaa

SEQ ID NO: 5401 - DNA, 295 bp, Homo sapiens
ggccgggtgcagtggctcacacctgtaatcccagcactttgggaggctgaggtgggcagagcacgaggtcaggagatcgagaccatcctggctaacacggtgaaaccccatctctactaaaaatacaaaaaattagccaggcgtggtggcgggtgcctgtagtcccagctactcgggaggctgaggccagagaatggcgtgaacccgggaggcggagcttccagtgagccgagatcatgccactgcactccagcctgggcaacagagcgagactccgtctcaaaaaacaaaacaa

SEQ ID NO: 5402 - DNA, 319 bp, Homo sapiens
tttggccgggcgcggtggctcacgcctgtaatcccagcactttgggaggcagaggcgggcggatcatgaggtcaggagatcgagaccatcctggctaacacagtgaaaccccgcctctactaaaaatacaaaaaattagccgggcgtggtggcgggcgcctgtagtcccagctactcgggaggctgaggcgggagaatggcgtgaacccgggaggcggagcttgcagtgagccgagatcgcgccactgcactccagcctgggcgacagagcgagactccgtctcaaaaaaaaaaaagaaaaaaaaaaaaaagagcacaa

SEQ ID NO: 5403 - DNA, 316 bp, Homo sapiens
gaattcttggccgggcacggtggctcacgcctgtaatcccagcactttgggaggccgaggcgggcggatcacgaggtcaggagatcgagaccatcctggctaacacggtgaaaccccgtctctactaaaaatacaaaaaattagccgggcgtggtagcgggcgcctgtagtcccagctactcgggaggctgaggcaggagaatggcgtgaacctggcaggcggagcttgcagtgagccgagatcgcgccactgcactccagcctgggtgacagagcgagactccgtctcaaaaaaaaaaaaaaaaaaaaagaattc

SEQ ID NO: 5404 - DNA, 102 bp, Homo sapiens
gaggttgcagtgagctgagatcacgccactgcactccagcctgggtgacagagcaagactccatctcaaaaaaaaaaaaaaaaaaaaaaaaaactaataatc

SEQ ID NO: 5405 - DNA, 322 bp, Homo sapiens
taattacaaaaaaatcggccaggcgcggtggctcacgcctgtaatcccagcactttgggaggccgaggcgggcggatcacgaggtcaggagatcgagaccatcccggctaaaacggtgaaaccccgtctctactaaaaatacaaaaaattagccgggcgtagtggcgggcgcctgtagtcccagccacttgggaggctgaggcaggagaatggcgtgaacccgggaggcggagcttgcagcgagccgagatcccgccactgcactccagcctgggcgacagagcgagactccatctcaaaaaaaaaaaaaaaaaaaaaaaaa

SEQ ID NO: 5406 - DNA, 286 bp, Homo sapiens
cactttgggaggcccaggcgggcggatcccgaggtcaggagatccagaccatcctggctaacacggtgaaaccccgtctctactaaaaataccaaaaattagcccggcgtggtagcgggcgcctgtagtcccagctactcgggaggctgaggcaggagaatggcgtgaacccgggaggcggagcttgcagtgagccgagatcgcgccactgcactccagcctgggcgacagagcgagactccgtctcaaaaaaaaaaaaaaaagaaaagaaaaaaaaaaaaaaaga

SEQ ID NO: 5407 - DNA, 305 bp, Homo sapiens
gggcgcggtggctcacgcctgtaatcccagcactttgggaggccgaggcgggcggatcacgaggtcaggagatcgagaccatcccagctaaaacggtgaaaccccgtctctactaaaaatacaaaaaattagccgggcgtagtggcgggcacctgtagtcccagctacttgggaggctgaggcaggagaatggcgtgaacccgggaggcggagcttgcagtgagccgagatcccgccactgcactccagcctgggcgacagagcgagactccgtctcaaaaaaaaaaaaaaaaaaaaaaaagaaa

SEQ ID NO: 5408 - DNA, 284 bp, Homo sapiens
gctcacacctgtaatcccacactttgggaggccaaggtgggcagatcacgaggtcaggagatcgagaccatcctggccaacacggtgaaaccccatctctactaaaaatacaaaaaattagccgggcgtggtggcaggcacctgtagtcccaactacttgggaggctgaggcaggagaacagcgtgtacccaggaggcggagcttgcagtgagccaagattgcgccactgcactccagcctgggcgacagagggagactccgtctcaaaaaaaaaaaaaaaaga

SEQ ID NO: 5409 - DNA, 316 bp, Homo sapiens
aatttgttcaattcggccgggcgcggtggctcacgcctgtaatcccagcactttgggaggccgaggcgggcggatcacgaggtcaggagatcgagaccatcccggctaaaacggtgaaaccccgtctctactaaaaatacaaaaaattagccgggcgtagtggcgggcgcctgtagtcccagctacttgggaggctgaggcaggagaatggcgtgaacccgggaggcggagcttgcagtgagccgagatcccgccactgcactccagcctgggcgacagagcgagactccgtctcaaaaaaaaaaaaaaaaatttg

SEQ ID NO: 5410 - DNA, 283 bp, Homo sapiens
cgcctgtaatcccagcactttggaaggccgaggcggccggatcacgaggtcaggagatcaagaccatcctggctaacacggtgaaaccccgtctctactaaaaatacaaaaaattagccaggcgtggtggcgggggcctgtagtcccagctactcgggagactgaggcaggagaatggcgtgaacccgggaggtggagcctgcagtgagccgagatcgcgccactgcactccagcctgggcgacagagccagactccatctcaaaaaaaaaaaaaaaaaaaaa

SEQ ID NO: 5411 - DNA, 93 bp, Homo sapiens
aggcggagtttgcagtgaccggagatcgcgccactgcactccagcctgggtgacagagcaagactctgtctcaaaaaaaaaaaaaaaaaaaaa

SEQ ID NO: 5412 - DNA, 293 bp, Homo sapiens
gtggctcacgcctgtaatcccagcacttcgggaggccgaggtgggtggatcacgaggtcaggagatcgagaccatcctggctaacacggtgaaaccccgtctctactaaaaatacaaaaaattagctgggtgtggtggcgggcgcctgtagtcacagctacttgggagactgaggcaggagaatggcatgaacccgggaggtgcagcttgcagtgagcagagatctcgccactgcactccagcctgggcgacagagcgagacttcatctcaaaaaaaaaaagaaagaaagtaa

SEQ ID NO: 5413 - DNA, 295 bp, Homo sapiens
gtggctcatgcctgtaatcccagcactttgggaggctgaggcgggcggatcacaaggtcaggagattgagaccatcctggctaatatggtgaaaccccgtctctactaaaaatacaaaaaaattagccgggcgtggtggcacacgcctgtaatcccagctacttaggaggctgaggcaggagaatggtgtgaacccgggaggcggagcttgcagtgagccgagttcgggccactgcactccggcctgggcaacagagcgagactccgtctcaaaaaaaaaaaaaaaaaaaaaaaa

SEQ ID NO: 5414 - DNA, 170 bp, Homo sapiens
tcgggcgcctgtagtcccagctacttgggaggctgaggcaggagaatggcgtgaacccgggaggcggagcttgcagtgagccgagatcccgccactgcactccagcctgggcgacagagcgagactccgtctcacaaaataaaaaaaaaataaaataaaataaaataaaa

SEQ ID NO: 5415 - DNA, 109 bp, Homo sapiens
ggcgtgaacccaggaggcggagcttgcagtgagatgagatcgcgccactgcactccagcctgggcgacagagcaagactccatctcaaaaaaaaaaaaaaaaaaaggac

SEQ ID NO: 5416 - DNA, 263 bp, Homo sapiens
cccagcactttgggaggctgaggcaggcggatcacgaggtgaggagatcgagaccatcctggctaacacagtgaaaccccatctctactaaaaatacaaaaaattatccaggcgtggtggcgggcacctgtggtcccagctacttgggaggctgaggcaggagaatggcgtgaacctgggaggcggagcttgcagtgagccgagatggcgccactgcaccccagcctgggtgacagagcgagacacggtctcaaaaaaaaaaa

SEQ ID NO: 5417 - DNA, 300 bp, Homo sapiens
agcgcggtggctcacgcttgtaatcccagcactttgggaggccaaggcgggaggatcatgaggtcaggagatccggaccatcctggctaacatggtgaaaccccgtctctactaaaaatacaaaaaaattagccaggcgtggtggctggcgcctgtagtcccagctactcgggaggctgaggcaggagaatggcgtgaacccgggaggcggagcttgcagtgagccgagatcgcgccactgcactccagcctgggcgacagagcaagactccgtctcaaaaaaaaaaaaaaagtgcaaac

SEQ ID NO: 5418 - DNA, 226 bp, Homo sapiens
gagaccatcctggctaacacagtgaaaccctgtctctactaaaaatacaaaaaattagccgggcgtggtggcgggcgcctgtagtcccagctactcaggaggctgagacaggagaatggcgtgaacccgggaggcggagcttgcagtgagccgagatcgcgccactgcactccagcctgggccacagagtgaaactcagtctcaaaaaaacaaacaaacaaacaaa

SEQ ID NO: 5419 - DNA, 306 bp, Homo sapiens
tttaggccgggcgcgggggctcacgcctgtaatcccagcactttgggaggccgaggcgggcggatcacgaggtcaggagatcgagaccatcccggctaaaacggtgaaacccgtctctactaaaaatacaaaaaattagccgggcgtagtggcgggcgcctgtagtcccagctacttgggaggctgaggcaggagaatggcgtgaacccgggaggcggagcttgcagtgagcggagatcccgccactgcactccagcctgggcggcagagcgagactccgtctcaaaaaaaaaaaataataataat

SEQ ID NO: 5420 - DNA, 294 bp, Homo sapiens
gcgcggtggctcacgcctgtaatcccagcactttgggaggctgaggcgggcggatcacgaggtcaggagatcgagaccatcctggctaacacggtgaaaccccatctctactaaaaatacaaaaaattagccgggcgaggtggcgggtgcctgtagtcccagctactcgggaggctgaggcaggagaatggcgtgaacccgggaagcggagcttgcagtgagccgagattgcgccattgcactccagcctgggtgacagcgagactccgtctcaaaaaaaaaaaaaaaagaagt

SEQ ID NO: 5421 - DNA, 184 bp, Homo sapiens
cgtggtggcgggcgcctgtagtcccagctactcgggaggctgaggcaggagaatggcgtgaacctgggaggcggagcttgcagtgagccgagatcgcgccactgcactccagcctgggcgacagagcgagagtccgtctcaaaaaaaaaaaaaaaaaagaaaagaaaaaagaacaaacaacagc

SEQ ID NO: 5422 - DNA, 305 bp, Homo sapiens
tggctaggcacggtggctcacgcctggagtcccagcactttgggaggccgaggcgggcagatcacgaggtcaggagatcgagaccatcctggctaacacggtgaaaccctgtctctactaaaaatacaaaaaattagccaggcgtggtgtcgggcgcctgtaatcccagctactcgggaggctgaggcaggagaatggcatgaacccgggaggcggagcttgcagtgagcggagatggcaccactgcactccagcctgggcaacagagcgagactccgtcccaaaaaaaaaaaaaaaaaaaaaca

SEQ ID NO: 5423 - DNA, 258 bp, Homo sapiens
ccgaggcgggcggatcacgaggtcaggagatcgagaccatcctggctaacacggtgaaaccccgtctctactaaaaaaaacaaaaaattagccaggcgtgtggcggcaccctgcagtcccagctacttgggaggctgaggcaagagaatggcgtgaacccggaaggcggagcttgcagtgagccgagatcgcgccactgcactccagcctgggcgacagagcgagctccgtctcaaaaaaaaaaagaataaaaatgga

SEQ ID NO: 5424 - DNA, 299 bp, Homo sapiens
  SITE (18): n equals a,t,g, or c
  SITE (27): n equals a,t,g, or c
taatcccagcactttggnaggccgagncgggcggatcacgaggtcaggagatcgagaccatcccggctaaaacggtgaaaccccgtctctactaaaaatacaaaaaattagccgggcgtagtggcgggcgcctgtagtcccagctacttgggaggctgaggcaggagaatggcgtgaacccggaaggcggagcttgcagtgagccgagatcccgccactgcactccagcttgggcgacagagcgagactccgtctcaaaaaaaaaaaaaaaaacaaaacaaacaaacaaaaaaaaacaa

SEQ ID NO: 5425 - DNA, 147 bp, Homo sapiens; identical to SEQ ID NO: 5241

SEQ ID NO: 5426 - DNA, 312 bp, Homo sapiens
acaccaggccgggcacggtggctcatgcctgtaatcccagcactttgggaggccgagacgggcggatcacgaggtcaggagatcaagaccaacctggctaacacggtgaaaccccgtctctactaaaaatacaaaaaattagccgggcgtggtggcggtttgccttttgtcccagctactcgggaggctgaggcaagacaatggcgtgaccctgggaggcggagcttgcagtgagctgagatcgcgccactgcactccaccctgggtgacagagcgagactccgtctcaaaaaaaaaaaaaaaaaaaaaaaa

SEQ ID NO: 5427 - DNA, 169 bp, Homo sapiens
aaaattagccaggcgtgatggtgggtgcctgtagtcccagctacttgggaggctgaggcaggagaatggcgtgaacccaggaggtggagcttgcagtgagctgagatcgcgccactgcactccagcctgggcgacagagtgagactccatctcaaaaaaaaaaaaaaga

SEQ ID NO: 5428 - DNA, 278 bp, Homo sapiens
cccacactttgggaggccgaggcaggcagatcacgaggtcaggagatcgagaccatcttggctaacatggtgaaaccccgtctctactaaacaaaatacaaaaaattagccgggcgtgatggcgggcgcctgtggtcccagctactcgggaggctgaggcaggagaatggcatgaacccgggaggcagagcttgcagtgagccgagatcgcgccactgcactccagcctgggtgacagagtgagactccgtctcaaaaaaaaaaaaaaaaaaaaaaaa

SEQ ID NO: 5429 - DNA, 316 bp, Homo sapiens
tcagccggcgcggtggctcacgcctgtaatcccagcactttgggaggccgaggcgggcggatcacgaggtcaggagatcgagaccatcccggctaaaacggtgaaaccccgtctctactaaaaatacaaaaaattagccgggcgtagtggcgggcgcctgtggtcccagctacttgggaggctgaggcaggagaatggcgtgaacccgggaggcggagcttgcagtgagccgagatcccgccactgcactccagcctgggcgacagagcgagactccgtctcaaaaaaaaataaaataaaataaaaaaaaagaata

SEQ ID NO: 5430 - DNA, 293 bp, Homo sapiens
tggctcacgcctgtaatcccagcactttgggaggccaaggcgggcagatcatgaggtcaggaaatcgagaccatcctggttaacaaggtaaaaccccgtctctactaaaaatacaaaaaattagccaggtgtggtggcgggcgcctgtaatctcagctacttgggaggctgaggcaggagaacggcgtgaacctgggaggcggagcttgcagtgagccgagattgcgccactgcactccagcctgggggacagaccgagactctgtctcaaaaaaaaaaaaaaaaaaaaaaaa

SEQ ID NO: 5431 - DNA, 207 bp, Homo sapiens
attaaaaccccatctctactaaaaatacaaaaaattagctgggcgtgggtggcaggcgcctgtagtcccagctactctggaggctgaggcaggagaatggcatgaacctgggaggcggagcttgcagtgagccgagattgcgccactgcactccagcctgggtgacagagcgagactctgtctcaaaaaaaaaaaaaaaaagaaata

SEQ ID NO: 5432 - DNA, 131 bp, Homo sapiens
ggaggctgaggcaggagaatggcgtgaacccaggaggcggagcttgcagtgagctgagattgcgccactgcactccagcctgggcaacagagcgagactccgtctgaaaaaaaaaaaaacaaaaactggtg

SEQ ID NO: 5433 - DNA, 188 bp, Homo sapiens
ttaaaaatacaaaaaattagctgggcgtggtggcgggtgctgtagtcccagctactcaggaggctgaggcaggagaatggcgtgaacccaggaggcggagattgcagtgagccgagatcgcaccactgcactccagcctgggcaacagagcgagactccgtctcaaaaaaagaaaaaaaaaagaaagt

SEQ ID NO: 5434 - DNA, 241 bp, Homo sapiens
ggcggatcacgaggtcaggagattgagatcatcctggctaacacggtgaaaccccgtctctactaaaaaatacaaaaaattagccgggcgtggtggtgggcgcctgtagtcccagctacttgggaggctgaggcaggagaatggtgtgaacccgggaggcagagcttgcagtgagctgagatcatgccactgcactgtagccagggtgacagagtgagactccatctcaaaaaaaaaaaaa

SEQ ID NO: 5435 - DNA, 160 bp, Homo sapiens
  SITE (30): n equals a,t,g, or c
  SITE (82): n equals a,t,g, or c
ggtgggcgcctgtagtcccagctactcggnaggctgaggcaggagaatggcgtgaacccaggaggcggagcttgcagtgagntgagatcgcgccccctgcactccagcctgggtgacagagcgagactctgtctcaaaaaaaaaaaaaaaaaaaaaaagt

SEQ ID NO: 5436 - DNA, 227 bp, Homo sapiens
taagaccatcctggctaacacggtgaaaccccgtctctactaaaaatacaaaaattagccaggcgtggtggcgggcgcctgtagtcccagctacttgggaggctgaggcaggagaatggcatgaacccgggaggtggagcttgcagtgagctgagatcgcgccactgcactccagcctgggcaacagagcgagactctgtctcaaaaaaaaaaaaaaaaatcaagta

SEQ ID NO: 5437 - DNA, 68 bp, Homo sapiens
  SITE (28): n equals a,t,g, or c
cgcgccactgcactccagcctgggcgancagagcaagactccatctcaaaaagaaaaaaaaaaaaaaa

SEQ ID NO: 5438 - DNA, 235 bp, Homo sapiens
  SITE (230): n equals a,t,g, or c
agatggagcccatcctggctaacacggtgaaaccccgtctttactaaaaatacaaaaaattagccgggcgtggtggcggacgcctgtagtcccagctactcgggaggctgaggcaggagaatggcgtgaacccgggaggcggagcttgcagtgagccgagatcgcgccactgcactccagcctgggcgacagagcgagactccgtctcaaaaaaaaaaaaaaaaaaaaanaataa

SEQ ID NO: 5439 - DNA, 268 bp, Homo sapiens
ttgcgggggcccaggcaggcggatcacgaggtcaggagattgagaccatcctggctaacacggtgaaaccccgtctctactaaaaatacaaaaagattagctgggcgtggtggcgggcgcctgtagtcccagctacttgggagactgaggcagaagaacggcgtgaatctgggaggcggagcttgcagtgagccgagatcacaccacagcactccagcttgggcgacagagcgagactccgtctcaaaaaaaaaaaaaaaaaaaaaga

SEQ ID NO: 5440 - DNA, 127 bp, Homo sapiens
tgaggcaggagaatcgcttgaacccgggaggcagaggttgcagtgagccaagatcacgccactgcactccagcctgggcgacagaatgagactccatctcaaaaaaaaaaaaaaaaaaaaaaaaaag

SEQ ID NO: 5441 - DNA, 187 bp, Homo sapiens
cccatctctactaaaaatacaaaaaattagccaggcgtggtggcgggcgcctgtagtcccagctacttgggaggctgaggcaggagaatggtgtgaacccgggaggcggagcttgcagtgagccgagatcgcgccactgcgctccagcctgggcgacagagcgaaactccgtctaaaaaaaaaaaaa

SEQ ID NO: 5442 - DNA, 298 bp, Homo sapiens
gcggggctcacgcctgtaatcccagcactttgggaggctgaggcgggcagatcacaaggtcaggagatcgagaccatcctggctaacatggtgaaaccccatctctactaaaaatacaaaaaattagccgggcgtggtggcgggcccctgtagtcccagctatttgggaggctgaggcaggagaatggagtgaatccgggaggcagagcttgcagtgagctgagatcgtgccactgcattccagcctaggcgacagagccagactctgtctcaaaaaaaaaaaaaaaaaaaaaaaatt

SEQ ID NO: 5443 - DNA, 44 bp, Homo sapiens
gcaaaactccgtctcaaaaaaaaaaaaaaaaaaaaaaaaaaaga

SEQ ID NO: 5444 - DNA, 220 bp, Homo sapiens
taacacagtgaaaccccgtctctactaaaaatacaaaaattagccgggcctggtggtgggcgcctgtagtcccagctgctggggaggctgaggcaggagaatggcgtgaacccgggaggcggagcttgcagtgagccgagatggcgccactgcactccagcctgggcgacagagcgagactccttctcaaaaaaaaaaaaaaaaaaaaaaaagagagaaa

SEQ ID NO: 5445 - DNA, 306 bp, Homo sapiens
ccttccggctgggcacagtggcttacgcctgtaatcccagcactttgggaggccgaggcaggcggatcacgaggtcaggagatcgagaccatcctggctaacacggtgaaaccccgtctctactaaaaatacaaaaaattagctgggcgtggtggcaggcgcctgtagtcccagctactcaggaggctgaggcaggagaatggcatgaatccgggaggcagagcttgccgtgagctgagatcgtgccactgcactccagcctgggcgagagagcaagactccgtctcaaaaaaaaaaaaaaaagaa

SEQ ID NO: 5446 - DNA, 143 bp, Homo sapiens
gtagtcccagctactggggaggctgaggcaggagaatggcgtgaacctgggaggcggagcttgcagtgagccgagatcgcgccactgcactccagcctgggcgacagagcgagactccgtctcaaaaaaaaaaaaaagaaatg

SEQ ID NO: 5447 - DNA, 170 bp, Homo sapiens
gccgggcgtggtagcgggcgcctgtagtcccagctactcgggaggctgaggcaggagaatggcgtgaacccgggaggcggagcttgcagtgagccgagatctcgccactgcactccagcctgggcgacagagcgagactccgtctcaaaaaaaaaaaaaaaaaaagactg

SEQ ID NO: 5448 - DNA, 271 bp, Homo sapiens
cactttgggaggctgaggcgggcggatcacgaggtcaggaaatcgagtccatcctggctaacatggtgaaaccccgtctctactaaaaatacaaaaaattagccgggcgtgctggtgggcgtctgtagtcccagctactcaggaggctgaggcaggagaatggcgtgaacccgggaggcggaggttgcagtgagctgagatcgcgccacagcaactccagcctgggcgacagagcgagactctgtctcaaaaaaaaaaaaaaaaaagaaaa

SEQ ID NO: 5449 - DNA, 98 bp, Homo sapiens
cggagcttgcagtgagccgagatcgcgccactgcactccagcctgggcgacagagcgagactccgtctcaaaaaaaaaaaaaagaaaaccaagttaga

SEQ ID NO: 5450 - DNA, 296 bp, Homo sapiens
gcctgtaatcccagcactttgggaggctgaggcgggcggatcacgaggtcaggagatcgagatcattctggctaacatggtgaaaccccgtctctactaaaaatacaaaaaaaattagccgggcgtggtagcgggcgcctgtagtcccagctactcgggaggctgaggcaggagaatggcgtgaacccgggaggcgcagcttgcagtgagccaagacagcgccactgcagcccagcctgggcgaaagagcaagactctgtctcaaaaaaaaaaaaaaaaaaaaaaaaggaaggaaa

SEQ ID NO: 5451 - DNA, 135 bp, Homo sapiens
agactgagcaggagaatggcgtgaacccgggaggcggagcttgcagtgagcagagattgtgccactgcactccagcctgggtgacagagggagattctgtctcaaaaaaaaaaaaaaaaaaaaaaaaaaagaatc

SEQ ID NO: 5452 - DNA, 171 bp, Homo sapiens
aaaaaattagccgggtgtggtggcgggcgcctgtagtcccagctgctggggaggctgaggcaggagaatggcgtgaacccgggaggcggagcttgcagtgagccgagatcccgccactgcactccagcctgggtgacagagcgagactccatctcaaaaaaaaaaaaaaaa

SEQ ID NO: 5453 - DNA, 184 bp, Homo sapiens
aaatacaaaaaattagccaggcgtggtggcgggtgcctgtagtcccagctactcgggaggctgaggcaggagaatggcatgaacctgggaggcggagcttgcagtgagctgagatcgtgccactgcactccagcctgggcaacagagcaagaccccgtctcaaaaaaaaaaaaaaaaaaaggaa

SEQ ID NO: 5454 - DNA, 125 bp, Homo sapiens
ctgaggcaggagaatggcgtgaacccgggaggcggagcttgcagtgagccgagatggcgccactgcagtccagcctgggcgatagagcgagactctgtctcaaaaaaaaaaaaaaaaaaaaaatt

SEQ ID NO: 5455 - DNA, 196 bp, Homo sapiens
  SITE (106): n equals a,t,g, or c
tctactaaaaatacaaaaaattagccgggcgtagtggcgggcgcctgtagtcccagctacttgggaggctgaggcaggagaatggcgtgaacccgggaggcggacntgcagtgagccgagatcccgccactgcactccagcctgggcgacagagcgagactccgtctcaaaaaaaaaaaaaaaaaaaaaagaaata

SEQ ID NO: 5456 - DNA, 183 bp, Homo sapiens; identical to SEQ ID NO: 5243

SEQ ID NO: 5457 - DNA, 105 bp, Homo sapiens
ctggaacctgggaggcagagtttgcagtgagccgagatcaggccactgcactccagcctgggcaacagagcaagactctgtctcaaaaaaaaaaaaaaaaaaaag

SEQ ID NO: 5458 - DNA, 319 bp, Homo sapiens
aagaatagaaatcaggccgggcgcggtggctcacgcctgtaatcccagcactttgggaggccgaggccggcggatcacaaggtcaggagatcgagaccatcctggctaacatggtgaaaccccgtctgtactaaacatacaaaaagttagccgggcatggtggcgggcacctgccgtcccagctacttgggaggctgaggcaggagaatggcgtgaacccgggaggcggagcttgcagtgagccgagatggcgccactgcactccagcctgggcgacagagcgagactccgtctcaaaaagaaaaagaatagaaatcta

SEQ ID NO: 5459 - DNA, 307 bp, Homo sapiens
gggccgggcgcggtggctcacgcctgtaatcccagcactttgtgaggctgaagcgggctgatcacgaggtcaggagattgagaccatcctggctaaaacggggaaacccggtctctactaaaaatacaaaaaaattagccgggcatggcggcgggcacctgtagtcccagctacttgggaggctgagacaggagaatggcatgaacccgggaggcggagcttgcagtgagcctaaatcgcgccgctgtactccagcttgggcgacagagcgagactccgtctcaaaaaaaaaaaaaaaaaaaaaaaa

SEQ ID NO: 5460 - DNA, 311 bp, Homo sapiens
acattggttaggccgggcgcggtgcctcacacctgtaatcccagcactttgggaggccgaggcgggcggatcacgaggtcaggagatcgagaccatcctggctaacacggtgaaaccccgtctctactaaaaatacaaaaaattagctgggcatggtgacgggcgcttgtagccccagctactcgggaggctgaggcaggagaatggcgtgaacctgggaggcagagcttgcagtgagcagagatcacgccactgcactccagcctgggcgacagagcgagactccatctcaaaaaaaaagaagaaataca

SEQ ID NO: 5461 - DNA, 300 bp, Homo sapiens
gcgcggtggctcacgcctgtaatcccagcactttgggaggccgaggcgggtggatcacgaggtcaggagatcgagaccatcctggctaacacggtgaaaccccgtctccactaaaaatacaaaaaattctccgggcatggtggcgggcgcctgtagtcccagctactccagaggctgaggcaggagaatggcatgagcccaggaggcggagcatgcagcgagccgagatggaaccactgcactccagcctgggtgacagagcgagactccgtctcaaaaaaaaaaaaaaaaaaaccacac

SEQ ID NO: 5462 - DNA, 175 bp, Homo sapiens
cgggcgtagtggcgggcgcctgtagtcccagctacttgggaggctgaggcaggagaatggcgtgaacccgggaggcggagcttgcagtgagccgagattgcgccactgcactccagcctgggcgacagagcgagactccgtctcaaaaaaaaaaaaaaaaaaaaaaaaaaatcac

SEQ ID NO: 5463 - DNA, 196 bp, Homo sapiens
tctactgaaaatacagaaaaattagccgggcgtggtagcgggcgcctgtagtcccagctactcgggaggctgaggcaggagaatggcgtgaacccgggaggcggagcttgcagtgagccgagatcgcgccactgcactccagactgggcgacagagcgagactccgtctcaaaaaaaaaaaaaaaaaaaaaatgac

SEQ ID NO: 5464 - DNA, 277 bp, Homo sapiens
tgtaatcccagcactttgggaggccgaggcgggcggatcacgaggtcaggagatccagaccagcctggctaacatggtgaaaccccgtctctactaaaaatacaaataattagcctggcgtggtggtgggcacctgtagtcccagctactggggaggtgaggcaggagaatggcgtgaacccgggaggcggagcttgcagtgagccgagatcgcaccactgcactccagtctgggcgacagagcgagacaccgtcaaaaaaaaaaaaaaaaaaaaga

SEQ ID NO: 5465 - DNA, 159 bp, Homo sapiens
ctgtggtcccagctactcgggaggctgagggaggagaatggcgtgaacccaggaggcagagcttgcagtgagccgagatcgcgccactgcactccagcctgggtgacagagcgagactccgtctcaaaaaaaaaaaaaaagaaaagaaaaagaaaaata

SEQ ID NO: 5466 - DNA, 296 bp, Homo sapiens
gggtgcggtggctcatgcctgtaatcccagcactttgggaggccaaggcaggcggatcacgaggtcaggagatcaagaccatcctggctaacacggtgaaaccccgtctctactaaaaatacaaaaaattagctgggtgtggtggtgggtgcctgtagtcccagctactcgggaggctgaggcaggagaatggcatgaacccgggaggcagagcttacagtgagcctagattgcgccactgcactccagcctgggcaacagagcgagactccatctcaaaaaaaaaaaaaaaaagg

SEQ ID NO: 5467 - DNA, 219 bp, Homo sapiens
catcctggctaacacagtgaaaccccgtctctactaaaaatacaaaaaattagctgggcgtgctggtgggtgcctgtagtcccagctactcgggaggctgaggcaggagaatggcgtgaacccaggaggcggagcttgcagagagccgagatctcgccactgcactccagcctgggcgacagagcgagactccgtctcaaaaaaaaaagaaaaaagaaa

SEQ ID NO: 5468 - DNA, 301 bp, Homo sapiens
gccgggcgcggtggctcaagcctgtaatcccagcactttgggaggccgagacgggcggatcacgaggtcaggagatcgagaccatcctggctaacacggtgaaaccccgtctctactaaaaatacaaaaattagccgggcatggtggcgcgcgcctgtagtcccagctacacgggaggctgaggcaggagaatggcgtgaacccgggaggcggagcttgcagtgagtcgagatcgcgccactgcactccagcctgggtgacagagtgaaactccgtctcaaaaaaaaaaaaaaaagagaat

SEQ ID NO: 5469 - DNA, 154 bp, Homo sapiens
tggtagtcccagctactcggtaggctgaggcaggagaatggcttgaacccggtaggcggagcttgcagtgagccgagatcacgccactgcactccagcctgggccacagagcgagactccgtctcaaaaaaaaaaaaaaaaaagaaagaaattg

SEQ ID NO: 5470 - DNA, 2548 bp, Homo sapiens
agcttgcaaatggccgggcgcggtggctcacccctgtaatcccagcactttgggaggccaaggcgggcggatcacgaggtcaggagatcgagaccatcctggctaacacggtgaaaccccgtctctactaaaaatacaaaaaattagctggccatagtggcgggtgcctgtagtcccagctactcgggaggctgaggcaggagaatggcgtgaacccgggaggcggagcttgcagtgagccgagactgtgcccctgcactccagcctgggcgacagagagagactccgtctcaaaaaaaaaaaaagcttgcaaacgcagaaaagaatgaaaaacaatgaagatggtaaatatgtttataaacctgaattgatgctggctgcataaagcaataataataacatgaggttggaaatgaaattaaaacgtataacaacaatgacgtaaaagccaagacagtaaatggagtaaaagtgttccaaggttcttgcactatcctggaagaagataaattcctattagacttaaataagtcaagggtggatatagtaatccctgtagtattactaaaagaatagtgaaagggtgcataatttccaagccggtagagaaaaaatgtagaaaagttaaaaatatattatcaattcaaaagaaggcaagaaaggagagaaaagggaatatagagcacataaagagtgctctttcagcatacaaacatgctctggtatctctcactcttaaaattcttccttggcctattatttcttttcatactccacctcatttctctgctttccttcatagcgaaacttctagaaacagttgcccccaaaatgctatttctgctccctcaatctgttcactcccaccctattccaatataactttcctctctaccattccacaaagtcttctcacgtcaaagccactgatgatgactgaggatgactgaggagacaaatacaaagcatttagggctgggcgcggtggcttacgcctgtaatccagcactttggaaggccgaggcaggtggatcatgaggtcaggagctcaagaccagcctagccaacatggtgaaactccgtctctactaaaaatacaaaaattagccgggcatggtggcatgcgcctgtaatcccagctaccttgggaggctgaggccagagaatagcttgaacctgggaggcagaggttgcagtgagccaagttcatgccactgcactccagcctgggcaacagagcaagactccgtctcaaaaaaaaaaaaagaaagaacttaataaaattatagattcagactgaaatataccaatagttacagtgaatataaatggaaaagaaattctccagttaaaatacaagaattagtagacaggtttaaaaaacaaacaacatgctatttaccagagacagaggtaaggcataaggatacagtaaggcataaggatacaggtaaggcataaggatatggaaaaaaggatacagtaaaaggactgagaaatataaaattggaagactctaaaagaaagctgatatagctgtattttatatatatatgtgtgtatatatacgtgtatatatatgtatatatatagtgtgtgtatatatatatataaaataaaaggttggtttcctccttccttttaaagtatataattcaattttttttcagtatgttcaaaatattatgcagccatcaccactatataattcctagataaaatttactttaaggcaaaaattctttttttttttttttttttgagacccagtctcactctgttgcctaggctggagtgcagtgtcatgatctcagctcactgcaacctctgcctcccaggttcaagcaattcccctgcctcaacctcccgagtacctgggattacaggcgtgtaccaccattgcctggctaatttttgtagttttagtagagatggggtttccccatgttggccaggctagtctcaaactcctgacctcaggcaatccgcccacctctgcctcccaaagggctggcattacagctgagagccactgcgcccggccaaaaagtcttaaacccagaagatacaacaatcctaaattgctaaatctctaataacatagtctcaaagcacaagacgtaagaactgatagaactacaaagacaaatagaaaaagctacaagcctagtgggaaattttcaacaagcaaagagtatagaagatttgatttcaaaattcattaaggtagggccgggcatggtggctgatgcctgtaatctcagcactttgggaggctgagacgggcagatcatgaggtcaggaattccagaccatcctggctaacacagtgaaatgccgtctctactaaaaatacaaaaaattagctgggcgtggtggcaggtgcctgtagtcccagctactcgggaggctgaggcaggagaatggcatgaacccgggaggcggagcttgcagtcagccgagattgcgccactgcactccagcctgggaaacagagtgagactccatctcaaaaaaaaaaaaaaaaaaaaaaaaaaaaaaaaaattc

SEQ ID NO: 5471 - DNA, 6141 bp, Homo sapiens
agtggctgggcgcagtggctcacgcctgtaatcccagcactttgggaggccgaggcgggcggatcatgaggtcaggagatcgagaccatcctggctaacacggtgaaaccccgtctctactaaaaatacaaaaaaattagctgggcgtggtcgtgggcacctgtagtcccagctactcgggaggctgaggcaggagaatggcgtgaacctgggaggtgagcttgcagtgagccgagatcacgccactgcactccagcctgggcgacagagcgagactctgtctcaaaataaaaaacaccagatgttaaataaaatataattcacaaattttttaatgcatagatgaatgtacaaactaaaggaattttccaggagctggaaacaaagagcacttcagctagtgtaagctaacctgcagcttagcctgcggcagaaagaaactggcggtcttagtaattgaggcatttcaatttcagcttgcagagttggaggcaatattcctacataaaagtagacccacaaagggctagataagaaaagggataagatactgaagcatctctgtcatggatggggctgtaggggtatacgggagtaggagaggagaaatcttctcatgaccacaatcccaagtgggtaataaggtttgagtttacactacctgaatattgctgagaaattaatataaaaaaacgagcacaagcctatggaaacctctggagcacttcacagaagcgaatacaaaaccgcctcagggacacgccaatccattctaaaatgaattctcagaaaaataagccctgctaaagttgacttcacaatccaaaactgcccccactcaacataacacacataataagatcagataaagaccacaaaataattacttttaaagaagaaaaaaaataggaatatctggaaaagaagcaaataaaaagttcagacatttaaaaatgtatcactgaaattaaagacagtccaagagcagatttagacccagttggctgggtacggtggctcacacctataatcccagcactttggaaggctgaggtgggtggatcacctgaggtcaggagtttgagaccagcctgtccaacatggtgaaatcccttctctactaaaaatacaaaaacttagacgggcatagtggtgggcctctgtaatcccagctactcaggaggctgaggcaggagagtcacttgaacccaggaggcagaggttgcagtgagctgagatcatgccactgcactccagcctaggcaacaagagcgaaactgtctcaaaaaagaaaagaaaagaaaaagatttagacccagttaaagagaaataggccagacatagtggttcattcctgtaatctaagcactttaggatgcctgggcaggaggatcaaggcaatgtagtgagaccatgtgtctacaaaaaataaaaaaattagctgggtgtgatgctacatagtcccagctattcaggaggctgaagtgggagagtcacctgagcccaggttgaagcagcagtgagctgtgactgtgccactgcactccagcctgggcgacagagtgagaccctgtttcaaaaaaaaaagtaaaagaaaaattacctatcaagaaatgataattaggctgacagtagaccccaacagcaacaatagaaaataatgaaaatggccaggtgtcgtggctcatgcctgtaatcccagcactctgggaggctgaggcgaacatctaaggtcaggactttgagacccagaatggccaacatgatgaaacccggtttctactaaaaatacacaaaaaattagccaggtatggtggtgcatgcctatagtcccagctacccaggaggctgaggcaggggaaccccttgaacctatgaggcagagatcacgccactgcactccagtctgggcgacagagactgtctccaaaaaaaaaaaaaaaaaaaaaaaactaaaagaaaatatttttctcccaaatgctaaaataaagtaagtaactatctggaattctacatccagctatattattatttaagagtaagaataggggtggggtgacaaagagattttgtcagtaatgcactatcaaaacctgaatccagaaaaggagtggtgggggttaaaaaaaagaaaaaaaaaaaaaaaacaagcagtgatgagcaaagaaaatggtattcagcaaattgaggccaggcgccgtggctcacgcctgtaatcccagcactttgggaggccaaggcgggtggatcatgaggtccggagatcgagaccatcctggctaacacagtgaaaccccgtctctactaaaaatacaaaaaaatttagccgggcatggtggcgggcgcctgtagtcccagctacttgggaggctgaggcaggagaatggcgtgaacccgggaggcagagcttgcagcgagccaagagtgcaccactgcactccagcctgggtgacagagcgagactccatctcaaaaaaaaaaaaaaaatggtatttagcaaattgaaataagccttgactgtaaaatagtaacacctaaactatctttaaggatatgaaaacaaggtagaactaaaatatatttattagtcatgttcttggatagaaatactcatttgtggctgaacatggtggctcatgcctgtaatcctagcactttgggaggctgatgcaagaggatcactcaagcccaggagttcacaaccagcctgggcaacatagcaagaccctgttgctttttgttttgaggtgtttttttttttaatttaaaagaaaaaaaattaaatactttttttaaagaaatactcatttgtcatagggatgggaattatctttaggttgacttataaatctaacatgatgctgataaaaatactgtaagggttgctctttttggggagaaccccaggcatggtggtgtatacccatagtcccagctatttgggaggctgaggtgacagcatcacctgagctgagactgcagtgagctgtgatcaagccgctgcacttcagccttggcaatgaagtgagaccctgtctcaaaaataaaataaattaaactaaattaaaattaaataaattttaaaaataaaataaaataagatgcttacccttctagttgttgtgaagattaaatgagttattcataaagtgcttacaacattgcctggcacataataagtactcaactgaattctagtttcggttagtttctcctgttataactgtatgagtctgtttcagggctattctgatccaatcatctgctatctatctattcatacgtcagaaccactcatggcaccattttacaatgttaagagaagtctatgtgcaagctcctaaaaaccacatttctttccttctttcttatcttagagacaggagtcttgctctgttccccaggctggaagtaggcagttgcctgatcatggctcactgtggccttgaattcctgcacaagtgatcctcctatcttggcctcccaaagtgctgggaatacaagtctgagccaccaggctgagcccataaaaaacatttttctggccagatgcagtgtctcatgcttgtaattccaacactttgggaggctgaggcgggcagatcacctgaggtcacaagttcgagaccagcctggccaacatggtgaaactctgtctctaacaaaaatacaaaaattagccaggtgtggtggtgggcacctgtaatcccagctactcgggaggctgaggcaggagaattgcttgaacccaggaggcagaggttgcagtgagccaagatagcaccattgcactcccgcctgggcaacaagagtgaaactccgtctcagaaaaaaacaaacaaacatttttgttagttctttcctgttgattctgtcagataaactttagaataattttcagatcctccatctcttacctattcagttgaattatattacattaataaactgaaaagaaatgacatctatatatctaataggtcattccatcttagaaaatggaatggtctcataattatttcaggcttttaaattatctcatagtttactgcatgtctcattacctgttaaaggcattttaaaatactttatgtttttgttaataaagtgagtggtggtatattttcccttattacattttctgatttttgctggcattataaaactattgggttttatacacttgctttacagctagtcaacaagctaaacttttaattctaaaaagtgtctcttgggttttcttgtgtaaaataaatagctatatctcctatatacaatgaaaaattgtataacagtctcaacaagggatatcaacggaaaatctcaaggggatttatttttttaagacagagtgcagtggcactaacatagatcactgcagactcgaaatctgagcttaagggatacttccactttggcttcactagatggatgccacacatacctggctaattttttttttaatgtaaaaaacatgggtggggtcttgctatgttgccctggctggtctcaaactcctggcctcaagcgatctcctgcctcggcctcccaaagtgctgtaatcccagcactttgggagacacctcacctggcctcaaaagggattttaaattgcaaaacatgcagaaatatttaatctgtctgggaaataacccctgactcctggcctcccagtctcccagagaccattacacagaagcaggtccatgttttactaaaggaagagtgtcagcaataaactgttgagtgaaaagaccaagctataggacagcatgcacagaatgagcccactttgttaaaaaatatatttcatatatacagcacatactaaatatagcatggatatagaaaagtatctgggagattaggtatcaaattattaacggtgcttgtctgtggggaatacaagtaggagcaaacttttactttttattttgcttgctatctacccccaaatagattactaattctgaagcattgctttaagctagtaatatcttttttcagtttctttttaaacacacctaaattcagaggacagaggtagacaatttttgcacatccatcttgaacttaatcattacacagaaaaatagctggaaaactattatgttttgaatatatgttgaatacatacgatttttactgcagacatgatacatagcccatagtgcccagagctgaacctctggttgagagaagttgccaaggagcgggaaaaatgtcttgaaagatctaaaacaaaaaaaagtacaaagatgttaatccagaacagttaggccagtgctcagggatataataatttgtactatataattaatataataatgtatataattttcacagccgggcatggtggctcatgcctgtaatcccagcactttgggaggccaaggtaggtggattgcttgagcttaggaattcgggaccagcctaggcaacaaggtgagcccccgtctctacaaaaaaaaaaaaaaaaaaaaaaaaaaaattagctgggcctggtggcacacgcctgtagggccaagtgggaggatcctcaagtgggaggatcacttgagcctgggaagtcaaggctgcattgagatgtgatcccgccactgcattccagctccagcctgggcaacagagagagaccctgactcaaaaggttgaaaaaaaaagaattttcaaattttaaacattttccccacagggtcaacttctccctgtgaccgagcatacaatgaagctattatttaagaaattgcattctgtattaaaccctttattatgatcagtatctcattgcatcctcaatcttgcacactgtcagcctcattttacagacaaggaaagctgaccttctagaaatgactttcccaatatcagagaaataggatttgaacataaggctaactgactctaacacgttatcactgtatcactgagtacagcctttaagaaaagctcaacactgggccaggcacggtggctcacgcctgtaatcccagcactttaggaggccgaggcgggcagatcacgaggtcaggagatcgagaccatcctggctaacatggtgaaaccccgtctccactaaaaatacaaaaaattagccgggcatggtggcgggtgcctgtagtcccagctactcgggag

SEQ ID NO: 5472 - DNA, 169 bp, Homo sapiens
aatacaaaaaattagccaggcgtggtcgcgggtgcctgtagtcccagctactcaggaggctgaggcaggagaatggcgtgaacccgggaggcggagcttgcagtgagcagagattgcgccactgcactccagcctgggcgacagagtgagactccgtctcaaaaaagaa

SEQ ID NO: 5473 - DNA, 176 bp, Homo sapiens
cgggtgtggtggagggcacctgtagtcccagctactcgggaggctgaggcaggagaatggcgtgaacccaggaggcggagcttgcagtgagctgagatcgtgccactacactccagcctgggcaacagagcgaaactccgtctcaaaaaaaaaaaaaaaaaaaaaaaaaaagtcca

SEQ ID NO: 5474 - DNA, 207 bp, Homo sapiens
aaccccgtctctactaaaaatacaaaaaaatagccgggcgtagtggcgggcgcctgtagtcccagctacttgggaggctgaggcaggagaatggcgtgaacccgggaggcggagcttgcagtgagcccagatcccgccactgcactccagcctgggcgacagagcgagactccgtctcaaaaaaaaaaaaaaaaaaaaaagactgcg

SEQ ID NO: 5475 - DNA, 230 bp, Homo sapiens
ccatcttggttaacacggtgaaacccggtctctactaaaaatccaaaaaattagccgggcgtggtagcgggcgcctgtagtcccagctactcgggaggttgaggcaggagaatggcgtgaacccgggaggcggagcttgcagtgagccgagatcgcgccactgcactccagcttgggcgacagagcgagactccgtctcaaaaaaaaaaaaaaaaaaaaaaaaagaataa

SEQ ID NO: 5476 - DNA, 288 bp, Homo sapiens
tcacgcctgtaatcccagcactttgggaggccgaggcaggtggatcacaaggttaggagatagagaccatcctggctaacacggtgaaaccccgtctctaccaaaaatacaaaaaattagccgggcgtggtggcgggcgcctgtagtcccagctactccggaggctgaggcaggagaatggcgtgaacccaggaggtggagcttgcagtgagccgagatcgcgccactgcacgccagcctgggtgatgacagagactccgtctcaaaaaaaaaaaaaaaaaaaaaaaa

SEQ ID NO: 5477 - DNA, 282 bp, Homo sapiens
cctgtaatcccagcactttaggaggacgaggtgggcggatcacaaggtcaggagatcgagaccatcctggctaacatggtgaaaccccgtctctactaaaaatacaaaaaattagccgggcgtggtggcgggcgcctgtagccccagctactccggaggctgaggcagaagaatggcttgaaccgggaggcggagcttgcagtgagccaagatcgcaccactgcactccagcctgggtgacagagcgagactccgcctcaaaaaaaaaaaaaaaaaaaaaaa

SEQ ID NO: 5478 - DNA, 275 bp, Homo sapiens
ccctttgggaggccgaggcaggcggatcatgaggtcaggagatcgagaccatcctggctaacacggtgaaaccccgtctctactaaaaatacaaaaaaaaatgccaggtgtggtggtgggcgcctgtagtcccagctacttgggaggctgaggcaggagaatggcgtgaaccaggaaggcggagcttgctgtgagccgacctcgcaccactgcactccagcctgggcgacagagtgagactccgtctcaaaaaaaaaaaaaaaaaaaaaaaaaaa

SEQ ID NO: 5479 - DNA, 189 bp, Homo sapiens
caaaaaaattagcggggcgtagtggcgggcgcctgtagtcccagctacttgggaggctgaggcaggagaatggcgtgaacccgggaggcggagcttgcagtgagccgagatcccgccactgcactccagcctgggcgacagagcgagactccgtctcaaaaaaaaaaaaaaaaaaaaaaagaaatgaca

SEQ ID NO: 5480 - DNA, 207 bp, Homo sapiens
aaccccatctctattaaaatacaaaaattagccgggcgtggtggcgggcgcctgtagtcccagctacttgggaggctgaggcaggagaatggcgtgaacccgggaggcggagcttgcagtgagccgagatcccgccactgcactccagcctgggcgacagagcgagactccgtctcaaaaaaaaaaaaaaaaaaaaaaaaaaaaaga

SEQ ID NO: 5481 - DNA, 116 bp, Homo sapiens
agaatggtgtgaacccaggaggcggagcttgcagtgagctgagatcgcgccactgcactccagcctgggcgacagagtgagactctgtctcaaaaagaaaaaaaaaaaaaaaagaa

SEQ ID NO: 5482 - DNA, 150 bp, Homo sapiens
  SITE (21): n equals a,t,g, or c
ctgtagtcccagctattcggnaggctggggcaggagaatggcgtgaacccgggaggcggagcttgcagtgagccgagatcgcgccactgcactctagcctgggcgacagagcgagactccgtctcaaaaaaaaaaaaaaaaaaacaactt

SEQ ID NO: 5483 - DNA, 162 bp, Homo sapiens; identical to SEQ ID NO: 5244

SEQ ID NO: 5484 - DNA, 304 bp, Homo sapiens
cttgcggccgggcgcggtggctcacgcctgtaatcccagcactttgggaggccgaggcgggcggatcacgaggtcaggaaatcgagacaatcctgggtaacatggtgaaaccccgtctctactaaaaatacaaaaaattagctgggcgcagtggcgggcacctgtagtcccagctactcgggaggctgagacaggagaatggcgtgaacccggggagcggagcttgcagtgagccaagatcatgccactgcactccagcctgggcgacagagcgagactccttctcaaaaaataaacaaataaa

SEQ ID NO: 5485 - DNA, 311 bp, Homo sapiens
tattccattgacgggcgcggtggctcacgcctgtaatcccagcactttgggaggccgaggcaggcggatcatgaggtcaggagatcgagaccatcctggctaacacggtgaaaccccatctttactaaaaatacaaaaaattagccgggcgtggtggcgggcacctgtagtcccagctactcaggaggctgaggcaggagaatggtgtgaacccaggaggcagagcttgcagtgagctgagatcgtgccacattgcactccaacctgggcgacagagcaagattccatctcaaaaaaaaaaaaaaaaaaaa

SEQ ID NO: 5486 - DNA, 301 bp, Homo sapiens
  SITE (98): n equals a,t,g, or c
cggtggctcacgcctgtaatcccagcacttggggaggccgaggcgggcggatcacgaggtcaggagatcgagaccatcctggctaacacggtgaaacnccgtctctactaaaaatataaaaaattagccaggcgtggtggtgggcgcctgtagtcccagctactcaggaggctgaggcaggagaatggcgtgaacccgggaggcggagcttgcagtgagccgagatcgtgccactgcactccagcctgggcgacagagtgagactccgtctcaaaaaaaaaaaaaaaaaagttattcttcg

SEQ ID NO: 5487 - DNA, 171 bp, Homo sapiens
agccgggcgtggtggcgggcgcctgtagtcccagctacttgggaggctggggcaggagaatggcgtgaacctggaggtggagcttgcagtgagccgagatcgcgccactgcactccagcctgggcaacagagcgagactccgtctgaaaaaaaaaaaaaaaagaaatagag

SEQ ID NO: 5488 - DNA, 301 bp, Homo sapiens
ccgggcgcggtggctcacgcctgtaatcccagcactttgggaggccgagacgggcagatcacgaggtcaggagatcgagaccatcctggctaacacggtgaaaccccgtctctactaaaaatacaaaaattagccgggcatggtggcatgcacctgtagccccagctacacgggaggctgaggcaggagaatggcgtgaacccgggaggcggagcttgcagtgagtcgagatcgcgccactgcactccagcctgggcgacagagcgaaactccgtctcaaaaaaaaaaaaaaagaataaga

SEQ ID NO: 5489 - DNA, 611 bp, Homo sapiens
cagttgttggccgggcgctgtggctcacgcctgtaatcccagcactttgggaggctgaggcgggcggatcacaaggtcaggagatcgagaccatcctggctaacacagtgaaaccccgtctctactaaaaatacaaaaattagccgggcgtggtggcgggtgcctctagtcccagctgctggggaggctgaggcaggagaatggcatgaacccgggaggcagagcttgcagtgagccgagatcccaccactgcactccagtctgggtgacagagcgagactccgtctcaaaaaaaaaaaaaaaatttcagttgtgggctgggcgcggcagctcacgcctgtaatcccagcactttgggaggctgaggcgggaggatcacgaggtcaagagatggagaccatcctggctaacacggtgaaaccctgtctttactaaaagtacaaaaaaaaaaattagccgggtgtagtagcgggcacctgtagtcccagctactcgggaggccgaggcaggagaatgacgtgaacccgggaggcggagcttgcagtgagctgagatcccgccactgcactccagcctgggcgacagaacaagactccgtctcaaaaaaaaaa

SEQ ID NO: 5490 - DNA, 291 bp, Homo sapiens
ccacgcctgtaatcccagcactttgggaggccgaggcgggcggatcacgaggtcaggagatcgagaccatcccggctaaaacggtgaaaccctgtctctactaaaaatacaaaaaattagccgggcgtagtggcgggcgcctgtagtcccagctacttgggaggctgagtcaggagaatggcgtgaacccgggaggccgagcttgcagtgagccgagatagcaccactgcactccagcctgggcaatagagcgagactccatctcaaaaaacaaacaaacaaacaaacata

SEQ ID NO: 5491 - DNA, 308 bp, Homo sapiens
ggtggctcacgcttgtaatcccagcactttggaaggccgaggcgggcggatcacgaggtcaggagatcgagaccatcctggttaacacggtgaaaccccgtctttactaaaaatacaaaaaaaattagccgggcgtgatggtgggcgcctgtagtcccagctactcgggaggttgaggcaggagaatggcgtgaacccgggaggcggagcttgcagtgagccgagattgcgccactgcactcccgcttgggccacagagcgagactccgtttcaaaaaaaaaaaaaaaaaaaaaaaaaaggaacaaga

SEQ ID NO: 5492 - DNA, 303 bp, Homo sapiens
tgctgccgggcgcggtggctcacacctgtaatctcagcactttgggaggccgaggcgggcggatcatgaagtcaggagatcgagaccatccaggctaacacggtgaaaccctgtctctaccaaaaatacaaaaaattagctgggcttggtggcgggcgcctgtagtcccagatactcgggaggctgaggcaggagaatggcatgaccccgggaggcagagcttgcagtgagccgagatcacaccactgcactccagcctgggcgacaaagtgagactccgtctcaaaaaaaaaaaaaaaaaag

SEQ ID NO: 5493 - DNA, 267 bp, Homo sapiens
agatcacgagtcaggagattgagaccatcctggctaacacagtgaaaccccgtctctactaaaaatacaaaaaatcagccgggcgtggtggcgggcgcctgtagtcccagctactcaggaggctgaggcaggagaatggcgtgaacccggtaggcggagcttgcagtgagccgagattgcgccactgcactccagcctgggcgacagagcgagactccgtctcaaaaaaaaaaaaaaaaaaaaaagaaaagaaaagaaaagaaaaac

SEQ ID NO: 5494 - DNA, 129 bp, Homo sapiens
gaatggcgtaaccgggaggcggagcttgcagtgagccgagatcgcgccactgcactccagcctgggcgacagagcgagactccgtctcaaaaaaaaaaaaaaaaaaaaaaaaaaaaaaaaaaacaaaga

SEQ ID NO: 5495 - DNA, 311 bp, Homo sapiens
atagaaggccaggcgcggtggctcacgcctgtaatcccagcactttgggaggcccaggcaggcagatcatgaggtcaggagattgagaccatcctggctaacatggtgaaaccccgtctctactaaaaatacaaaaaattagctgggcgtggtggcgggtgcctgtagtcccagctactcgggaggctgaggcaggagaatggcgtgaacccgggaggcagagcttacagtgagccgagattgcgccactgcattccagcctgggcaacagagcaagactccatctcaaaaaaaaaaaaaaaaaaaaaagt

SEQ ID NO: 5496 - DNA, 193 bp, Homo sapiens; identical to SEQ ID NO: 5245

SEQ ID NO: 5497 - DNA, 240 bp, Homo sapiens
gatcacgaggtccggagatcgagaccagcctggctaacacagtgaaaccccgtctctactaaaaatacaaaaaaattagccaggcgtggtggcgggcgcctgtagtcccagctacttgggaggctgaggcaggagaatggcgtgaacctgggaggcggagcttgcagtgagccgagattgtgtcactgcactccagcccgggtgacagagcgagactccatctcaaaaaaaaaaaaaaaa

SEQ ID NO: 5498 - DNA, 297 bp, Homo sapiens
ctaggcgcggtagcacgcctgtaatcccatcactttgggaggccgaggcgggcggatcacaaggtcaggagatcgagaccatcctggctaacacggtgaaaccccgtctctactaaaaatacaaaaaaattatcagggtgtggtggtgggtgcctgttgtcccagctacttggcaggctgaggcaggagaatggagtgaacccgggaggcggagcttgcagtgagctgagattgtgccactgcactccagcctgggcaacagagcgagactctgtctcaaaaaaaaaaaaaaagaaa

SEQ ID NO: 5499 - DNA, 3991 bp, Homo sapiens
ccccgtctctactaaaatacaaaaaattagccgggcgtagtggcaggcgcctgtagtcccagctacttgggaggctgaggcaggagaatggcgtgaacccgggaggcggagcttgcagtgagccgagatcccgccactgcactccagcctgggcgacagagcgagactccgtctcaaaaaaaaaaaaaaaaaaaaaaaaaaaggcgtcagctttttatcgcacaaaattgcagatcaaaagtctgaaatcaaggggttcacagaaccacactcctccaaatcctgtaaaaaaaattccgtttcttgcctcttccggctcctgatagtggtgggttttccttacctgaggggggcatcactccaccctttttttttgtcttcaccgggcctcctctctgggtctgggtcttctgccactggatttagggcccactttggtaatccaggaggacctcaagattcttcattatacctgcaaagaccatttttgcaaatgaaatcatattgcacgagttctgggaatttatacctggacatatcttttagggggcactattcaatatactgcatgtagcaagagaatactagcgcatgtatcatctcatccaagtcttcaagagccttgacagttactgttatttctcacataagaaaaccgtagtgataaaagtgaaaagctaacatttaaaactcgatctgtcagccaggtgcagtggctcacgcctgtaatcccagcactttgggaggccaagacaggcagatcacgaggtcaggatatcgagaacatcctggctaacacagtgaaaccccgtctctactaaaaatacaaaaaattacctgggcgtggtggtgggcgcctgtagtcccatctactcgggaggctgaggcaggagaatggcatgaaatggggaggcagagctttcagtgagccaagattgcgccactgcactccagcctgggcgacagagcgagactccgtctcaaaaaaaaaacaaaacaaaacaaaaaaaaaacctcgatctgtcaggatttaagtctattcctttagccgctatggcattttactacctacaaagcagacagggccactttctaaattgcccagcctacaggctgaatgtaccagagtcctaagccaccacaaggtccctctgtgcaccctccttcacctatttgtatagccatatggcccaccaggagtgcagaaatacaggctatttcacaggtcagcaggaaattcccaattgccctcagggctaatcagacactctcagccaacttctttaaaattaagttcccatttctcttagtaagttctgcttgatgcttcataaggttcatggcaagttaaatgcattgcatattcaccactggtaagcaatgtagataagaaattctaaagagaatatttcatcttcatttcaatctagcaaacttataaaagtatggatttttaaacgggatgcaaatgacactagagcataactcatagtgacaaggagaaaggactaataaaggagtttttatgtggtcactttgaattagacctgtcagtgacactctagtgaatattaactgtgtgcatttttccatcccccttcaaactgcttggcttaaaattcaaataaagttggttccttgtgaaaacccccctcctggtggcatgagagaattaatgtactttcaaaggtaaacaatttgctcctttctgcagttggagcagagctgttatagatcatgccaactcaaagggaaaatagagtcaaggaaactgaagagtcaaaagccaaccacctggaaatttatgtcagtttttatgcttaagatccttcactgcaaacaaatatcacactttaatgccacagcacaataaagaaaaacctttgacttgtgggcttgtggaaaaagaaaaatgaaaaagcagcattcatgtgggagtcaaaacctatcctgcaccttagggaggaataaaaaagcccgtatgttattccttttatctctgttggagccaaggcgcagattgactcaatggacaggaaactgacagtgatggagcaactgctgcttacctgattgtttcatcatgcttatatcattcaactctcatgcccacccttgaaagtaggcaaaatgccctcattttagaattgacaaaaaaattcaagcttagaaacctaaatgattaatcaaaggtcactctgttaatttgcagtgatacagagcaagccaaagacattctcagacaccaagcttacctaaaccaacttctttttcctgctcctgccagcatatataaacacatgcttttaaaataatgacaggctaaatctagcaatcaagtcattatagcattccagtaagtctgcaagtgacatgttgttttcaccaaagatggaccaggatatgacattgtctccttctattatgcccagccagcagactgactgtcagatgcccactgcggtgatctgtttagcaaggtcagctgcttgattgctatgaataattggatgccattaataatggtcagctccaggatataggaaagtggtcaagcgtggtaattgtattttgaattccagcagattatttcctgggaagcaggaagacaaccactatataggatacagtttttctaagtagaatagaaataattgcttccctagaggtgaaggggagaagccaagggctcccgtaataacatgtgtgaccatatctagtaagaaacatggaggtcaaggttttgcaagtgatggctaatgctatgaagcctggccattaccatcactaaaagcctttacaagttcacattcttgttattctcttattgagaataacactagagctttacatgttgaggggccaccacctaaattttgaagcaccagtgaggttagaccaatggctaattaggaaatctaatacaattgatatccatctgaaaaggtcaagcataaatcttttgctgttaaatgtgtattaaattctcaccacatattaagggctgtagatactgcaagataattaggcaaaacattattatcttaaaaaaaaagccctgtcaaaaaatgaagggtttttaaaaatctcccaggacataataataaaagtgagaaattaaaaagagattgaaaaaaaaagcacgtgaaaaggaaaaactaaaagtgattttagaggatagactgcagtataggcaacacataaagagcaaaacatttcatagaaaaatataatagctatcagtttcagactttactaaagaaactatttcttaaattgtcaagcaatgtgggcagaacaaattaaagttaaaacttattatagcaaaggaaatatggatgggagcatggaatcatgatacaactgcctgaaatgaaatattcaacacaagcctcaattcttgccagcttttccattatttgaagctaccaggagttggatcattttgaccattttttttttaagtattcagtgtttggatgaactctacagtgaaaagagataaacaatcatagagctaaaattataaaactctcataagaaaacataaggaataagtctttgtaaccttgggttacacaatggtttcctggatctggcaccgaaagataggtgacaaaagaaaacacttaggctgggcgtggtggctcatgcttataatcccagcactttgggaggccgagctgggcggatcatgaggtcaggagaccatcctcgccaacatggtgaaaccccgtctctactaaaaatccaaaaaattggccaggcgtggtggcttacacctgtaatcccagcactttgggaggccgaggtgggcggatcaagaggtcaggagatcaagaccatcctggctacggtgaatccccgtctctactaaacatacaaaaaattagcggggcctggtggcgggcgcctgtagtcccagctactcgggaggctgaggcaggagaatggcgtgaacccgggaggcggagcttgcagtgagctgaga

SEQ ID NO: 5500 - DNA, 177 bp, Homo sapiens
cataaattagccgggcgtagtggcgggcgcctgtagtcccagctacttgggaggctgaggcaggagaatggcgtgaacccgggaggcggagcttgcagtgagccgagatcccgccactgcactccagcctgggcgacagagcgagactccgtctcaaaaaaaaaaaaaaaatgagtc

SEQ ID NO: 5501 - DNA, 292 bp, Homo sapiens
ctgacgcctgtaatcccagcactttgggaggccgaggtgggcggatcacgaggtcagaagatcgagaccatcctgcctaacacggtgaaacctcgtctctactaaaaatacaaaaaattagctgggcgtggtggcgggcgcctgtagtcccagctactcgggaggctgaggcaggagaatggcgtgaacccgggaggcggagcttacagtgagcggagatcgcgccactgcactccagcctgggtggcagagccagactccatctcaaacaaaacaaaacaaaacaaactct

SEQ ID NO: 5502 - DNA, 307 bp, Homo sapiens
tttaaaaagtctggccgggagcggtggctcacgcctgtaatcccagcactttgggaggccgaggcgggcggatcacgaggtcaggagatcgagaccatcccggctaaaacggtgaaaccccgtctctactaaaaatacaaaaaaaaaattagccgggcgtggtggcgggcgcctgtagtcccagctacttgggaggctgaggcaggagaatggcgtgaacccgggaggtggagcttgcagtgagctgagatcgcgccactgcaccccagcctgggcaacagagcgagactccgtctcaaaacaaaaa

SEQ ID NO: 5503 - DNA, 2925 bp, Homo sapiens
ggccgggcgaggaggctcaagcctgtaatcccagcactttgggaggcggaggcaggtggatcacgaggtcaggagatggagaccatcctggataacacggtgaaaccccgtctctactaaaaatacaaaaaattagccaggcgtggtgtcaggcgcctgaagtcccagctacttgggaggctaaggcaggagaatggcgtgaaccaggcaggcggagcttgcagtgagcggagatcacgccactgcactccagcctgggcgacagagcgacactctgtgtcaaaaaaaaaaaaaaaaaaaaaagccatacacatcggttgcatgcacacacacacagaagctttaaattgcttgtatccgtctcttaattttttttggtggagcatatatcagtgaattgctataaagtaagtgtttatggagctatatcatgattcatagtctgattactgcttgtgagacaaacaaaaatagaatgtatccatgaaaatgaacgcagaagtatttattatccattgatctttgttactgtacatttataactgagttatattgatcacttgtttaaagtacgcaattatataaaatataattttattaacgaaattatatttatcatgtatgacagctaccaggagagtcattgtattggaaactaagagaagtaaatggataacacttacactgtgcaaagtttccactacacgtcattaatttctgtagttcctagataatcttttcaggtagaataaaatgtccacaaaacaaaagtaattaaccaacatagattcctgaattgcttgctctgctacgcactctctactcaccctcatgtctacattctgccactaactcaaatatcctaaactattgcacatgccatcaacccccgcaccccgccgctaaaatgtttcaatcagactcacgcaggcaccatctgaccattccctcaatgctaatccataagaaaagaaaagtgacagtaggaaaacatcaggataaacacacataaagaaattcttagccagttctgacctctgcttatatggacgaagcagagtattacttaagaggagccacacaggccgagcgcggtggctcacgcctgtaatccgagcactttgggaggccaaggcggctggatcatgaggtcaggagatggagaccatcctggctaacacagtgaaaccccatctctcactaaaaatgcaaaaaaaaattagccgggagtggtggcaggcacctgtagtcccagctacttgagagggtgaggcaggagaatggagtgaacccgggaggcggagcttgcagcgagccaagttcgcgccactgcactccagcctgggcgacagagcgagacttcgtctcaaaaaaaaaaaaaaaaaaaaagaggaaccacacagaagaaatttaagggacactctttgtagttggagagatactgatcacaggtgtcactctgttacactcctttatattggcctctgtagcatctgttcaaagaaagtatcatatttaccaaaatttagccatctcatgaaacttaaaaactttaggaattctgccatagaactccaatgactaggaggctgtatcaggaagccttctattgtttgcagtggcaaaactatagtcaacaataatttattgtacatttaaaaataactaaaagagtataattagattctttgtaatacaaaaaaggacaaatgcttgaggtgatgcttaccctgtttaccctgatgtgattattacacatcatatgcctgtatcaaaatatctcatgtaccccataaatatgtgcacttactatatactcacaaaaattaaaaaattaaaattacttttaaaacttgaaaaaccaataataaaatatttgcagcaataaaataattcctatctctactccacacataatgaataaacattgctacctgggagatcacttaaggaaatttacttttactaaatgtcaatggcattattgattaagcttgtcaataaacacaagtgaaaatgattaataaaaaaaacacacaaatgagcaaacaaaaccaccaacagcaacagggaaacaagacttttcctgaccgaatccctatcttctcaccctgttctcagcagctgccttatgccttttgcaggttagaatcttagaattgagaaataataattgcttaattttaataagtttctactaaatcctttacatacgttttctccttttatcctactacaacccaatgtaagagtagcattatcaccattttacagatgagaaaactgagatgctggaggctaaataacttgctgaaggttttaccgctaaaatgtagtaagactaagattagaaggcagtccatctggtcccagaaccgtaagttttaactcctgtggctaggttcttactattagccgcagatttatttcacatctgaactttcacatattatatgtgggcaaattgccaggaacctaagcttgatttgttggtacaacatcttccattccaaaatgcccgtagccagccctcctgaatccctcggcctatggggctaaaaagctggtttttttctatggccattcaactattttacattttgtcaacttgtcaaggtatcatacgctattcgtccatagatctccttaatgtccatatcacaccctgtggacttgcagaggttgcacattgaaatatgacttaccctggtaatccacatcttaatttcttaataatacccatctcagccgggcgcggtggctcacgcctgtaatcccaggactttgggaggccgagacgggcggatcacgaggtcaggagatcaagaccatcctggctaacgcggtgaaaccccgtctctactaaaaatacaaaaaattagccaggcgtggtggcgggcgcctgtagtcccagctactcgggag

SEQ ID NO: 5504 - DNA, 263 bp, Homo sapiens
agcactttgggaggccgaggcaggcagatcacgagatgaggagatcgagaccatcctggctaacacggtgaaaccccgtctctactaaaaatacaaaaaattagccaggcgtggtggcgggtgcctgtagtcccagctactcgggaagctgaggcaggagaatgccgtgaacccaggaggcggagcttgcagtgagccgagactgcaccactgcactccagcctgggcgacagagccagactccatctcaaaaaaaaaaaaaa

SEQ ID NO: 5505 - DNA, 280 bp, Homo sapiens
cccagcactttgggaggccgaggcgggcggatcacgaggtcaggagatcgaggccatcccggctaaaacggtgaaaccccgtctctactaaaaatacaaaaaaattagccgggcgtagtggcgggcgcctgtagtcccagctacttgggaggctgaggcaggagaatggcgtgaacctgggaggcggagcttgcagtgagccgagatcccgccactgcactccagcctgggcgacagagcgagactccgtctcaaaaaaaaaaaaaaaaaaaaaaatagg

SEQ ID NO: 5506 - DNA, 187 bp, Homo sapiens
aaaaatacaaaaaattagccgggcgtcgtggcgggcgcctgtggtcccagctactcgggaggctgaggcaggagaatggcgtgaacccgggaggcggagcttgcagtgagccgagatcgcgccactgcactccagcctgggcgacagagcgagactccgtctcaaaaaaaaaaaaaaaaaaaagggg

SEQ ID NO: 5507 - DNA, 246 bp, Homo sapiens
atcacgaggtcaggagatcgagaccatcccggctaaaacggtgaaaccccgtctctactaaaaatacaaaaaattagccgggcgtagtggcgggcgcctgtagtcccagctactcaggaggctgaggcaggagaatggcgtgaacccgggaggcggagcttgcagtgagccgagatcccgccactgcactccagcctgggcgacagagcgagactccgtctcaaaaaaaaaaaaaaaaaaaatgga

SEQ ID NO: 5508 - DNA, 114 bp, Homo sapiens
gaggcaggagaatggcgtgaaccctggaggcagagcttgcagtgagccgagatcgcgccactgcactccagcctgggcgacagagcaagattccgtctcaaaaaaaaaaaaacg

SEQ ID NO: 5509 - DNA, 322 bp, Homo sapiens
aaaaaaaaaaaaaaaaaaggctgggcgtggtgactcacgcctgtaatcccagcactttgggaggccgaggcaggcggatcacgaggtcaggagatcgagaccatcctggctaacacagtgaaaccccgtttctactaaaaatacaaaaaattagccgggcgtagtggcgggcgcctgtagtcccagctactggggaggctgaggcaggagaacggcataaacccgggaggcagagcttgcagtgagccgagatcgcgccactgcactccagcctgggccaacagagtgagactccatctcaaaaaaagaaaagtgaaataga

SEQ ID NO: 5510 - DNA, 173 bp, Homo sapiens
ggcgtggtggcgggcgcctgtagtcccagctactcgggagactgaggcaggagaatggtgggaacccgggaggcggagcttgcagtgagccgagatcacgccactgcactccagccgggtgacagagcgagactctgtctcaaaaaaaaaaaaaaaaaaaaaaagaaaagaaa

SEQ ID NO: 5511 - DNA, 63 bp, Homo sapiens
ccactgcactccagcctgggtggcagagcaagactccatctcaaaaaaaaaaaaaaaaaaaat

SEQ ID NO: 5512 - DNA, 258 bp, Homo sapiens
tgggaggccgagctgggtggatcacgaggtcaggagatcaagaccatcctggctaacacggtgaaaccccatctctactaaaaatacaacaaattagccgggtgtggtggcggctgcctgtagtcccagctactcgggaggctgaggcaggagaatggcatgaacctgggaggtggagcttgcagtgagccgagatcctgccactgcactccagcctgggcgacagagtgagactccgtctcaaaaaaaaaaaaaaaa

SEQ ID NO: 5513 - DNA, 3905 bp, Homo sapiens
ctcacgcctgtaatcccagcactttgggaggccgaggcgggcggatcacgaggtcaggagctcgagaccatcctggctaacacggtgaaaccccgtctctattaaaaacacaaaaaattagccgggcgtggtggcgggcgcctgtagtcccagctactcgggaggctgaggcaggagaatggcgtgaacccgggaggtggagcttgcagtgagccgagatcgcgccactgcactccagcctgggcgacagagtgagactccatctcaaaaacaacaacaacaacaaaaaaacaaaacaaaaaaaaacaaaacatatgaacttctttcaacatcaaaatatagataaacaatatgattttcagtggctatacagtgttttactatgtggatatactataaatttataaacatctctgtgtttgggcatttaggtactttctaatttttcactattataagtatatcactatgggtctgatcaggagagagaaatttgacagggaaagttgaatgtaaattattaattttaacagggattagagtaacgagggattagctaacaagaggtcaaaagaactctcaaaacagaactagcagggataaggtgcaatcaccaagtctcaggctgagacagaatgtccagggaggagcccacgcccctagggctaagagaaggctcagctgagggtccctgaatttcacagaagcccccgtggtgccctgctgtcagaacctcctggagatctgccctctgggatgctgggggaaactcttcatggggaagaacctccctggaggcgctcttgttataaacctgcccgaggagggggtgtgctgggagaagttgctggttctgggtattgctggccactgtgcactgaaggggccaggcactgaaggagttgcagttgctgaaggagcctgccaagattgcaggctggagccaggaagcaaaaactctgacaaaggaaaaagtattcaagcagccttggttcattttcttttttaaaaaattttcaaattattttttatttagagacagagcctctctctatcacccaggctggggtgcagtggcgtgatcatggctcactgcagcctcgaactcctggatgatcaaccaatcctctcacctcagcctcccaagtagctgacactacaggtacatgccatcgtgcctagctaattttttttttttttttgagacggagtctcactctgtcacccaggctggagtgcattggcgcaatctcagctcactgcaatctccgcttcctgggttcacaccattctcctgcctcagcctccccagtagctgggcctacaggtgtctgccaccaggcccagctaatttttttttgtatttttagtagagacggggtttcactttgttagccaggatggtctcgatctcctgacctcgtgatccacccgccttggcctctcaaagtgctgggattacaggcgtgagccaccgcgactggctgcctggctaattttttaaagaaaattttctagaggtgagatcttactttttgatgcaggatggttttgaactcctggcttcaagtgaacctcctgccttggcttcccaaagtggctgggataacaggcatgagccactgtgcccagctggttcatcttcatagagcagccaaaaagagggaatttgttgctgagaggcactaagttgatatctggcacaagaaacaaatgtttcagggaatatccttgtatatccatcattacatgctatctgaatattttcttacatacattcctagacttagaattggcaggtaaaaaggtgggcacagtctacacttgagaaatacggccgtcagtaaaacttattcacctattacatagtacttgggagcttctagatcgtcacaatttaattaaccttaggtattgtcattctttttaatccttatacatctgataagccaaaaaaagtagttttttatttgtatttttaaaaaaattagtagcgatgttaaaactttattttcttttttattgtgaagttcttgcctgtatcctctgctgatttaaaaaattgggatattcagtctttttcttattgatttgtacatgctctttatatattaagtatcagaaagtttaaatgttcatgtttccaaatcttactttgtttttcatatttaaaatcttaattcttttggaaatcgttttagtttaaggtgtcaggtaggtgtttagtttttaaattttgttccaataatgttaactcttttctcttttttttcctgactgatttatatgtcaacttgtgttatatgcctgggtatacttatggactttaagttgttttcttctagtttctagttaattatttttcttttttctttcagaacaggacgcaggccttgatgccctttcctctatcataagtcgccaaaaacaaatggggcaggaaattgggaatgaattggatgaacaaaatggtaagaataagtctgggattgaccagatttgccgttgacataaatactaaaggcttgagcatttgttgaatgagtttaagattatacaacatgtaaagtggtttaatgtcaatgattgttacagtttaacgcattggagtgggggttgtggcagatttagatgatagttgttaaatactatgcaaagaaatttggtgaaaaattttccagttctcagtagctgcttttaacaatactgtgttttatgatccattcatcccaagagcttttcttctatgtggcagtgatatgaaattgctcagcactttgtacactgaggctgtgtgggcctcctgtcatccccacacccggtggagtttgctcttcttcgatcctatgtaccaggcttcagggcaaaaaagggtttgaagatctttgttcagggtttgatgtgacaagtctggttggaaaaagatgaatttgcaaactgcaagcagggtggattggggagtgtttaagacgtgtaggcatctgcaaggctcttggcttgaggagggcctggatgggttgtaggggcagaaagggggaagaaatacgggggcacgggattgccagtgattttacgttaaggatgaagttgggaaacttgagagcagacactggtttttgggtgagatggtaagtccagtttgcatgtgtctaattagagatgccggcgggagatgtccagttgacagtgggagacagggtaccagagctcagggagagggcggagccaaagagaagagatgggagcagctgcagtgtagaggtgacgtgtgacagcgtggagtcgttgagtggcagtgaagctggcatttatggaaagcccccactatgtgctaagccctttcatctatgtcatttcatttcatctccacacaacatcatgaaggcggcaccctcctcgtgtgagaggcaaaactcagagtggctgcagggccccctgagaccacatcgcttatgagtgacagagctaaactccagctcaggtcttctgattctaacgtgactgcttttgctgctaaactggcttcctctctaaagaagacaaagtaggaagagaaaaagaaaatgtaaagtattctatctaaggtttcagcttttagtaataacacgatggaatggctttcaagaaaagttatcaggtgggtgcggtggctcacacctgtaattccaacactttgggaggctgaggcaggcggattacaaggtcaggagaccagcctggccaacatgatgagacctcatctctactaaaaatacaaaaaattagctgggcgtggtggcccacacctgtagtcacagctactcgggaggctgaggcaggagaattgctagaacccaggaggcggaggttgtggtgagccgagattgtaccattgcactccagcctgggcgacagagcaagtctcc

SEQ ID NO: 5514 - DNA, 153 bp, Homo sapiens; identical to SEQ ID NO: 5246

SEQ ID NO: 5515 - DNA, 269 bp, Homo sapiens
tcccagcactttgggaggccgagacgggcggatcacaaggtcaggaaattgagaccatcctggctaacacggtgaaaccctgtctctactaaaaatatttaaaaattagccgggcgtggtggcgggcgcctgtagtcccagctactcgggaggctgaggcaggagaatggcgtgaacccgggaggcggagcttgcagtgagccgagattgcgccactgcactccagcctgggcgacagagcgagaccacgtctcaaaaaaaaaaaaaaa

SEQ ID NO: 5516 - DNA, 202 bp, Homo sapiens
tactaaaaatacaaaaaattagccgggcgtagtggcgggcgcctgtagtcccagctactcgggaggcttaggcaggagaatggcgtgaacccgggaggcggagcttgcagtgagccgagatcccgccactgcactccagcctgggcgacagagcgagactccatctcaaaaaaaaaaaaaaaaaaaaaaaaaaaaaaagaaa

SEQ ID NO: 5517 - DNA, 203 bp, Homo sapiens; identical to SEQ ID NO: 5247

SEQ ID NO: 5518 - DNA, 121 bp, Homo sapiens
ggctgaggcaggaaaatggcatgaacccgggaggcggagcttgcagtgagctgagatcgcagcactgcactccagcctgggcaacagagcgagactccatctcaaaaaaaaaaaaaaaaaa

SEQ ID NO: 5519 - DNA, 166 bp, Homo sapiens
ctgggcgtggtggcgggtgcctgtagtcccagctacttgggaggctgaggcaggagaatggcgtgaacccgggaggcggagcttgcagtgagccgagatcaggccactgcactccagcctgggcaacagagtgagactccgtctcaaaaaaaaaaaaaaaaagata

SEQ ID NO: 5520 - DNA, 295 bp, Homo sapiens
ccgggcgtggtggctcacgcctgtaatcccagcactttgggaggccgaggcgggaggatcacgaggtcaggagatcaagaccatcctggctaccaaggcgaaactccttctctactaaaaatacaaaaaattagccgggcgtggtggcgggcgcctgtagtcccagctactcgggaggctgaggcgggagaatggcgtgaacccaggaggtggagcttgcagtgagccgagatcatgccactgcactccagcctgggcaacagagcaagactccgtctcaaaaaaaaaaagaaaa

SEQ ID NO: 5521 - DNA, 310 bp, Homo sapiens
actgagggccgggcgtggtggctcacgcctgtaatcccagcactttgggaggccgaggcgggcagatcacgaggtcaggagatcgagaccatcctggctaacacggtgaaaccccgtctctactagaaatacaaaaaaattagccgggcatggtggtgggcacctgtagtcccagctactcgggaggctgaggcaggagaatggcatgaacccgggaggtggagcttgcagtaagctgagatcacgccactgcactccagcctgggcaacagagtgagactctgtctcagaaaaaaaaaagaaaagaaaa

SEQ ID NO: 5522 - DNA, 280 bp, Homo sapiens
cggatcacgaggtcaggagatcgagaccatcctggctaaaacggtgaaaccccgtctctactaaaaatacaaaaaattagccgggcgtagtggcgggcgcctgtagtcccagctacttgggaggctgaggcaggagaatggcgtgaacccgggaggcggagcttgcagtgagccgagatcccgccactgcactccagcttgggcgacagagcgagactccgtctcaaaaaaaaaaaaataaataaaaaaaaaaaaaaaaaaaaaaaaaagaaaagaaaaa

SEQ ID NO: 5523 - DNA, 190 bp, Homo sapiens
atcactgggcgtagtggcgggcgcctgtagtcccagctacttgggaggctgaggcaggagaatggcgtgaacccgggaggcggagcttgcagtgagccgagatcccgccactgcactccagcctgggcgacagagcgagactccgtctcaaaaaaaaaaaaaaaaaaaaaaaaaaaaaaaaaaaaagaaa

SEQ ID NO: 5524 - DNA, 278 bp, Homo sapiens
aatcccagcactttgggaggccgaggcgggcggatcaacaggtcaggagatcgagaccatcctggctaacaaggtgaaaccccatctctactaaaaatacaaaaattagcccggcgtggtggtgggcgcctgtagtcccagctactcgggaggttgaggcaggagaatggcgtgaacccaggaggcggagcttgcagtgagccaagattgcgccactgcactccagcttgggtgacagaccgagactccgtttcaaaaaaaaaaaaaaaaaaaagaat

SEQ ID NO: 5525 - DNA, 2364 bp, Homo sapiens
ctcactcctgtaatcccagcactttgggaggccgaggcgggcggatcacgaggtcaggagatcgagaccatcctggctaacacggtgaaaccccgtctctactaaaaatacaaaaaaaaaattagccgggcgtggtagcgggcgcctgtagtcccagctactcgggaggctgaggcaggagaatggcgtgaacctgggaggcggagcttgcagtgagccgagatcgcgccactgcactccagcctgggcgacagagcgagactccgtctcaaaaaaaaaaaaaaaaaaaaaaaagaataaagtataagagaacatgagtgaatgcctgtcatctttttttttttttcttcaaaaacagggtctcactttgtcacccaggctgcagtgcagtggcgcaatcatggctcactgcaacctctagcacctgggctcaagagctcaagaggtcctaccaactcagcctcccaaggagctgggactacaggtgcatgccaccacaccctaaggtaaatttttgtgtttttatagagacaggttttaccatgttgcccaggctgttctgaaactcctgggcttaagggatcgacccacctccatctcccaaggcactgggattataggcatgagccaccgcgcctggcctatcatcatttattcatttattcatctatgcaaaaatattctttgagtgcctaattgctaagcaatgggacaagcactggcaagtcacactggcaaaatatcatcccgccactcaaggagcttataggtcagctggggagacaaagaagaacatgggcccttgtaatgagctaagtatggtgctaggggaaatatccataagttatgggaacccagaggaattcattcatttattcgtttagtaaatatttatgtgccaaactcttgggacccaatggtgacctaagcagacaagacacatccacctacagtgtttacagagtagtgtgggagacagacattaatgaaatgctcttacagacctatcattacctattgtcatatgagttatgaaagaaaaataacaggccgggcatgatggctcacgcctgtaatcccagcactttgggagaccaaggcaggtggatcacttgaggtcaggagttcaagaccagcctggccaacatgatgaaaccccatctctactaaaaatacaaaaaaaaaaaaattatctgggcatggtggcaggcagctgtaatcccagctactcgggaggctgaggcaggaaactcgcttgaacctgggaggcagaggttgcactgagctgagattgcaccactgcactccagcctgggtgacagagcaagactctgtcaaaaaaaaaaaaaaaaaagaaaggaaggaaaggaaggaaggaaggaaggaaggaaatagagtgtaagaggggggcctagtgtagtctaagatgactcaggagaagctgtttgagctgatgcctgaagacgggttgcatgtaagtagttgagtaggtaaaagagaggggtactatcatatcagggattcgggagaaaaaaaaagagagagagagaggggaagagtgctgtggacccattgagctccagcccagctccaactctgtgggtcaggaaagactttccagcatctaagctgagtccagaaggatgagtaggagtgagccagctgaggaggagctggggtggaaggaaagcattccagagcagcagatagcttgtgcaaaggcacacaggcagctgggtgtggtggctcacacctgtaatcccagcactgtgggaggccaagatgggtggaccgtttgagcccaggaattcaagaccaacctggatgacatagtgaaaccctgtctctaccaaaaaaaaaaaaaaaaaaattgaaaaaaaaaaagaagctgggcatggtggcgtgcacctgtggtcccagctacccaggaaactgaggtgggagggaagtcgaggctgtagtgaaccatggtggcaccattgcattccagcccgggtgacagagcaaggccctgtacaaaaaaaaaaaaaaaaaaagcatggaggcaacagaacatagtggattggaaggaaaaacaagtggttcagaccaggtgcagtggctcatgcctgtaatcccagcactttgggaggccgaggcgggcagatcacgaggtcaggagatcaagaccatcctcgctaacacagtgaaaccccgtctctactaaaaatacaaaaaaattagccaggcgtggtggtgcgtgcctgtagtcccagctactcaagaggctgaggcaggagaatggcgtgaacctgggaggcagagcttgcagtgagcggagatcatgccactgcactccagcctgggcgacagagcaagactcca

SEQ ID NO: 5526 - DNA, 304 bp, Homo sapiens
aaaaggccgggtgcggtggctcacacctgtaatcccagcactttgggaggccgaggcaggcggatcatgaggtcaggagatcgagaccatcctggctaacacggtgaaaccccgtctccactaaaaatacaaaaaattagccgggcacggtggcgggcgtctgtagtcccagctactagggaggctgaggcaggagaatggtgtgaacccaggaggcggagcttgcagtgagccaagatcgcgccactgcagtccagcctgggcgaaagagcagactccgtctcaaaaaaaaaaaaaaaaaaaa

SEQ ID NO: 5527 - DNA, 261 bp, Homo sapiens
ggatagtgaggtcaggagatcgagaccatcctggctaacacggtgaaaccccctctctactaaaaatacaaaaaattagccgggcgtggtagcgggcgcctgtagtcccagctactcgggaggctgaggcaggagaatggcgtgaacccgggaggcggagcttgcagtgagccgagatcgcgccactgcactccagcctgggcgacagagcgagactccgtctcaaaaaaaaaaaaaaaaaaaaaagaaaaagggataaaa

SEQ ID NO: 5528 - DNA, 297 bp, Homo sapiens
tggctcactcgtgtaatccagcactttgggaggccgaggcgggcagatcacaagatcaggagatcgagaccttcctggctaacacggtgaaaccccgtctctactaaaaatacaaaaaattagccgggcctagtggcgggcgcctgtagtcccagctactcgggaggctgaggcaggagaatggcatgaacccgggaggcggagcttgcagtgagcccagatcgtgccactgcactccagcctgggcgacagagcgagactccgtctcaaaaacaacaacaacaaaacaaaacacca

SEQ ID NO: 5529 - DNA, 108 bp, Homo sapiens
ctgaggcaggagaatggcgtgaacccagaaggcggagcttgcagtgagccaagatcgtgccactgcactccagcctgggcgacagagcgagactccatctcaaaaaaa

SEQ ID NO: 5530 - DNA, 312 bp, Homo sapiens
gtcctgggccgggcgcggtggctcacgcctgtaatcccagcactttgggaggccgaggcgggcggatcacgaggtcaggagatcgagacgatcccggctaaaacggtgaaaccccgtctctactaaaaatacaaaaaattagccgggcgtagtggcgggcgcctgtagtcccagctacttgggaggctgaggcaggagaatggcgtgaacccgggaggcggagcttgcagtgagccgagatcccgccactgcactccagcctgggggacagagcgagactccgtctcaaaaaaaaaaaaaaaaaagactgtc

SEQ ID NO: 5531 - DNA, 158 bp, Homo sapiens
gcctgtagtcccagctactcgggaggctgaggcaggagaatggcatgaacccaggaggcggagcttgcagtgagcagagatcgcgccactgcactccagcctgggcaacagagcgagactctgtctcagaaaaaaaaagaaaaaagaaaaaagaaaat

SEQ ID NO: 5532 - DNA, 298 bp, Homo sapiens
ttgggccgggcgcagtggctcacgcctgtcatcccagcactttgggaggccgagacgggtggatcacgaggtcaggagatcgagaccatcctggctaacacggtgaaaccccgtctctactaaaaatacaaaaaattagccgggcgtgttggcgggcgcctgtagtcccagctactcgggaggctgaggcaggagaatggcgtgaacccgggaggcggagcttgcagcgagcggaaatcgcaccactacactccaggctgggggacagaacgagaccccatctcaaaaaaaaaaagaa

SEQ ID NO: 5533 - DNA, 237 bp, Homo sapiens
aggtcaggagatggagaccatcctggctaacatggtgaaaccccgtctctactaaaaatacaaaaaattagccgggcgtggtggcaggcgcctgtagtcccagctactcgggaggctgaggcaggagaatggcgtgaatccaggtggagcttgcagtgagctgagatcgcgccactgcactccagcctgggtgacagagtgagactccatctcaaaaaaaaaaaaaaaaaaaaaaga

SEQ ID NO: 5534 - DNA, 296 bp, Homo sapiens
ggctgggcgcggtggctcacgcctatgatcccacactttgggaggccgaggtgggcggatcatgaggtcaggagatcgagaccatcctggctaatacggtgaaaccccgtctctactaaaatacaaaaaattagccgggcgtggtggcgggtgcctgtagtcccactactcgggaggctgaggcaggagaatggcgtgaacccaggaggcagagcttgcagtgagcggagatcatgccactgcactccagcctgggtgacagagcaagactccatctcaaaaaaaaaaaaaaagaa

SEQ ID NO: 5535 - DNA, 311 bp, Homo sapiens
agggataggccgggcgcggtggctcacgcctgtaatcccagcactttgggaggccgagacgggcggatcacgaggtcaggagatcgagaccatcctggctaacatggtgaaaccctgtctctactaaaaatacaaaaaaaattagccggttgtggtggcgagtgcctgtagtcccagctactccagaggctgaggcaggagaatggcatgaacccgggaggcagagcttgcagtgagccgagatcgtgccactgcacttgagcctgggcgacagagcaagactccatctcaaaaaaaaaaaaaaaaaaaaa

SEQ ID NO: 5536 - DNA, 294 bp, Homo sapiens
gcttggaggctcatgcctgtaatcccagcactttgggaggccgaggcgggcggatcacaaggtcaggagatcgagaccatcctggctaacacggtgagaccctgtctctactaaaaatacaaaaaattagccaggcgtggtggcgggcgcctgtagtcccagctactcgggaggctgaggcaggagaatggcgtgaacccgggagcggacttgcagtgagccgagatcgcgccactgcactccagcccgggcaacagagcgagactctgtctcaaaaaaaaaaaaaaaaaagct

SEQ ID NO: 5537 - DNA, 303 bp, Homo sapiens
aaggaggccgggcgcggtggctcacgcctgtaatcccagcactttgggaggccaaggagggcggatcacgaggtcaggagatcgagaccatcctggctaacacagtgaaaccctgtctctactaaaaatacaaaaaactagctgggcatggtggcggatgcctgtagccccagctacttgggaggctgaggcaggagaatggcgtgaacccgggaggcggaggttgcagtgagcggagattgcgccactgcactccagcctgggggacagagccagactccgtctaaaaaaaaaaaaaaaaaa

SEQ ID NO: 5538 - DNA, 191 bp, Homo sapiens
aaaaaacaaaaaattagccgggcgtagtggcgggcgcctgtagtcccagctacttgggaggctgaggcaggagaatggcgtgaacccgggaggcggagcttgcagtgagccgagatcccgccactgcactccagcctgggcgacagagcgagactccgtctcaaaaaaaaaaaaaaaaaaaaaaaaagtta

SEQ ID NO: 5539 - DNA, 193 bp, Homo sapiens
cgggcgtggtagcgggcgcctgtagtcccagctactcgggaggctgaggcaggagaatggcgtgaacccgggaggcggagcttgcagtgagccgagatcgcgccactgcactccagcctgggcgacagagcgagactccgtctcaaaaaaaaaaaaaaaaaaaaaaaaaaaaaaattgactcctaatcaaaaa

SEQ ID NO: 5540 - DNA, 195 bp, Homo sapiens
aaatacaaaaattagccgggcgtagtggtgggcgcctgtagtcccagctactcgggaggctgaggcaggagaatggcgtgaacccgggaggcggagcttgcagtgagccgagatcccgccactgcactccagcctgggcgacagagcgagactccgtctcaaaaaaaaaaaaaaaaaagataattctaacaaaca

SEQ ID NO: 5541 - DNA, 281 bp, Homo sapiens
cactttgggaggccgaggcgggcggatcacgaggtcaggagatcgagaccatcctggctaacacggggaaaccccgtctctactaaaaatacaaaaaatgagccgggcgcggtggcgggcgcctgtggtcccagctactcgggaggctggggcaggagaatggcgcgaacccgggaggcggagcttgcagtgagccgagatcgcgccaccgcactccagcctgggcgacagagcgagactccgtctcaaaaaaaaaaaaaagaaaaagaaaaaggacaaca

SEQ ID NO: 5542 - DNA, 301 bp, Homo sapiens
atagccgggcgcggtggctcatgcctgtaatcccagcactttgggaggctgaggtgggcagatcacgaggtcaggaaatcgagaccatcctggctaacacggtgaaaccccatctctactaaaaaatacaaaaaattagccgggcgtggtggtgggtgcctgtagtcccagctactcaggaggctgaggcaggagaatggtgtgaacccgggaggtggagcttgcagtgagccgagatcgcgccactgcactccagcctgggcgacagaacaagactccgtctcaaaaataaataaataaa

SEQ ID NO: 5543 - DNA, 310 bp, Homo sapiens
agccgggcgcggtggctcacgcctgcaatcccagcactttgggaggccaaggcgggcagatcacaaggtcaggagatcgagaccatcctggctaacacggtgaaaccccgtctctactaaaaatacaaaaacaaaactagccgggcttggtggtgggcgcctgtagtcccagctactcaagaggctgaggcaggagaatggcgtgaactcgggaggcggagcttgcaatgagccgagatcgcgccactgcactccagcctgggcgacagagcgagactccgtctcaaaaaaaaaaaaaaaaaaaaaaaaa

SEQ ID NO: 5544 - DNA, 297 bp, Homo sapiens
gtgcggtggctcacgcctgtaatcccagcactttgggaggccaagccgggcggatcatgaggtcaggagatcgagaccatcctggctaacacggtgaaaccctgtctctactaaaaatacaaaaaattagccgggcgtggtggcgggtgcctgtagtcccagctactcgggaggccgaggcaggagaatggtgtgaacccgggaggtggagcttgcagtgagccgagatcgggccactgcactccagcctgggcgacagagcaagactctgtctcaaaaaaaaaaaagaaatggaaa

SEQ ID NO: 5545 - DNA, 182 bp, Homo sapiens
tactaaaaatacaaaaagttagccgggcgaagtggcgggcgcctgtagtcccagctactcgggaggctgaggcaggagaatggcgtgaacccgggaggcggagcttgcagtgagccgaaatcgcgccactgcactccagcctgggtgacagagcgagactccgtctcaaaaaaaaaaaaaaa

SEQ ID NO: 5546 - DNA, 303 bp, Homo sapiens
ataggctgggcgcggtggctcacgcctgtaatcccagcactttgggaggccgaggcaggcggatcatgaggtcaggagatcgagaccatcctggctaacacggtgaaacccagtctctactaaaaatacaaaaaattagctgggtgtgctggcaggcatctgtagtcccaactactcgggaggctgaggcgggagaatggcatgaacctgggaggcggagcttgcagtgagccgagatcacgccactgcactccagcctgggcgacagagtgagactacctctccaaaaaaaaaaaaaaaaaa

SEQ ID NO: 5547 - DNA, 297 bp, Homo sapiens
gggcgcggtggctcacgtctgtaatcccagcactttgggaggccgaggggggcggatcacgatgtcaggagatcgagaccatcctggctaacatggtgaaaccctgtctctgctaaaaatacaaaaaattagcagggcgtggtggcgggcgcgtgtagtcccagctactcaggaggctgaggcaggagaatggagtgaacccaggaggcggacgtgcagtgagccgagatcgcgccactgcactccagcctgggcgacagagcaagactccgtctcaaaaaaaaaaaaaaaaaaaaa

SEQ ID NO: 5548 - DNA, 323 bp, Homo sapiens
aaaaaactatttttcggccggggggggtggatcacgcctgtaatcccagcactttgggaggccgaggcgggcagatcacgaggtcaggagatcgagaccatcctggctaacacggtgaaaccccgtctctactaaaaaaacaaaaaattagccgggcgtggtagcgggagcctgtagtcccagctactcgggaggctgaggcaggagaatggcgtgaacccgggaggcggagcttgcagtgagccgagatcgcgccactgcactccagcctgggcgacagagcgagactccgtctcaaaaaaaaaaaaaaaaaaaaacaaaaa

SEQ ID NO: 5549 - DNA, 277 bp, Homo sapiens
ataagtcactttgggaggccgagacgggcggatcacgaggtcaggagatggagaccatcctggctaacacggtgaaaccccgtctctactaaaaatacaaaaaaattagccgggcgtagtggcgggcacctgtagtcccagctactccggaggctgaggcaaggagaatggcgtgaacctgggaggcggagcttgcagtgagccgagatggcgccactgcactccagcctgggtgatggagcgagacttgtctcaaaaaaaaaaaaaaaaagaataa

SEQ ID NO: 5550 - DNA, 303 bp, Homo sapiens
gccgggcgtggtggctcacgcctgtaatcccagcactttgggaggctgaggcaggcggatcacaaggtcaggagatcgagaccatcctggctaacacggtgaaacccctctctactaaaaatacaaagaattagccgggtgtggtggcgcacgcctgtagtcccagctactcgggaggctgaggcaggagaatggcgggaacccgggaggcagagcttgcagtgagccaagatcgtgccactgcactccagcctgggtgacagagcgagactccacctcaaaaaaaaaaaaaaaaaaaaagaa

SEQ ID NO: 5551 - DNA, 309 bp, Homo sapiens
cctgtaatcccagcactttgggaggccgaggcgggcggatcacaaggtcaggagatcgagaccatcccggctaaaacggtgaaaccccgtctctactaaaaatacaaaaaattagccgggcgtagtggcgggcgcctgtagtcccagctacttgggaggctgaggcaggagaatggcgtgaacccgggaggctgagcttgcagtgagccgagatcccgccactgcactccagcctgggcgacagagcgagactccgtctcaaaaaataaaaataaaaataaaaaataataataaaaataaaaaataaaa

SEQ ID NO: 5552 - DNA, 310 bp, Homo sapiens
ggacgggcgcggtggctcacgcctgtaatcccagcactttgggaggccgaggcgggcggatcacgaggtcaggagatcgagaccatcccggctaaaacggtgaaaccccgtctctactaaaaatacaaaaaattagccgggcgtagtggcgggcgcctgtagtcccagctacttgggaggctgaggcaggagaatggcgtgaacccgggaggcggaggttgcagtgagccgagatcccgccactgcactccagcctgggcgacagagcgagactccgtctcaaaaaaaaaaaaaaaaaaaaaaaaaaaat

SEQ ID NO: 5553 - DNA, 247 bp, Homo sapiens
aggccgaggcgggcggatcacgaggtcaggagatcgagaccaacctggctaacacagtgaaaccccgtctctaccaaaatacaaaaaattagccgggggtagtggcgggcgccttgtagtcccagctacttgggaagctgaggcaggagaatggcatgaaccagggaggcggagcttgcagtgagccgagatcgcaccactgcactccagcctgggcgacacagcaagactccgtctcaaaaaaaaa

SEQ ID NO: 5554 - DNA, 175 bp, Homo sapiens
ccaaaaattagccgggcgtggtggcgggcgcctgtagtcccagctactcgggaggctgaggcaggagaatggcgtgaacccgggaggcggagcttgcagtgagctgagatcgcgccattgcactccagcctgggcgacagagccagactcagtctccaaaaaaaagaagaaaaga

SEQ ID NO: 5555 - DNA, 311 bp, Homo sapiens
actgtcttaggccaggcgtggtggctcacgcctataatcccagcactttgggaggccaaggtgggcggatcacgaggtcaggagatcgagaccatcctggctaacacggtgaaaccccgtctctgctaaaaatacaaaaaattagccgggcatggtggcgggcgcctgtagtcccagctactcgggaggctgaggcaggagaatggcgtgaacccaggaggcgcagctttcagtgagccgagatcgcgccactgcactccagcctgggcgacagagctaaactccgtctcaaaaaacaaaacaaaacaaaa

SEQ ID NO: 5556 - DNA, 183 bp, Homo sapiens
gaaaaatttagccgggcgtggtggcgggcgcatgtagtcccggctactcgggaggctgaggcaggagaatggcgtgaacccgggaggcggagcttgcagtgagccgagatggcgccactgcactccagcctgggcgacagagcgagactccgtctcaaaaaaaaaaaaaaaaataataatgaa

SEQ ID NO: 5557 - DNA, 292 bp, Homo sapiens
tggctcaagcctgtaatcccagcactttgggaggtcgaggcgggcggatcacgaggtcaggagatcgagaccatcctggctaacacggtgaaaccttgtctctactaaaaatacaaaaattagccgggcatagtggcgggcgcctgtagtcctagctactcgggaggctgaggcaggagaatggcgtgaacccgggaggtggagcttgcagtgagctgagattgcgccactgcactccagcctgggtgacagagtgagactccgtctcaaaaaaaaaaaaaaaattaaaaaa

SEQ ID NO: 5558 - DNA, 93 bp, Homo sapiens
gagctggcagtgagccgagatcccgccactgcactccagcctgggcgacagagcgagactccgtctcaaaaaaaaaaaaaaaaaaaaagaaaa

SEQ ID NO: 5559 - DNA, 287 bp, Homo sapiens
ttgtaatcccagcactttgggaggccgaggcgggcggatcacaaggtcaggagatcgaaaccatcctggctgacacggtgaaaccccgtctctactaaaaatacaaaaaaatggccgggtgtggtggcgagcacctgcctgtagtcccagctactcgggaggctgaggcaggagaatggcttgaacccgggaggcggagcttgcagtgagccgagatcgcgccactgcactccagcctaggcgacagagcaagactccctctccaaaaaaaaaaaaaaaaaaaaaaa

SEQ ID NO: 5560 - DNA, 136 bp, Homo sapiens
ggcaggagaatggcgtgaacccgggaggcggagcttgcagtgagccgagattgtgccactgcactccagcctgggcgacagagtgagactccgtctcaaaaaaaaaaaaaaaaaaaaaaaaaaaaaaaaaaaaaaa

SEQ ID NO: 5561 - DNA, 273 bp, Homo sapiens
  SITE (18): n equals a,t,g, or c
tcttttgggaggccgagncgggcggatcacgaggtcaggagatcgagaccatcctggcaaacacggtgaaaccccgtctctactaaaaatacaaaaaaattagccgggcgtggtggcgggcgcctgtagtcccagctactcgggaggctgaggcaggagaatggcgtgagcccgggaggcggagcttgcagtgagcggagatcgcgccaccgcacttcagcctgggcgacagagcaagactcttgtctcaaaaaaaaaaaaaaaaagtggcag

SEQ ID NO: 5562 - DNA, 296 bp, Homo sapiens
cgggcgcggtggctcacgcctgtaatcccagcacttggggaggccgaggcgggcggatcacgatgtcaggagatcgataccatcctggctaacacggtgaagccccatctctactaaaaatacaaaaaattatccgggcgtggtggcggccgcctgtagtcccagctactcgtgaggctgaggcaggagaatggcatgaacccgggaggcggagcttgccgtgagccgagattgcgccactgcactccagcctgggcgacagagccagactccgtctcaaaaacaaacaaacaaaa

SEQ ID NO: 5563 - DNA, 308 bp, Homo sapiens
agggccgggcgcggtggctcatgcctgtaatcccagcactttgggaggccgaggcgggcggatcacgaggtcaggagatcgagaccatcctggctaacgtggtgaaaccccgtctctactaaaagtacaaataaaaaattagccgggcgtggcggtgggcgcctgtagtcccagctactcgggaggctgaggcaggagaatggcgtgaacccgggaggcggagcttgcagtgagccgagattgcgccactgcactccagcctgggcgacacagcaagactccgtctcaaaaaaaaaagttgaaaagct

SEQ ID NO: 5564 - DNA, 138 bp, Homo sapiens
cgggaggctgaagcaggagaatggcgtgaacccaggaagcggagcttgcagtgagccgagattgcgccactgcactccagcctgggtgacagagccagactcggtctcaaaaaaaaaaaaaaaaaaaaaaaaaagaaa

SEQ ID NO: 5565 - DNA, 243 bp, Homo sapiens
tcacgaggtcaggagatcgagaccatcctggctaacacggtgaaaccccgtctctactaaaaatccaaaaaattagccgggcgtggtggtgggcgcctgtagtcccagctactcgggaggctaaggcagaagaatggcaggaacctgggaggcggagcttgcagtgagccgagatcacgccactgcactccagcctgggcgacagagcgagactccgtctcaaaaaaaaaaaaaaaaaaaatt

SEQ ID NO: 5566 - DNA, 296 bp, Homo sapiens
gcgcggtggctcaagcctgtaatcccagcactttgggaaaccgaggcgggtggatcacaaggtcaggagatcgagaccatcctggctaacacggtgaaaccccatctctactaaaaaatacaaaaaaacttagccgggtgtggtggcgggcgcctgtagtcccagctactcaggaggctgaagcaggagaatggcgtgaacccgggaggcggagcttgcagtgagccgagatcgcgccactgcactccagcctgggggacagagcgagactccatctcaaaaaaaaaaaaaaaaaa

SEQ ID NO: 5567 - DNA, 202 bp, Homo sapiens
ctactaaaaatacaaaaaattagccgggcgtggtagcgggcgcctgtagtcccagctactcgggaggctgaggcaggagaatggcgtgaacccgggaggcggagcttgcagtgagccgagatcgcgccactgcactccagcctgagtgacagagcgagactccgtctcaaaaaaaaaaaaaaaaaaaaaggttaatatgtaa

SEQ ID NO: 5568 - DNA, 248 bp, Homo sapiens
gaggtggatggatcatgaggtcaggagatcgagaccatcctggctaacacagtgaaaccccgtctctactaaaaatacaaaaaattagccaggcgtgatggcgggcgcctgtagtcccagctactcgggaggctgaggcaggagaatggcgggaacctgggaggcggagcttgcagtgagccaagatcgcgccactgcaccccagcctgggtgacagagcgagactccgtctcaaaaaaaaaaaagaa

SEQ ID NO: 5569 - DNA, 192 bp, Homo sapiens
aatacaaaaaattagccgggcgtagtggcgggcgcctgtagtcccagctacttgggaggctgaggcaggagaatggcgtgaacccgggaggcagagcttgcagtgagccgagatcccgccactgcactccagcctgggcgacagagcgagactccgtctcaaaaaaaaaaaaaaaaaaagaagtagacaaaa

SEQ ID NO: 5570 - DNA, 320 bp, Homo sapiens
atggtggctcacgcctgtaatcccagcactttgggaggccgaggcgggcggatcacgaggtcaggagattgagaccatcctggctaacacggtgaaaccccgtctctactaaaaatacaaaaaaattagccgggcgtggtggcgggcacctgtagtcccagctactcaggaggctgagacaggagaatggcgtgaacccgggaggcagagcttgcagtgagccgagattgcaccactgcactccagcctgggcaacagagcaagactccgtctcaaaaaaaaaaaagaaaaaagaaaagaaaagaaaagaaaacgaagtc

SEQ ID NO: 5571 - DNA, 274 bp, Homo sapiens
atgcctgtaatcccacactttgggaggccgaggcaggcggatcacgaggtcaggagatcgagaccatcctggctaacacggtgaaaccctttctctactaaaaatacaaaaaattagccgggcgtggtggcggtcgcccgtagtcccagctactcgggaggctgaggcagaagaatggcgtgaacctgggaggcagagcttgcagtgagccgagatcggtccactgcattccagcctgggtgacagagcgagactccgtctcaaacaaaaaaaa

SEQ ID NO: 5572 - DNA, 308 bp, Homo sapiens
caggccgggcgcggtggctcacgcctgtaatcccagcactttgggaggccgaggcgggcggatcacgaggtcaggagatcgagaccatcctggctaacacggtgaaaccccgtctctactaaaaatacaaaaaattagccgggcgtggtggtgggcgcctgtaatcccagctactcgggaggctgaggcaggagaatggcatgaacccaagaggcggagcttgcagtgagccgggatagcgccactgcagtccagcttgggcgaaagagtgagactccgtctcaaaaaaaaaaaaaagttgaataaac

SEQ ID NO: 5573 - DNA, 153 bp, Homo sapiens
gggcgtggtggcgggcgcctgtagtcccagctactcgggaggctgaggcaggagaatggcgtgaacccgggaggcggagcttgcagtgagctgagatcaccccactgcactccagcctgggcgacagagtgagactctgtctcaaaaaaaaaa

SEQ ID NO: 5574 - DNA, 300 bp, Homo sapiens
gctcacgcctgtaatcccagcactttgggaggccgaggcgggcggatcacgaggtcaggagatcgagaccatcctggctaacacggtgaaaccccatctctactaaaaatacaaaaaattagccgggcgtggtagcgggcgcctgtagtcccagctactcgggaggctgaggcaggagaatggcgtgaacccgggaggcggagcttgcagtgagccgagatcgcgccactgcactccagcctgggcgacagagcgagactccgtctcaaaaaaaaaaaaaaaaaaaaaaaaaaaaattaa

SEQ ID NO: 5575 - DNA, 308 bp, Homo sapiens
ggtctgccaggcgcagtggctcacgactgtaatcccagcactttgggaggccgaggcgggcggatcacgaggtcaggagatcgagaccatcctggctaacacggtgaaacccggtctctactaaaaatacaaaaagttagccgggcgtggtggcgggcgcctgtagtcccatctactcgggaggctgaggcaggagaatggcgtgaacccgggaagtggagcttgcagtaagccgagatcgtgccactgcactccagtctgggcgacagagcgagactccgtctcagaaaataaacaaacaaaaaatc

SEQ ID NO: 5576 - DNA, 150 bp, Homo sapiens; identical to SEQ ID NO: 5248

SEQ ID NO: 5577 - DNA, 279 bp, Homo sapiens
aatcccagcactttgggaggccgaggcgggcagatcacgaggtcaggagatcgagaccatcctggctaacacggtgaaaccctgtctctatgaaaaatacaaaaaattagccgggcgtggtggcgggcgcctgtagtcccagctacttgggaggctgaggcaggagaatggtgtgaacccaggaggcagagcttgcagtgagcggagatcgggccactgcagtccagcctgggcaacagagcaagactccgtctcaaataaaaaacaaaacaaaacaaa

SEQ ID NO: 5578 - DNA, 198 bp, Homo sapiens
aaccccgtctctactaaaaatacaaaaaaattagctgggcgtggtggtgggcgcctgtagtcccagctactcgggaggctgaggcaggagaatggcgtgaacccaggaggcggcttgcagtgagccgagatcgcgccactgcactccagcctgggtgacagagcgagactctgtctcaaaaaaaaaaaaaaagcaatt

SEQ ID NO: 5579 - DNA, 287 bp, Homo sapiens
acgcctgtaatcccagcactttgggaggccgaggtgggcggatcacgaggtcaggagatcaagaccatcctggctaacacggtgaaaccccgtctctactaaaaatacaaaaaattagccgggcgtggtagcgggcgcctgtaatcgggggtactccggaggctgaggcaggagaatggcgtgaacccgggaggcggagcttgcagtgagccgagattgcgccactgcactccagcctgggcgacagagcgagacttcatctcaaaaaaaaaaaaaaaaaaaaaaaa

SEQ ID NO: 5580 - DNA, 135 bp, Homo sapiens
ctactcaggaggctgaggcaggagagtggcgtgaacccgggaggcagagcttgcagtgagccgagatcgcgccactgcactccagcctggatgacagagcaagactccgtctcaaaaaaaaaagaaaaaaagaca

SEQ ID NO: 5581 - DNA, 266 bp, Homo sapiens
atttgggaggccgaggcgggcggatcacaaggtcaggagatcgagaccatcctggctaacacggtgaaaccccgtctctactaaaaatacaaaaaaattacccgggcgtggtggtgggcgcctgtggtcccagctactcgggaggctgaggcaggagaatggtgtgaacccgggaggcggagcttgcagtgagccgagatcgcaccactgcactccagcctgggcgacagagcgagactccatctcaaaaaaaaagaaataagaaa

SEQ ID NO: 5582 - DNA, 322 bp, Homo sapiens
cggccgggcgcggtggctgacgcctgtaatcccagcactttgggaggccgaggcgggcggatcacgaggtcaggagatcgagaccatcctggctaacacggtgaaaccccgtctctactaaaaatacaaaaaattagccgggcgtggtagcgggcgcctgtagtcccagctactcgggaggctgaggcaggagaatggcgtgaacccgggaggcggagctttcagtgagccgagatcgcgccactgcactccagcctgggcgacagagcgagactccgtctcaaaaaaaaaaaaaaaaaaaaaaaaaaaaaaaaaaaaattc

SEQ ID NO: 5583 - DNA, 250 bp, Homo sapiens
gggcggatcacgaggtcaggagatcgagaccatcctggctaacacggtgaaaaccctgtctctactaaaaatacaaaaaattagccaggcttggtggcgggcgcctgtagtcccagctactcgggaggctgaggcaggagaatggcgtgaacccgggaggcggagcttgcagtgagctgagatcgcactactgcactccagcctgggcgacagagcgtgactccgtctcaaaaaaaagcaattagaaact

SEQ ID NO: 5584 - DNA, 142 bp, Homo sapiens; identical to SEQ ID NO: 5249

SEQ ID NO: 5585 - DNA, 40 bp, Homo sapiens
tgagactccgtctcaaaaaaaaaaaaaaaaagtgaaaagg

SEQ ID NO: 5586 - DNA, 181 bp, Homo sapiens
caaaagttagccgggcgtagtggcgggcgcctgtggtcccagctactcgggaggctgaggcaggagaatggcgtgaacccgggaggcggagcttgcagtgagccgagatcgcgccactgcactccagcctgggtgacagagcgagactccgtctcaaaaaaaaaaaaaaaaaaaaaagatt

SEQ ID NO: 5587 - DNA, 281 bp, Homo sapiens
tcccagcactttgggaggcctaggcgggcggatcacgaggtcaggagatggagaccatcctggctaacacggtgaaaccccgtctctactaaaaatacaaaaaaaaattagccgggcgtgatggcgggcgcctgtagtcccagctactcaggaggctaaggcaggagaatggcatgaacccaggaggcagagcttgcagtgagccaagatggcgccactgcactccagcctgggcgacagagcgagactccgtctcaaaaaaaaaaagacaacaacaacaa

SEQ ID NO: 5588 - DNA, 122 bp, Homo sapiens
cgggaggctgaggcaggagaatggcgtgaacccaggaggcggagcttgcagtgagccgagatcgcgccactgctctccagcctgggcgacagagcaagactctgtctcaaaaaaaaaaaaga

SEQ ID NO: 5589 - DNA, 123 bp, Homo sapiens
aggcaggagaatggcgtgaacccgggaggcggagcttgcagtgagccgagatcccgccactgcactccagcctgggcgacagagcgagctccgtctcaaaaaaaaaaaaaaaaaatgctgtta

SEQ ID NO: 5590 - DNA, 176 bp, Homo sapiens
aaaattagccgggcataatggcgggtgcctgtagtcccagctactcaggaggctgaggcaggagaatggcatgaacccaggaggcggagcttgcagtgagtggagatcgcgccactgcactccagcctgggcgacagagcgagactccgtctcaaaaaaaaaaaaaaaaaaaaatc

SEQ ID NO: 5591 - DNA, 270 bp, Homo sapiens
tgggaggccgaggcaggtggatcacgaggtcaggagatcgagaccatcctggctaacacggtgaaaccccgtctctactaaaaatacaaaaaattagccgggcgtggtggcgggcgcctgtagtcccagctactcgggagactgaggcaggagaatggcgtgaacccgggaggcggagcttgcagtgagccgagatcgcgcccctgcactccagcctgggcgacagagcgagactccgcctcgaaaaaacaaaaacaaaaacacaaagtc

SEQ ID NO: 5592 - DNA, 301 bp, Homo sapiens
ggccaggcacggtggcttacgcctgtaatcccagcagtttgggaggccgaggcaggcggatcacgaggtcaggagatcgagaccatcctggctaacacggtgaaaccccgtctctactaaaaatacaaaaaaaattagccgggcgtgttggcgggtgcctgtagtcccagctactcgggaggctgaggcaggagaatggcatgaacccaggaggcggagcttgcagtgagccgagattgtgccactgcactccagcctgggcaacagagcaagactctgtctcaaaaaaaaaaaaaaaaga

SEQ ID NO: 5593 - DNA, 237 bp, Homo sapiens
catcctggctaacacggtgaaaccccgtctccactaaaaatacaaaaaattagccgggcgtggtggcgggcgcctgtagtcccagccactcgggaggctgaggcaggagaatggcgtggacccgggaggcggagcttgcagtgagcggagatcgcgccactgcactccagcctgggcgactgagcaggactccgtctcaaaaaaaaaaaaaagaaaagaaaaaaagaaagaaagaaa

SEQ ID NO: 5594 - DNA, 301 bp, Homo sapiens
cccggtggctcacgcctgtaatcccagcactttgggaggccgaggcgggcggatcacaaggtcaggagatcgagaccatcctggctaacacggtgaaaccccgtctctactaaaaatacaaaaaattagctgggcgtcgtggcgggcgcctgtggtcccagttactctggaggctgaggcacgagaatggcgtgaacccaggaggcggagcttgcagcgagctgagatcgcaccactccactccagcctgggcaacagagcgagactctgtctcaaaaaaaaaaaaaaaaaaaaaaaaatc

SEQ ID NO: 5595 - DNA, 88 bp, Homo sapiens
gcggaggttgcagtgagctgagatcgcgccactgcactccagcctgggcgacagagcaagaatccatctcaaaaaaaaaaaaaaaaag

SEQ ID NO: 5596 - DNA, 278 bp, Homo sapiens
cctgtaatcccagcactttgggaggcctaggcgggtggatcacgaggtcaggagattgagaccatcctggctaacatggagaaaccctgtctctactaaaaatacaaaaaattagccgggcgtagtggcgggcgcctgtagtcccagcaactcgggaggttgaggcaggagaatggtgtgaacctgggaggtggagcttgtagtgagccgagatcgcgccactgcactctagcctgggcaacacagcgagactccgtctcaaaaaaaaaaaaaaaaga

SEQ ID NO: 5597 - DNA, 214 bp, Homo sapiens
ccccgcctctactaaaaatacaaaaaattagccgggcgtggtggcgggcgcctgtggtcccggctactcgggaggctgaggcaggagaatggcgtgaacccgggaggcggagcttgcagtgagccgaggtcgcgccactgcactccagcctgggcgacagagcgagactccgtctcaaaaaaaaaaaaaaaaaaaaaaaaaagattacacaata

SEQ ID NO: 5598 - DNA, 299 bp, Homo sapiens
ataggccaggcgcggtggctcacgcctgtaatcccagcactttgggaggccaaagcgggcggatcacgaggtcaggagatcgagaccatcctggctaacacggtgaaaccccgtctctactaaaaatacaaaaaattagcccgctgtggtggcgagcgcctgtagtcccagctacttgggaggctgaggcaggagaatggcatgaacccgggaggtggagcttgcagtgagccgagatcacaccaccgcactccagcctgggtgacagcacgagactccgtctcaaaaaaaagaaaaga

SEQ ID NO: 5599 - DNA, 297 bp, Homo sapiens
  SITE (22): n equals a,t,g, or c
  SITE (29): n equals a,t,g, or c
  SITE (94): n equals a,t,g, or c
  SITE (261): n equals a,t,g, or c
aaagttggctgggcgcgatgcntcacgcntgtaatcccagcactttgggaggccgaggcgggtggatcacgaggtcaggagatcgagaccatcntggctagcacggtgaaaccccgtctctactaaaaatacaaaagattagccgggcgtggtggcgggcgcctgtagccccagctactcgggaggctgaggcaggagaatggcgtgaacccgggaggcggagcttgcagtgagccgagatcgcgccactgcactccagcntgggcgacagagcgagactccgtctcaaaaaagaaa

SEQ ID NO: 5600 - DNA, 177 bp, Homo sapiens
ccgggcacggtggcgggcgcctgtagtcccagctactcaggaggctgaggcaggagaatggcatgaacccgggaggcggagcttgcagtgagccgagatcgcgccactgcactccaccctgggcgacagagcgagactccgcctcaaaaaaaaaaaaaaaaaaaaaaaaagaaggtc

SEQ ID NO: 5601 - DNA, 296 bp, Homo sapiens
aagccaggcacagtggctcacgcctgtaatcccagcactttgggaggctgaggcgggtggatcatgacgtcaggagatcaagaccatcctggctaacatggtgaaaccccgtctctactaaaaatacaaaaaaattagccaggtgtggtggcgggcacctgtagtcccagctacttgggaggctgaggcaggagaatggcgtgaacccgggaggcggagcttgcagtgagccgagatcgcgccactgcactctagcctgggcaacagagcgagactccatctcaaaaaaaaaaaaa

SEQ ID NO: 5602 - DNA, 318 bp, Homo sapiens
tgactttggccgggcgcggtggctcacgcctgtaatcccagcactttgggaggccgagacgggcggatcacgaggtcaggagatcgagaccatactggctaacacggcgaaaccccgtctctactaaaaataccaaaaattagctgggcgtggtggcgggcgcctgtagtcctagctacttaggaggctgaggcaggagaatggagtgaacccgggaggcggagcttgcagtgagccaagatcgcgccactgcactccagcctgggcgacagagcgagactccgtctcaaaaaaaaaaaaaaaaaaaaaaaaagaaca

SEQ ID NO: 5603 - DNA, 275 bp, Homo sapiens
accactttgggatggcgaggcgggcggatcacgaggtcaggagatcgagaccatcctggctaacacagtgaaaccctctctctactgaaaatacaaaaaaaattatctgggcatggtggcgggcgcctgtagtcccagctactcgggaggctgaggcaggagaatggcgtgaacccgggaggcggagcttgcagtgagccgagatcgcgccactgcactccagcctgggtgacagagtgagactccgtctcaaaaaaaaaaaaaaaagaaaaaaa

SEQ ID NO: 5604 - DNA, 154 bp, Homo sapiens
tgtagtcccagctactcggtaggctgaggcaggagaatggcgtgaacccaggaggccgaggttgcagtgagctgagatagcaccactgcactccagcctgggcgacagagcgagactccgtctcaaaaaaaaaaaaaaaaaaaaaaagggccgc

SEQ ID NO: 5605 - DNA, 177 bp, Homo sapiens
caccaaccactcgggcatggtggcgcgcgcctgtagtcccagctacacggcaggctgaggcaggagaatggcgtgaacccgggaggcggagcttgcagtgagttgagatcgcgccactgcactccagcctgggcgacagagcgaaactccgtctcaaaaaaaaaaaaaaaagacaaa

SEQ ID NO: 5606 - DNA, 187 bp, Homo sapiens
aaaatacaaaaaatagccgggcgtagtggcgggcgcctgtagtcccagctactcaggaggctgaggcaggagaatggcgtgaacccgggaggcggagcttgcagtgagccgagatcgcgccactgcactccagcctgggcgacagagccagactccgtcccccagccaccaaaaaaaaaaaacaatt

SEQ ID NO: 5607 - DNA, 307 bp, Homo sapiens
gccgggcgcggtggctcacgcctgtaatcccagcactttgggaggccgaggcgggcggatcatgaggtcaggagatcgagaccatcctggctaacacggtgaaaccccatctctactaaaaatacaaaaaattagccaggcgtggtggcgggcgcctgtagtcccagctactcgggaggctgaggcaggagaatggcgtgaacctgggaggcggagcttgcagtgagccgagatcgcgccactgaactccagcctgggcgacagagcgagactccgtctcaaaaagaaaataaaaaagaaaaatttc

SEQ ID NO: 5608 - DNA, 166 bp, Homo sapiens
ggcgtgcgcctgtagtcccagctactcgggaggctgaggcaggagaatggcgtgaacccgggaggcggagcttgcagtgagccgagatcgtgccactgcactccagcctgggtgacagagcaagactccgtctcaaaaaaaaaaaacaaaaaaaacatgtaggcag

SEQ ID NO: 5609 - DNA, 1209 bp, Homo sapiens
attcacacctgtaatcccagcactttgggaggccgaggcaggcagatcacaaggtcaggaaattgagaccatcctggctaacacggtgaaaccccatctctactaaaaatacaaaaaattagccgggcatagtggtgggcgcctgtagtcccagctactcgggaggctgaggcaggagaatggcgtgaacccaggaggcagagcttgcagtgagcagagatggcaccactgcactccaacctgggagacagagcgatactccgtctcaaaaaaaaaaaaattagctgggtgtggtggcacacacctatagtcccagctacttgggaggctgaggtgggaggatcatctgagcccaggagatggaggctgcagtgagtttatgattgtgccactctgcgctccaacctgggcaacagagcgagaccttgtctaaaaaaaaaaaagtgggccaggcgtggtggctcatgcctgtaatcccagcactttgggaggccaaggtgggcagatcatctgaggtcaggagttcgagaccagcctgaccaaaatggcaaaaccccatctctaataaaaatacaaaaaaattagccaggcgtggtggtatgtgcctgtaatcacagctactagggaggctgaggcaggagaatcgctggaaccaggaagcgggattgtagtgagccaagatcgtgccattgcactgcagcctgggtgacagagcaagactctgtatcaaagaaaaaaaaaaaaaaaggtcaggattgcccagggcctatgggaagggagagatgaattggcagatttttagcacaacgaatatgatactgtgcactgtgaatatgatactgtgcactgtgaatatgatactgtatgatactataatgccagatacaagacatatgcaccttggccaggcacagtggctcatgcctgtaaccccagcactttgggaggcagaggcaggcagattacctgaggtcaggaattcgagaccagtctggccaacatggcaaaaccccgtctctgctaaaaatacaaattagctgggcgtggtggcacatgcctctagtcccagctactcgggaggctgaggcaggagaacagcttgaacccgggacatagaggttgcagtgatccgagatcgcgccaccacactccagcttgggtgacagagcaagacaccctctcaaaaaaaaaaaaaaaaaaaaaaaaaaa

SEQ ID NO: 5610 - DNA, 142 bp, Homo sapiens; identical to SEQ ID NO: 5251

SEQ ID NO: 5611 - DNA, 306 bp, Homo sapiens
tggggccgggcgcagtggctcacgcctgtaatcccagcactttgggaggccgaggcgggcggatcacgaggtcaggagatcgagaccgtcctggctaacacggtgaaaccctgtctctactaaaaatacaaaaaattagccgggtgtggtggtgggcacctgtagtcccagctactcagagaggctgaggcaggagaatggcgtgaacccgggaggcggagcttgcagtgagccgagatcgcgccaccgcactccagcctgggcgacagagtgagaatccgtctcaaaaaaaaaaaaaaaaagact

SEQ ID NO: 5612 - DNA, 3098 bp, Homo sapiens
ctcatatttttcccagacgcggaggttggggtcatggcgccccgaagcctcctcctgctgctctcaggggccctggccctgaccgatacttgggcgggtgagtgcggggtccagagagaaacggcctctgtggggaggagtgaggggcccgcccggtgggggcgcaggactcagggagccgcctccggaggagggtctggcgggtctcagcccctcctcgcccccaggctcccactccttgaggtatttcagcaccgctgtgtcgcggcccggccgcggggagccccgctacatcgccgtggagtacgtagacgacacgcaattcctgcggttcgacagcgacgccgcgattccgaggatggagccgcgggagccgtgggtggagcaagaggggccgcagtattgggagtggaccacagggtacgccaaggccaacgcacagactgaccgagtggccctgaggaacctgctccgccgctacaaccagagcgaggctggtgagtgaacccggccgggggcgcaggtcacgaccaccccccatccgccacggaccgcccgggtccctcagagtctccggatccgaaatctaccccgaggcagcgggacccgcccagaccctccacccgggagagtcccaggcgcctttacccaggttcattttcagtttaggccaaaatccccgcgggttgggcggggagggggcggggctagctgggcggggctgactgcggggaccggctagggtctcacaccctccagggaatgaatggctgcgacatggggcccgacggacgcctcctccgcgggtatcaccagcacgcgtacgacggcaaggattacatctccctgaacgaggacctgcgctcctggaccgcggcggacaccgtggctcagatcacccagcgcttctatgaggcagaggaatatgcagaggagttcaggacctacctggagggcgagtgcctggagttgctccgcagatacttggagaatgggaaggagacgctacagcgcgcaggtaccaggggccatgggcgccttccctatctcctgtagatctcttgggatggcctcgcacaaggttgggaggaaagtggacccaatgctaggatatcgccctccctctagtcctgagtaggaagaatcttcctggctttcgagatccggtaccagagagtgactgtgagagtccgccctgctctctgggacaattaagggatgaaatttctgagggaatggagggaagacagtccctggaataccgatccgcggtcccctttgagccctccaacagccttgggccccgtgacttttctctcaagttttgttctctgcctcacactcaatgtgtttgaggctctgattccagtccctcggcctccacttaggtcagggccagaagtccctgctcccccctcagagactctaactttccaaggaataggagattttcccaggtgtctgtgtccaggctggtgtctgggttctgtgctcccttccccaccccaggtgtcctgtccattctcaggttggtcacatgggtgctgctggggtttcccatgaggagtgcaaagtgcctgaattttctgactcttctcagatcctccaaaggcacacgttgcccaccaccccatctctgaccatgaggccaccctgaggtgctgggccctgggcttctaccctgcggagatcacgctgacctggcagcgggatggggaggaacagacccaggacacagagcttgtggagaccaggcctgcaggggatggaaccttccagaagtgggccgctgtggtggtgcctcctggagaggaacagagatacacatgccatgtgcagcacgaggggctgccccagcccctcatcctgagatggggtaaggagggagatgggtaaagaggggaacgaggggtcatgtcttttctcagggaaagcaggagcccttctggagctcttcagcagggtcagggctgaggcctggagatcagggcccctcaccttcccttcctttcccagagcagtctccccagcccaccatccccatcgtgggcatcgttgctggccttgttgtccttggagctgtggtcactggagctgtggtcgctgctgtgatgtggaggaagaagagctcaggtaggaaggggtgaggagtggagtctgagttttcttgtcccactgggggttgcaagccccaagtagaagtgtgccctgcctcattactgggaagcaccatccacactcatgggtctacccagcctgggccctgtgtgccagcacctactcatttgtaaagctcctgtgaaaatgaaggacagattcttcacttcgatgattatggtggtgatgggacctgatcccagcagtcacaaatcacaggggaaggtccctgctgatgacagacctcaggagggcagttggtccaggacccacatctgctttcttcatatttcttgatcctgccctggatctacagttacacttttctggaaacttctctgggatcaaagactaggggtttgctctaggaccttatggccctgcctcctttctggcctctcacaggacattttcttcccatagatagaaacagagggagctactctcaggctgcaggtaagatgaaggaggctgatccctgagattgttgggatattgtggtcaggagcctatgagggagctcacccaccccacagttcctctagccacatctgtgggctctgaccaggtcctgtttttgttctaccccaatcactgacagtgcccagggctctggggtgtctctcacagctaataaaggtgacactccagggcaggggccctgatgtgagtggggtgttgggggggaacagaggggactcagctgtgctattgggtttctttgacttggatgtcttgagcatgaaatgggctatttagagtgttacctctcactgtgactgatacgaatttgttcatgaatattttctctatagtgtgagacagcttccttgtgtgggactgagaagcaagatatcaatgtagcagaattgcacttgtgcctcacgaacatacataaattttaaaaataaagaataaaaatatatctttttatagataca

SEQ ID NO: 5613 - DNA, 131 bp, Homo sapiens
ttttttttttgagacagagtctcgctctgtcgcccaggctggagtgtagtggcgcgatcttggctcactgcaagctccgcctcccgggttcacaccattctcctgcctcagcctcccaagtagctgggact

SEQ ID NO: 5614 - DNA, 214 bp, Homo sapiens
ttctgtttgttagttttccttctaacagtcaggcccctcttctgcaggtctgctggagtttgctgggggtccactccagaccctgtttgcctgggtatcaccagcagaggctgcagaacagcaaagattgctgcctgctccttcctctggaagcttcgtcccagaggggcacccagcagatgccagccagagctctcctgtatgaggtgtctgt

SEQ ID NO: 5615 - DNA, 1096 bp, Homo sapiens
ggcagctttcttacaaacccatccttctgaaatgttgcttcaaattcatcctctgctccccagtcccactattccacacatactgttactgtttctttatcctactttctcaattttggaacatagttgcagttactgcattgaatacctgtgggtttgcctgttgttctgtctgtctctgtggttcttgtaatagtggatcccagagataaaatggacagttgtaatgcacagttaattcagaaactagaccttacttgctgtgtgaaataccaactaaattctcagtgaactcagctgagctttatctccttttgtttccccaatttataatttcagttcaggcccagaaagatggaatcccagctaagaaatacaagttacaccctgtactagcagcccatgtgtgcatgttctttaagtgctcttgcagctatgtcatttatattgattttccctgtattattataagcaaagcaaatttgaggaaaaaaacccataataccacacctcatttttttcaagtaatagggtcataagtctcattcttcatataatatgttgagtatgcaatatattatgtgttaggctctggaaaggcagaggttagatcatgttacagatcatatctgattaggcagataaacagtattttaaccttttccttattatatgtaacttgctttcaggttttttaatgttactattatgtctttaatatattatctttatttgtacttttgtatacagaagtgattttccttttttaaaaaaaattgtgtctttaggatggactccaaagatgtggaatcagtaggtttaaggaatatggatattttggctggcaaggtggctcacacctgtaatcccagcactttgggaggctgaggtgggtggatcacctgaagtcaggagttcgagaccagcctgaccaacttggcgaaaccctgtttctactaaagacacacaaaaaattagccagtggtggtggcatgtgcttgtagtcccacttagctactcgagaggctgaggcaggagaatcgcttgaacccgggaggcagaggttgcagtgaggcaagatggcacctctacactc

SEQ ID NO: 5616 - DNA, 268 bp, Homo sapiens
cggccgaattctgccctccgctaacgagctatagctttgtggaaatgggcgagtggcgtgcccttgtgagcctcagggccgcatctgtaaaatgggcataactgtcatgcctgtctttaagaacagccttgggggtaaatgagtggaactcatggaaagatctcagcccacaaccttccacagaacaggcgcttctcacacagtaagtagcaggagtgcagaggctgcaggcatgaatccagccagactgcctgggttcaagtcccag

SEQ ID NO: 5617 - DNA, 293 bp, Homo sapiens
catgaacgctaatgcactttacatcttccatcagtgctttcttatttatttctataaaggcggtattaatatctgaatttaagagtccaagagaatgtaccgcttttattaatggtctaagatcttttattttgttaagaaatggaagatgtgaaaagcaaagacatttattatcatgttgtcatttttattctctttccctgcctagaacatagccattaaaatatacatactatcatttatttttaaagttgttaatatattttatatactttttccaataaaatgtatga

SEQ ID NO: 5618 - DNA, 4802 bp, Homo sapiens
tttaatttcaaacgttaatatattttctattttatattggacatatgcatctgtaacccctcatttgcagcaactatcacatcctcataaaaggggcaaaatttgtaagatgcctcttaaaataaatattcttttttataaaataataaaacttcaaataaatattctttacactaaacaatatgttgaaaaaattagaaaataaaggttgaattttactgtaactgtacaatatacatgaagtccaaagggaaatcagagtcttacaataaaggctttctgtaaggcaaaatacaatctaaaaacatactgattgattcacattcttccgaatgtacaacatattagtataatattttgtgtctgtgccatgtagtatggcacaacttgtttttcacagttgcaaatattattgtatatacaaaaatatagcacattctctctggagaaaacaatggaaaaaagtcatctgctaatttacaagttttgcaagtactattcacaaacaaaaactttgcctaggagtgtctgtgttgctttagcttatgcaatacatgggtcaccaagttctgtatctcatactttgagctccattagctgagttctaacaagcatatcagttaaaacggcacatggacaaaaagcatttcaccgcaaacagcaaagactatcccaactttctattaacagtgccaagattataactgtttagttggttgcatatgtgtattaaaaaaagacagaaaaaatcctcattactgtaatattcctgattaatgatgctatgttggtttttcaaagttcctaggggggacagtgggaactttgcagcaaactgtgtttgagtttttacagcggcaaccaggcctgttaacccggtcataacacccctggcacaatttaaggcaacccttggctggaaggtaacaccataaacaaggcaaaaagagggacatgacacccatggctgaccatcgtgtacaacagtgagactggctgcaagaacatgggttgtcagcacagttgtcctcatcatcattagaacagtgatagaagagacctttcacacagcatacacaagtcccatagtcaatcacgttctgggccgagcaaaggcactgcttgtcgcagatccagtctgatggcagaggccttgggtaggtgcactccttacatttgcacttgccacagtcctcacacctgtaggcgtgcaggcccaaatcttccttgctcagtggcttaagctcacctggcttgagctcagatttgggttgcacccggattatgccatcagcaacaggcccggaggagaaggatgatcctagcagtctctgttcagaggagctgctgctggtacttgtcctcgtactgctccgcgaccctgagctgaccgtgcttatggatctggacagagaggctcgtgcagaagaatggacctgcgagtgctggagcctaggaggctggcggtgctcaggcagaccgtggagtctctcgtgtttgtgctgagtggaggggcgaggagcaggcttgagcccaggtcttgggacgacagtaggcccctctgtgtactcattggtgtttcggatggctctgatctgatccagagacaagacatgtacctgctgggtgagggcgtctctggggtcgggctccccacgctgtctgccaccgtcacggggcgtctgcagcaagggctgcgacccgttgccactctgagctctggcctccatcaggtcttggaagtgtggtcactccagcaggcttagaacacatctgaactcctgaggaagccaagaggaaagaacggttgatactctaagatacttcccactctccacccacctgaattgactcctcacttcccactttccctagagaaacaggatttgaaatggaatggcagtagggaggtattagccatatgatcaacaacgcatgtacccaaaagtaaaaattacggcgggctactgacaattctgtaatcctgtgacgtacaacaatacaaaactgatctttgagtcacttaagtaagaattccttattcaaagaaacatacaatttgtaaggttcaggttcaacgtaaaaatcgcaaggaagtattgctggaatataacactgctaccaatgttttcaaaagttgaaaatcctttcaaaatttgaaataggtttccatttgtcatagtcatttttgccttaagcgttaataatgcaacctagaagattctttcttggttcttaatttttacttttacatcaaacactttaactgtgacgtatacggcattctgtaactttttcaaaccaggtagaatgaatatggcatgcaaaaaagtaaatacccaaattctacaacaatcatgccattttttattaattgtatagtagcacaaagttatagaactaaaagcaaatcaaatcctattaggtgccagaaacacattaaagcaaacttaacaagaagaagacatgaatttattttcaacttctcaacaacttaagaattaactattttacagtctgatagcctagaacaccaccttagattctgcagctaaaaggttgttctccctgctaattgagaacacaaacgaagtgataataaccagaaaagcgttttaaaaattcaaatgtcacatttcgtatctagcattctgtcaaggaattccttaaactgcagtccttcttcaatttcaaaacgatcaccccctttcccaagcctatatgacaataaaaagtataaaacaggcaaaagtggacctttatccgatctccgctctttagaatagaggccacagcgaacaaggcaggtgacaaacgtctcccaattcggagcaaggcagtgctggaaaccggatctcctcacctccaaaagaatggcagaagacaacgctgctctttgctttcacttagtttatcgcctctctgtgccccaacaccgtccccagcaggtgggacacagccgatccccaggggagtttctccaggcggactgacgctgtccatgggccaggctgcccccctgcttacgatccccagactcagacaggcgggggccgcgggcgcctccgaagggtacgtgtcacgaaatgcaggagcacacttcccccgcctccctctccccagctaagatctcccccaactcaagagaactgccttccagccccaaggagccactccgcccccaggcagaggtcacgccgcccactgccaggctttctgcaaagcccctcggacatccggcacaggtttcccaccccgacactgcgagcacgaaagccctgcctgagacacgcagccaggacgcacaagtccaacccacgcacacacagcgactccacgctgcactgaccgaagggggcattgcctgtaatctgcacacgcctatctccttttgggtcgagagaaaaaaaaaagatatcatatttcttaaagtgaaagaaaaatggctttttaaaaaaagggcattttccagggtcccactgctcactccgggcgcgcaggacccagctcccggagctgtaaactttcggtgcagatttgcttgcagtcaaagtagcatctttgaaataaaagggggcttttttgtttttattttttaagtgatttctgccgatccgatccctggcctccttcttcaaagctggactccctacctccgcccctcttctctttcccagtcccccctcccctttgaaagtgctttgaaacccccattaagaacagtgtgtgatcagactgaggattaggggaaaagaacttcagctctagggtggggcaaacggacacagaaactgctttgtaaaaaacacacaagaatccaaattaaaacacagcaacaacaacaacaaaaggaaataaaaaattgcctattttgccacctactttcaggtaatggaaaatgatcgcgaccgcttgatgactttcttcctgcgctgggtcagcccgagcttccaaaaataaaataagtgtgacccaggctgaccacgaagaacggaagagagagagctgcacttccgaaccgcagagacccggcgccaggcagggcgacgctcccacccgctccgggctagactgtccacacggagcagaggcgggcactccctccacccggcaccctgcctttttctcaccctggaagtctcctgcccccgaggcgggcaacctgtgtcccccagccccaccagcgccccgcctagggacagcctctccctggactttgccttccaccaagaggaagaacaggttagaaatgcgggcgcctgcaaaggcaacctggaaaatacaaagtgtttttctctccctctcccgctctcagcgccgaattcgcggccagtgcacggctgggagcagacttcaggctagctgtcctccgtcccaaccccctagagcgcgggcgcgcggggtcgcctgtcggggacactgcacggggtgcatacagaagtccccgcagaggcaggccgagcccaagccccgggcgaggcaggtccgcggggagcgccccggatcctcgcgaagaccctgcgggatttgagaaagggaggctcggggagagacggacccaactcctggtccggctgcacctactccatgttgcccacaacgcgccggccgcggcgccaggaggggaagagccaaacgtgcctcaccgtgatcgcggctttgcaccaacccctctcccttggattctcttctttctgcgatgtgcaaataaatccagtctcgatgcaaacttttttcctttctttccaacctctgctttagaccaacttccgagcaatcggcgggagaaaaaaagagaattc

SEQ ID NO: 5619 - DNA, 160 bp, Homo sapiens
gcctgcctgcctctgtagactccacctctgggggcagggcatagccaaacaaaaggcagcagaaacctctgcagacttaaatgtccctgtctgacagctttgaagagagtagtggttctcccagcatgcagctggagatttgagaacggacagactgcct

SEQ ID NO: 5620 - DNA, 906 bp, Homo sapiens
ccccagagtgtgatgttcctcttcctgtgtccatgtgttctcattgttcaattcccacctatgagtgagaatatacagtgtttggttttttgttcttgcgatagtttactgagaatgatgatttccaacttcatccatgtccctacaaaggacatgaactcatcattttttatggctgcatagtattctatggtgtatatgtgccacattttcttaatccagtctattattgttggacatttaggttggttccaagtctttgcaatagtgaatagtgccgcaataaacatacgtgtgcatgtgtccttatagcagcatgatttatagtcctttgggtatatagcaaaggatggctgggtcaaatggtatttctagttctagatccctgaggaatcgccacaccgacttccacaatggttgaactagtttacagtcccaccaacagtgtaaaagtgttcctatttctccacatcctctccagcacctgttgtttcctgactttttaatgattgccattctaactggtgtgagttggtatctcattgtgcttttgatttgcatttctctgatagccagtgatggtgagcattttttcatgtgttttttggctgcataaatgtcttcttttgagaaatgtctgttcatgtcctttgcccactttttgatggggttgtttggttttttcttgtaaatttgtttgagttcattgtagattctgcatgttagccctttgtcagatgagtaggttgcgaaaattttctcccattttgtaggttgcctattcactctgatggtagtttcttttgctgtgcagaagctctttagtttaattagatcccatttgtcaattttggcttttgttgccattgcttttgatgttttagacgtgaagtccttgcccatgcc

SEQ ID NO: 5621 - DNA, 2705 bp, Homo sapiens
ttttcctccaaacagatttattgaatacagcaaaattctatatacaaagtgacctggacctgctgcttcaaaacatgatcctttcttactaatatcttgatagtcggtccatagagcattagaaagcaattgactcttaaataaacagaaaagtgcctaatgcacattaaatgaatggcctaactactggaactttagtagttctataaggtaattaacataggtaggatccagttcctatgacaggctgctgaagaacagatatgagcatcaagaggccattttgtgcactgccaccgtgatgccatcgtgtttctggatcataatgttcctgaaatgcaggaagaaaatattcagtaaaacgtaatcagtgggacttcactgcaagattaaagatgttgtttgctttaggatacaatatttaaaataatgtaattgtttctacgtataaaagcaatatttaaacataacaaaacatttgggaaatacataaacatatagcatgtgaacacgaaatgaatccttaatcctactacacacagacaaccactgttaatatttccctggttctttgtttcggttttttaggcactgtcttgctatgttgcccaagctggcctcaaactcctgggctcaagcaatcctgcttcagccacctcagtagctggaactacaaaaaaaaggctttactggtctttgttttctttgcatgtatatgatacagtcatgtgctgcataacaatgcttcagtcaacagtggaccctacatatgatggtggtcccgtaagattataatggaactgaaaaattcctattgcctagtgaccttttaaccgtcccagcatcacatagcacaacacactactcacatgtttgtggtaatgctggtgtaaacaaattgtgctgccagtcataaaaagtatagcacatacaattatgtacagtacgtaacgcttgataataataaatgactatgctatggtttatgtatttactatactttttttcttttttttgagacggagtcttgctctgttgcccaggctggagggcagtggcgtgatctcagctcactgcaacctctgcctcccgggttcaagcaattctcctgcctcagcctcctgagtagctaggattacaggtgcctgccaccatgcctaatttttgtatttttagtagagacagggtttcaccatgttggttaggctgtctcacactccttacctcaagtgatctgcccgccttggcctcccaaagtgctgggattacaagtgtgagccaccatgccgggcctactttttatcattattttagagtatactactcctacttattaagacaaggttaactataaaacagcctcagacaggtcctttaggaggtattccagaaggtatcatcattacaggagatgacaactccatgcatgttactgccctggatgaccttccagtgggagaagatgtggagatagaagccagtgatattgatgatcctgaccctgtgcaggcctaggctaatgtgtgtttcttctttgcttttaacaaaaaagtctaaaaagtaaaaaagtttaaaaaaagaatttttgtacagctgtacaactgttttaagtgttattataaagtcaaaaagttttattgactcactcagagcaacttccagtgttgtaagctccattatggtaagtgccctattcagatataccttttaaaaaatttccctataccatacttttactgtatcttctctacgtttagatacataaataccactgttataactgcctacattatttaggctacaaatctttgtagtctaagagcaatacagcctaggtgtgtaatagggtgtaccacctaggtttaagtacactctatgatgttcatacaacaaaactgcctgacacatttctcagaacatatccccattgttaagcaatgcatgactgtatgttttttctttttacaaggctgtgatagtagcagttgtatatatatactttttttcacatattattctgaggaccatcacttggaatatctttagtaattttattgctttagaagtaatttttggctgggtgcagtgactcattcctgtaatcccagcactttgggaggctgaggcgggcaaattactggagcccaggagttcgagaccagcctgggaaacatggtgaaacctcatctctacaaaaaaatacaaaaattagctgggtgtggtagtgtacacctgtagtctcagctacaactcgggaggctgagttgggtgaatcgcttgagcccggtggggttgaagtcacagtgacccatgatcacaccactgtactccagcctggtgccagagcaacaccctgcctcaaaaagaaaaaaaaaaaaagtaatttttattctctgattagttttcctttgtgctatttgttactttctttttgttggtaaactgatagcttctgccaattcttattcttcatttaaatagcattgtggcctgagagcacattagctttagggatcaacttgtctgttcctgtgattcaaaagattaagaacttttcccaaagtagtctgaataaggaatcactgatgaacacagggccggcccccgccaattttaccaggaatttttctgaacaaaaaggaaaggatctgctgaaatctactcacccattatctgattctagacacaccacaggaatatcagtg

SEQ ID NO: 5622 - DNA, 368 bp, Homo sapiens; identical to SEQ ID NO: 5252

SEQ ID NO: 5623 - DNA, 823 bp, Homo sapiens
tgttttcttactcaaaacactgtttaacatgacacttggctcctttctttgcatctctgagctcttgtaagatttgagaaacaattacattcaagggcagtatgcttaacctactgacatttgaactacaaagcaaagatgttcagattttcctgaaggatcaagtctttcaggccacagaattttctgtcctagttttttaatacagtagtccccccatatctgcaattttcctttccacattcaattacgcatggtcagctgtagtctaaaaatattaaatggaaaattccagaaataaacaattcataagttttaaattacacactattctgagtagcatccatgatgtgaattcttgctttgtgcggcatattcatgcttaaattctccccacccattagtcacttagtagccatctcagttgtcacggactgtcactgtatctcagtgcttgttttcaagtaacctttatcttactaatggccccaaagcacaagtgtaatgatgctagcaattcagatatgccagagaagctgtaaagtgctttcttaaagcgaaaaggtaaaagttattaatttaagcaagggaataaaaatcatatgctaaggttgctaagatcgagggtgagaatgactcttcctgctgtacaagatgatcatccccagagcacatagccgtcagactttccaaggtcaatacaaaagaaagaatcttaaagacagctagagaaagggtcatataactcatcatgctaacagcagacttctcagcagaaactttacaagtcagaagagattgggggactgtttttagcattctt

SEQ ID NO: 5624 - DNA, 140 bp, Homo sapiens
ttttcccctctttttttttttttttttttttttttttgagacggagtttcgctctgtcgcccaggctggagtgcagtggcgcgatctcgactcactgcaagctccgcctcccgggttcacgccattctcctgcctcagcc

SEQ ID NO: 5625 - DNA, 4706 bp, Homo sapiens
tattattatactttaagtttcagggtacatgtgcacaatgtgcaggtttgttacacatgtatacatgtgccatgttggtgtgctgcacccatcaactcgtcatttagcattagatatatctcctaatgctatccctccccactccccctaccccacaacagtccccggtgtgtgatgttccccttcctgtgtccatgtgttctcattgttcaattctcatctatgagtgagaacatgtgctgtttggttttttgtccttgcaatagtttgctgagaatgatggtttccagcttcatccatgtccctacaaaggacatgaactcatccttttttatggctgcatagtattccatggtgtatatgtgccacattttcttaatccagtctatcattgttggacatttcggttggttccaagtctctgctattgtgaatagtgccgcaataaacatacatgtgcatgtgtctttatagcagcatgatttacaatcctttgggtatatacccagtaatgggatggctgggtcaaatggtatttctagttctagatccctgaggaatcgccacaccgacttccacaatggttgaactagtttacagtcccaccaacagtgtaaaagtgttcctatttctccacatcctctcagcacctgttgtttcctgactttttaatgatctccattctaactgttgtgagatggtatctcattgtggttttgatttgcatttctctgatggccagtgatgatgagcactttttcatgtgttttttggctgcataaatgtcttcttctgagaagtatctgttcatatcctttgcccactttttgatggggttgtttgtttttttcttgtaaatttgtttgagttcattgtagattctggatattagccctttgtcagatgagtaggttgcaaaaactttctcccattctgtaggttgcctgttcactctgatggtggtttcttttgctgtgcagaagctcttcagtttaattagatcccatttgtcaattttgtcttttgttgccattgcttttggtgttttagacatgaagttcttacccatgcctatgtcctgaatggtattgcctaggttttcttctagggtttttatggttttaggtctaacatgtaagtctttaatccatcttgaattaatttttgtataaggtgtaaggaagggatccagtttcagctttctacatatggctagccagttttcccagcaccatttattaaatagggaatcctttccccattgcttgtttttgtcaggtttgtcaaagatcagatagttgtagatatgtgacattatttctgagggctctgttctgttccattggtctatatctctgttttggtaccagtaccatgctgttttggttaccatagccttgtagtatagtttgaagtcaggtagtgttatgcctccagctttgttcttttggcttaggattgacttggcaatgtgggctcttttttggttccatatgaactttaaagtagttttttccaattctgtgaagaaagtcattggtagcttgatgggaatggcactgaatctttaaatgaccttgggcagtatggccattttcacgatattgattcttcctacccatgagcatggaatgttcttccatttgtttgtatccccttttatttcattgagcagtggtttgtagttctccttgaagaggtccttcacatcccttgtaagttggattcctaggtattttattctctttgaagcaattgtgaatgggagttcactcatgatttggctctctgtttgtctgttattggtgtataagaatgcttgtgatttttgcacattgattttgtatcctgagactttgctgaagttgcttatcagcttaaggagattttgggctgagatgatggggttttctagatatacaatcatgtcatctgcaaacagggacaatttgacttcttcttttcgtaattgaatgccctttatttccttctcctgcttgattgccctggccagaacttccacactatgttgaataggagtggtgagagagggcatccctgtcttgtgccagttttcaaagggaatgcttccagtttttgcccattcagtatgatattggctgtgggtttgtcatagctagctcttattattttgagatacatcacatcaatacctaatttattgagagtttttagcatgaagcattgttgaattttgtcaaaggctttttctgcatccattgagataatcatgtggtttttgtctttggttctgtttatatgctggattacgtttattgattttcgtatgttgaaccagccttgcatcccagggaggaagcccactagatcatggtggataaactttttgatgtgctgctgtatttggtttgccagtattttattgaggatttttgcatcaatgttcatcaaggatattggtctaaaattctcttttttggttgtgtctctgccaggctttggtatcaggatgattctggccacataaaatgagttagggaggattccctctttttctattgattggaatagtttcagaaggaatggtaccagctcctccttgtacctctggtagaattcggctgtgaatccatctgttcctggactttttttggttggtaagctattgattatttcctcaatttcagtgcctgttattggtatattcagagattcaacttcttcctggtttagtcttgggaggatgtatgtgtcaaggaatttatccatttcttctagattttgtagtttatttgcatagaggtgtttatagtattctctgatggtagtttgtatttctgtgggatcggtggtgatatcccctttatcattttttattgcgtctatttgattcttctctcttttcttctttattagtcttgctgtctatcaattttgttgatcttttcaaaaaaccagctcctgaattcattaattttttgaagggttttttgtgtctctatttccttcagttcttctctgatcttagttatttcttgccttctgctagcttttgaatgtgtttgctcttgcttctctagttcttttaattgtgatgttagggtgtcaattttagatctttcctgctttctcttttgggcatttagtgctataaatttccctctacacactgctttgaatgtgtcccagagattctggtatgttgtctttgttctcattggtttcaaagaacacctttatttctgccttcatttcgttatgtacccagcagtcattcaggagcaggttgttcagtttccatgtagttgagtggttttgagtgagtttcttaatcctgagttctagtttgattgcactgtggtctgagagacagtttgttataatttctgttctttgacatttgctgaggagtgctttacttccaactatgtggtcaattttggaataggtgtggtgtggtgctgaaaagaatgtatattctgttgatttggggtggagagttctgtagatgtctattagttccgcttggtttagagctgagttcaattcctgggtatccttgttaactttctgtcttgttgatctgtctaatgttgacagtggggtgttaaagtctctgattattattgtgtaggagtctaagtctctttgtagttcactaaggacttgctttatgaatctgggtgctcctgtattgggtgcatatatatttaggacagtttgcttttcttgttgaattgatccctttaccattatgtaatggccttctttgtctcttttgatctttgttggtttaaagtctgttttatcagagactaggattgcaatccctgcctttttctgttttccatttgcttggtagatcttcctccatccctttattttgagcctatgtgtgtgtctgcacgtgagatgggtttcctgaatacagcacactgatgggtcttgactctttatccaatttgccagtctgtgtcttttaattggagcatttagcctatttacattcaaagttagtattgttatatgtgaatttgatcctgtcattattatgtcagttggttattttgctcattagttgatgcagtttcttcctagcctcgatggtctttacaatttggcatgtttttgcagtggctggtactggttgttcctttccatgtttagtgcttcttccttcaggagctcttttaggacaggcctggtggtgacaaaatctctcagcatttgcttgtctgtaaagtattttatttctccttcacttatgaagcttagtttggctggatatgaaattctgggttgaaaattcttttctttaagaatgttgaatattgccccccactctcttctggcttgtagagtttctgccaagagatcagctgttagtctgaggtgcttccctttgtgggtaacccgacctttctctctggctgcccttaacattttttccttcatttcaactttggtgaatctggcaattatgtgtcttggagttgctcttctcgaggattatctctgtggtgttctctgtatttcctgaatttgaatgttggcctgccttgctagattggggaagttctcctggataatatcctgcagagtgttttccaacttggttccattctccccgtcactttcaggtacaccaaacagacgtaggtttggtcttttcacatagtcccatatttcttggaggctttgtttctttttattcttttttctct

SEQ ID NO: 5626 - DNA, 129 bp, Homo sapiens
ttttttttgagatggagtctcgctctgtcgcccaggctggagtgcagtggcgctatctcggctcactgcaagctccgcctcctgggttcacgccattctcctgcctcagcctcccgagtagctgggact

SEQ ID NO: 5627 - DNA, 661 bp, Homo sapiens
tactcagcaaagctattttaagattagccttgttattgcatttgtcaataattcattcctttttattgccaagtagtattcaattgtatagacatcacatttttaaaaatccattcactgttgatggacattttgggatattacaaataaagctgctgtggatattcatgaacaagtctttgtgtagacatacgcttttattttccttggataagtaggagtgatagttgaatcctgtgttaggtgtatgttgacctttttaagaacctgcctgttttccaaagtggttgtaccattttacattccccaccagtagtgtatgagagctgtcctcttcaaattgactggagaagctttgcttccatctcttcttcttggctaatagaaggtgcctcttggctgggcgtggtagctcacgcctgtaatcccaacactttgggaggcctaggcgggtggatcacctgaggtcaagagttcgaaaccagcctggccaacatgacaaaaccctgtctctactaaaaatacaaaaattagccgggcgcagtggtgggcgcctgtaatcccagctactagggaggctgaggcaggagaatcacttgaacctgggaggtggaggttgcagtgagccgagatcgcaccattgcattccagcctgggtgac

SEQ ID NO: 5628 - DNA, 1548 bp, Homo sapiens
agcagctcttgcagtgggtgggcgacttcgtgctgtacctgctggccagcctacccaaccaggtgcgccatgctctcccctaaggccccgccccccacctgggcccccatctcatcaggaccccgcttccctgcccctgcccctcaaaaccacctcagccccgcccctagttggagtcccgcccctacttggagtcccgcccctacttggagtcccgcccctgcttggagtcccacctcagccccgcccctggttggagtcccacccctacttggagtcccacttcctgagtctgtctcttcttaaacccccacttcctagccctgccccacttcctagccctgccccacttcctagccctgccccacctcggagccctgccccatctcggagccctgccccacctcggagccctcccccacctcggagccctcccccacctcggagccctgccccacctcggagccctgccccacctcggagccctgccccacctcggagccctcccccacctcggagccctcccccacctcggagccctgccccacctcggagccctcccccacctcggagccctcctctccatgaagcctctgctgtaagaagcctttccttggccacacccttcctgcccattctcaaagccccgcctcccaggccctgctccttctcagccccacccctacacgaaggccggttcgccttgctcctgctgctgctgcccccaccccttaccctccccagctccctgcgcctggggtgggcggccttgaaatcaagtctccatccacacctccaccttcagttttgcggcttgtgcgcccctgaccagggctccaacctcgcccccacccccccgccggtacactctgtcctgccccagctgtgatttcttctgccccacccacccggcttcatcctgccctggggcccgcccttctccaccgcgcccatcacggacggtttgaagtccctctcttctttttgtggggctttaggctgccaggggccacccctggggcctccccttccctggtcctctcagctcccagtacagtcaccaggggcccgggcccgcagctgtaggagggggcggctgctcctccacgtgcaggtggggatattggcctcagccagagcctcgtcttagtcttgtggactctcagggatgggacgactctgcaaatggggctgtcctgggccctgcagggctctgagcagcgtccccggcatccacccactcggtgccagaagcaccccagtcctgaccaccacaaatgtcccagaccctgcccattgccccccggtcggggttccaccgaccccaagacacttcatcccatcgccatctgccccccgccgccccagccacaccgatgcctctttcgggcagggttccctgctgaggccgggccacagctttctgcgggacggcacctcgctgggcatgcttcgggaattgatggtggtcatccgcatctggggccttctgaagcccagctgcctgcccgtgtatacggccacctaggatacccaggacagcatgtc

SEQ ID NO: 5629 - DNA, 4704 bp, Homo sapiens; identical to SEQ ID NO: 5253

SEQ ID NO: 5630 - DNA, 131 bp, Homo sapiens
ttttttttttgagatggagtctcgctctgttgcccaggctggagtgcagtggcgcgatctcggctcactgcaagctccgcctcccgggttcacgccattctcctgcctcagcctcccgagtagctgggact

SEQ ID NO: 5631 - DNA, 1090 bp, Homo sapiens
gaatgtaatttattttttttaattatactttaagttttagagtacatgtgcacaacgtgcaggtttgttacatatgtatacatgtgccatgttggtgtgctgcacccattaactcgtcatttagcattaggtatatctcctaatgctatctgtgccccctcccccaaccgcacaacaggccccggtgtgtgatgttccccttcctgtgtccatgtgttctcattgttcaattcccacctatgagtgagaacatgtggtgtttggttttttgtccttgtgatagtttgctgagaatgatggtttccagcttcatccatgtccctacaaaggacatgaactcatcattttttatggctgcatagtattccatggtgtatatgtgccacattttcttaatccagtctatcattgttggacatttgggttggttctaagtctttgctattgtgaatagtgccacaataaacatacgtgtgcatgtgtctttatagcagcatgatttatagtcctttgggtatatacccagtaatgggatggctgggtcaagtggtatttctagttctagatccctgaggaatcgccacactgacttccacaatggttgaactagtttacagtcccaccaacagtgtaaaagtgttcccatttctccatatcctctccagcacctgttgtttcctgactttttagtgattgccattctaactggtgtgagatggtatctcattgtggttttgatttgcatttctctgatggccagtgatgatgagcattttttcacgtgtcttttggctgcataaatgtcttcttttgagaagtgtctgttcatatcctttgcccactttttgatggggttgtttgtttttttcttgtaaatttgtttgagttcattttagattgtggatattagccttttgtcagatgagtagattgcaaaaattttctcccattctgtaggttgcctgttcactctgatggtagtttcttttgctgtgcagaagctctttagattaattagatcccatttgtcaattttggcttctgttgcccttgcttttggtgttttagacatgaagtccttgcccgtgcc

SEQ ID NO: 5632 - DNA, 125 bp, Homo sapiens
gctacttgggaggctgaggcagaagaatcgcttgaacccaggaggcagaggttgcagcgagctgagatcgcaccattgcactccagcctgggcaacaagagtgaaactccatctcaaaaaaaaaa

SEQ ID NO: 5633 - DNA, 522 bp, Homo sapiens
gtactcaataagcttgttaaaatatttgttgagtgaataaaataatctaaatcatttcctaagtttctttaatgatcaaagaaattaaaccactatgaatctggtttcaggtattaaacacagattaaatattcatttttaggatacatttgttttaaatttaacacatggattcatgaataatgctatagagaatccattatttaaaatattaatataaatatctatgcatgagggggaaataattgggaaattttatctcctctgacaaaggggaaaaaggccatttaaaaatattactttttccccttcagacagagagcagaggtgagccacacgaaatctaagttcgcatgaaagagcgatgataaaaaatgcaggtgctgtgaaacatttatatggaccaagtgtaagacagtatgtaggcctgaatttgaaatgacattttggtataaaacagatctcccaaaggcaaatttgaaacttccagaaaagtcttaaaatgacatctttcaaaatgaa

SEQ ID NO: 5634 - DNA, 184 bp, Homo sapiens
ttttttttttgaggtggagtctcgctctgtcgcccagactggagtgcagtggcgcaatctcggctcactgcaagctccgcctcctggattcacgccattctcctgcctcagcttcccgagtagctgggactacaggcgcccgcaccacgcccagctaatttttttgtatttttagtagagacgg

SEQ ID NO: 5635 - DNA, 126 bp, Homo sapiens
ttaagatttctaactacatttacttccttgacgaagcttcggccgtgcgtagactggtcagcttccggggtgactagagcagggctgtggtcactttcactggcatctgggtcctgtcgtaggatc

SEQ ID NO: 5636 - DNA, 319 bp, Homo sapiens
ttgtgctcttttttttttttttcttttttttttttgagacggagtctcgctctgtcgcccaggctggagtgcagtggcgcgatctcggctcactgcaagctccgcctcccgggttcacgccattctcccgcctcagcctcccgagtagctgggactacaggcgcccgccaccacgcccggctaattttttgtatttttagtagaggcggggtttcactgtgttagccaggatggtctcgatctcctgacctcatgatccgcccgcctctgcctcccaaagtgctgggattacaggcgtgagccaccgcgcccggccaaa

SEQ ID NO: 5637 - DNA, 316 bp, Homo sapiens
gaattctttttttttttttttttttttgagacggagtctcgctctgtcacccaggctggagtgcagtggcgcgatctcggctcactgcaagctccgcctgccaggttcacgccattctcctgcctcagcctcccgagtagctgggactacaggcgcccgctaccacgcccggctaattttttgtatttttagtagagacggggtttcaccgtgttagccaggatggtctcgatctcctgacctcgtgatccgcccgcctcggcctcccaaagtgctgggattacaggcgtgagccaccgtgcccggccaagaattc

SEQ ID NO: 5638 - DNA, 316 bp, Homo sapiens
caaatttttttttttttttttgagacggagtctcgctctgtcgcccaggctggagtgcagtggcgggatctcggctcactgcaagctccgcctcccgggttcacgccattctcctgcctcagcctcccaagtagctgggactacaggcgcccgccactacgcccggctaattttttgtatttttagtagagacggggtttcaccgttttagccgggatggtctcgatctcctgacctcgtgatccgcccgcctcggcctcccaaagtgctgggattacaggcgtgagccaccgcgcccggccgaattgaacaaatt

SEQ ID NO: 5639 - DNA, 203 bp, Homo sapiens
ctcctgcctcagcctcccgagtagctgggactacaggcgcccgccaccacgcccggctaattttttgtatttttagtagagacggggtttcaccgtgttagccaggatggtctcgatctcctgacctcttgatccgcccgcctcagcctcccaaagtgctgggattacaggcgtgagccaccgtgcccggcacaaggtaaaat

SEQ ID NO: 5640 - DNA, 294 bp, Homo sapiens
acttcttttttttttttttttgagacggagtctcgctgtcacccaggctggagtgcaatggcgcaatctcggctcactgcaagctccgcttcccgggttcacgccattctcctgcctcagcctcccgagtagctgggactacaggcacccgccacctcgcccggctaattttttgtatttttagtagagatggggtttcaccgtgttagccaggatggtctcgatctcctgacctcgtgatccgcccgcctcagcctcccaaagtgctgggattacaggcgtgagccaccgcgc

SEQ ID NO: 5641 - DNA, 1057 bp, Homo sapiens
tttatttatttatttatttatttattttgagacggagtctcgctctgtcgcccaggccagagagcagtggcgcaatctcgactcactgcaagctccgcctccggggttcacgccattctcctgcctcagcttccagagtagctgggactacaggcgcccgccaccacacccggctaattttttgtatttttagtagagactgggtttcaccgtgttagccaggatggtcacgatctcctgatctcatgatccgcccgcctcagcctcccaaagtgctgggattacaggcttgagccaccgcgcccggcctgtcagatgcttttttgcatctgttgtgatgatcatatggtttttgcccttcactttgcttgtatggtttatcacatttatagatttgtttatgttgaaccacccttgtattcctgggataaatctcacttgatcatggtgaatgcttcttttaatgggctgttgaatttggtttgttagtattttgttgaggatttttgcatatttgttcatcagggatattgacctgtaattttcttgtagtgtccttgtctcgctttggtatcagggtaatgccgacgtcgtaaaatgagtttggaagtgtatctggaagtattcgtcgtctttgatttttgggaagagtttgagaagaattggtactagttttaccttaagtgtttggcagaattcttctggtctcttgatgttttcattgccttgctgagcatagatccaggtacttatgagcaaaattctactcagtctgacaactctgcttagaattatgaatgtgattaaatgcagtggtcactctacctttctaaggtagttcagctcaagttacagcgatccagtcctgatagagctttgaaacctcaagtctattatataacgtaatgaaaaattggcttggtgaggtggttcacacctataatcccagcactttgggaggctgaggtgggtggatcacttgagttcggagttcaagaccaggctgggcaacatggcaaaaccccacttctaccaaaaaaaaaaaaaaaaaaaaaaa

SEQ ID NO: 5642 - DNA, 3471 bp, Homo sapiens
ctttttttttttttttttttttttgagacggagtctccctctgtcgcccaggctggagtgcagtggcgcaatctcggttcactgcaagccccacctcctgggttcacgccattctcctgcctcagcctcctgagtagctgggactacaggcgcccgccaccacgcccagctaattttttgtatttttagtagagacggggtttcaccgtgttagccaggatggtctcgatctcctgacctcatgatccacccgcctcggcctcccaaagtgctgggattataggcgtgagccaccatgcccggccaagagctaagctattctaagctataacgtgtattatcaaaacaattaaggccaggcacagttgctcacacctgtaatcacaacactttgggaggctgaggcgggtggatcatttgaggtcaggagtttgagaccagcctggccaacatggtaaaaccctgtctctactaaaaatacaaaaaaattatccaggtgtggtggtgcatgcctgcagtcccggctactcgggaggctgaggcacaagaataagaattgcttgagtggggaggtggaggttgcagtgagccaagatcatgccactgcactacaggctaggagacagagtgagaccctgtcttaaaaaaaaagcaattaggccaagtgcagtggctcatgcctgtaatcccagcactttgggaggccaaggagggcagatcacgaggtcaagaaatcgagaccagcctggccaacatggtgaaaccctgtctctactaaaaatacgaaaattagctgggtgtggtggcgcgtgcctgtagtcccagctactcgggaggctgaggcaggagaatgccttgaacccgggaggtggaggttgcagtgagccgagatcacgccactgcactccagcctgacgacagagtgggaatccatctaaaaaaagaaagaaagaaattggctggagaatcgcttggacccaggggtggaggttgccatgagctgagattgtgccactgcactccagcctaggcaacaagagcaaaactccgtctcaaaaaaaaaaaaaaaaatcccagcactttgggaggccaaggagggcagatcacgaggtcaagaaatcgagaccagcctggccaacatggtgaaaccctgtctctactaaaaatacaaaaaattagctgggtgatggtgacgggtgcctgtagtcccagctacttgggaggctgaggcaggagaatggcatgaacctgggaggcggagcttgcagtgagccgagatcacaccactgcactccagcctgggcaacagagcaagactctgtctcaaaaaaaaaaaaaaaaagaaaagaaaagaaattaaacagtgtgatgtgacaaaaagtgatagggggttggagacagcttttctgttggatggttaggaatggcttcttagaaaagatgactgacacatgggaggctgatgtggcagatcacgaggtcaggagatcaagaccatcctggctaacacggtgaaaccccgtctctactaaaaaatagaaaaaattagccgggtgtggtggcgggcgcctgcagtcccagctactaaggaggctgaggcaggagaatggcgtgaacccgggaggcagagcttgcagtgagctgagatcacgccactgcactccagcctggacgacagagcgagactgccatctcaaaaaaaaaaaaagaaagaaaagatggctgacacagagggcagagctgagagccaagagggcagaaaagagccatagaaaaccatttccaggcctggaagcctaaaggaatttcccagctggatttgcagttgctttggattggtgactcctttttacctttcattgttaggggacctgcaggttcctttgcctgctgtgcagctacagctccattacaccaagacaatagggatgcagcagagagagttactggtgcagggcacctagtgcagagatgggaagaggccctcaaatctatctccccgagcaattctgggagagggtttctaaggggactgtggagggtaggggattgtggagggtaaggttttgggcaactgggtcattgattgattgggggaaggatgtagaagctgcgtttttgggggaattagctccttgtggggtccttcaggtcagctgagtcagtagttccatgaggacctgaaggaatctcttttcttttcttcttcttcttcttttttttttttttttttgagatggagtctctctctgtcgccaggctagaggtgcagggggtcgcaggctagaggtgcagtggcatgatcttggctcactgcaacctccacctcccgggttcaagcaattctcctgcctcagcctcccaagtagctgggactagaggtgcgtgccaccacacccagctaatttttgtatttttagtagagacagggtttcaccatgttggccagggtggtctcgatctcttgacttcgtgatcggcccccgccccaccctcggcctcccaaagtgctgggatcacaggagtgagccacggtgcccagccttaatttttgtattttcagtggagacggggtttcaccatgttgatcaggctggagtgcaatggtgcaatcttggctcactgcaacattcgcctcctggatttgaatgattctcctgcctcagcctcccaagtaactgggattacaggaatgcgtcaccacgcccggctaattttgtatttttttagtagagacggggtttcaccatgttggtcaggctgtcttgaacttctgacctcaagtgatccacctgctttggcctcccagagtctgaaggaatatctcaaagggaacacttaatgttgtgtaatgtccaggttgtgatccatagagcagttaaaggtaaaggtaactataattttttttttttttttttagacagagtctccctctctgtcacccaggctggagtgcagtttcacgatctcggcgcactgcaacctccgcctccctggttcaaccaattctcctgcctcagcctctcaagtgtgtgctgccatgccaggctaatttttttttttagacggagtcttgctctgtcacccaggctggagtgcagtggcacaatctcggctcactgcaacctccggctcctgggctcaaacaatgtgttttttcccctagtactttggtgtttgattatcttttttttttttttttttttttttttgagatagagtctcgctctgtcacccaggctggagtgcagtggtgcaatcttagctcactgcaagctctgcctcctggggttcatcccattctcctgcctcagcctcccaagtagctgggactacaggcacccaccaccacgcccggctaattttttgtatttttagtagagacggggtttcaccatgttagccaggatggtctcgatctcctgacctcatgatctgcccgcctcagcctcccaaagtgctgggattaca

SEQ ID NO: 5643 - DNA, 308 bp, Homo sapiens
gtttattcaacttttttttttttttgagacggagtctcactctttcgcccaagctggactgcagtggcgctatcccggctcactgcaagctccgcctcttgggttcatgccattctcctgcctcagcctcccgagtagctgggattacaggcgcccaccaccacgcccggctaattttttgtatttttagtagagacggggtttcaccgtgttagccaggatggtctcgatctcctgacctcgtgatccgcccgcctcggcctcccaaagtgctgggattacaggcgtgagccaccgcgcccggcctg

SEQ ID NO: 5644 - DNA, 322 bp, Homo sapiens
gaatttttttttttttttttttttttttttttttttttttgagacggagtctcgctctgtcgcccaggctggagtgcagtggcgcgatctcggctcactgaaagctccgcctcccgggttcacgccattctcctgcctcagcctcccgagtagctgggactacaggcgcccgctaccacgcccggctaattttttgtatttttagtagagacggggtttcaccgtgttagccaggatggtctcgatctcctgacctcgtgatccgcccgcctcggcctcccaaagtgctgggattacaggcgtcagccaccgcgcccggccg

SEQ ID NO: 5645 - DNA, 307 bp, Homo sapiens
gaaatttttcttttttattttctttttgagacggagtctcgctctgtcgcccaggctggagttcagtggcgcgatctcggctcactgcaagctccgcctcccaggttcacgccattctcctgcctcagcctcccgagtagctgggactacaggcgcccgccaccacgcctggctaattttttgtatttttagtagagatggggtttcaccgtgttagccaggatggtctcgatctcctgacctcatgatccgcccgcctcggcctcccaaagtgctgggattacaggcgtgagccaccgcgcccggc

SEQ ID NO: 5646 - DNA, 214 bp, Homo sapiens
acagacacctcatacaggagagctctggctggcatctgctgggtgcccctctgggacgaagcttccagaggaaggagcaggcagcaatctttgctgttctgcagcctctgctggtgatacccaggcaaacagggtctggagtggacccccagcaaactccagcagacctgcagaagaggggcctgactgttagaaggaaaactaacaaacagaa

SEQ ID NO: 5647 - DNA, 1698 bp, Homo sapiens
ggaagaaaacaatgctggtcccttcatctaaattctgagtattattgaacacttagtacccaactctcaagttgttttgaagattaaatcacataatgtgatgttcccagcacagtgctctgtaacacactcctgagcacatagtacctgcttaataagcattgcataagtatatgtgtacatgttgtttttcagtgcagacttactcagacattgttgccttctcctgtctctgtaaactttaaagagctagcaaagaatgtgttttttcaggatagagattgattgtttatttgatcagaagtatttgtgttgtgatgaatgatgagtgtgagagtctgttctatgcctgctttttctagctaaatgctactaatgatgggtctgtggaagctacatcagcattgacaggagatgtgtttaaaatgcactttcatggatgcttttaaaacctgcagaatcacattacatagtgtggggccagggttaccaaatgatttatatgcacattgaagtttgagaggcaatgcttagctaagtggttcttggcccaggcttctaattaagattccatggccaggttgcagaaatcttttcacttgtgcccttcccgcaggctctgtatattgttctgggtggaagcatccttgttgatataattaagtgcctcatgtgactccaggttgaggccagggtcaaacacgaggaattcaaaatacattcatgagagttgagttcaaactttattccaaagggaggtcacagggtctactatggttggatttggtaggtacaagttaatgtggtccatatccccattgctgtagcagaaattgtggcgtctgtggcaggaaaagagaaagataaattttgatctttgtggagcagctcactgtccttgaatctcacctgttataaagaacataaatgggtggacatgttctgcatgcctggatctttctacctgtgtttgtggtggtagcaggtgaagagattgtgctgattcctttaaaggcatattccaaagatgcaggtgtgacttgtccagagaatatcacctgagaagaaatgctagagaaggatgatgaagagaaaaatggctttttctcaggtgactgtgtctcagattaggagcagtgttcactctgcctcctggaatgccatatgtttagaacttacaaacctgtacttcttgactttatgctgtttctccctataagtttgtttaaacattttttcttctcatgatagtcaagcaactctgaaatatattattttctatatactagagtcttctcgacattctcttcatcttggcttcttctctgccatgcggaattctcatcattaattatgactcgtaatattaaaaatattccctttggctgggcgcggtggctcatgcctattatcccagcactttgagaggccgatgtgggtggatgacctgaggtcaggagttcaagaccagcctggccaacatggtgaaaccctgtcactactaaaaatacaaaaaatagctgggcatggtggcgggtgcctgtaatcccagctacttgggaggctgaggcaagagaatcacttgaacccaggaggtggaggttctggaggttgcagtgagcctacatcgtgccactgcactccagcctgggcaacagagggagactccatctccaaagaaaaaaaaaaaaagaaaaa

SEQ ID NO: 5648 - DNA, 1697 bp, Homo sapiens
ggaagaaaacaatgctggccccttcatctaaattctgagaattattgaactcttaggacccaactctcaagttgttatgaagattaaatcacataatgtgatgttcccagcacagtgctctgtaacacactcctgagcacatagtacctgcttaataagcattgcataagtatatgtgtacatgttgtttttcagtgcagacttactcagacgttgttgccttctcctgtctctgaagttaaagagctagcaaagaatgtggtttttcaggatagagattgattgtttacttgatcagaagtatttgtgttgtgatgattgatgagagtaagagtctgttccatgcctgctttctctagctaaatgctactaatgatgggtctggggaagctacatcagcattgacaggagatgtgtttaaaatgcactttcatagatgcttttaaaacctgcagaatcacattacatagtgtggggccagggttaccaaatgatttatatgcacattgaagtttgagaggcaatgtttagctaagtggttcttggcccaggcttctaattaagattccatggccaggttgcagaaatcttttcacttgtgcccttcccacaggctctgtatattgttctgggtggaagcatccttgttgatataattaagtgcctcatgtgactccaggttgaggccagggtcaaacatgaggatttcaaaatacattcatgagagttgagttcaaactttattccaaagggaggtcacagggcctgctatggttggatttggtagggacaagttagtgtggcccgtatccccattgctgtagcagaaattgtggcatctgtggcaggaaaagagaaagataaattttgatctttgtggaggagctcactgtccttgaatctcacctgttataaagaacataaatgggtggacattttctgcctgcctggatctttctacctgtgtttgtggtggtagcaggtgaagagattgtgctgatttctttaaaggcatattcccaagatgcaggtgtgacttgtccagagaatatcacctgagaagaaatcctagagaaggatgatgaagagaaaaatggctttttctcaggtgactgtgtctcagatcaggagcagtgttcactctgcctcctggaatgccatatgtttagaacttacaaacctgtacttcttgactttatgctatttctccctataagtttgtttaaacactttttcttctcatgatagtcaagaaactctgaaaaaatattattttctatacactagagccttcttgacattctcttcatcttggcttcttctctgccatgcagaattctcaccattaatttatgactcataatattaaaattattccctttggctgggcgcagtggctcatgcctattatcccagcactttgagaggccgatatgtgtggatggcctgaggtcaggagttcgagaccagcctggccaacatggtgaaaccctgtcactactaaaaatacaaaaaatagctgggcatggtggcgggtgcctgtaatcccagctacttgggaggctgaggcaagagaatcacttgaacccaggaggtggaggttctggaggctgcagtgagcctacattgtgccactgcactccagcctgggcaacagagagagactccatctccaaagaaaaaaaaaaaaaagaaaa

SEQ ID NO: 5649 - DNA, 1718 bp, Homo sapiens
gaagaaaacaatgctggccccttcatctaaattctgagaattattgaacacttagtacccaactctcaagttgttacgaagattaaatcacataatgtgatgttcccagcagagtgctctgtaacagactcctgagcacatagtacctgtttaataagcattgcataagtatatgtgtgcatgttgtttttcaatgcagacacgcagacattgctgccttctcctgtctctgtaaactttaaagagctagcaaagaatgtggtctttcaggatagagattgattgtttatttgatgagaagtatttgtgttgtgataagtgatgagtgtaagagtctgttccatgcctgctttttctagctaaatgctactaatgatgggtctggggaagcttcatcggcattgacaggagatgtgtttaaaatgcactttcatggaccctcttaaaacctgcagaatcacattacatagtgtggggccagggttaccaaatgatttatatgcacattgaagcttgagaggcaatacttagctaagtggttcttggcccaggcttctaattaagattccatggccaggttgcagaaatattttcacttgtgcccttaccgcaggctctgtatattgttctgggtggaagcatccttgttgatataattaagtgcctcacgtgactccaggttgaggccagggccaaatatgaggaattcaaaatacattcatgagagttgagttcaaactttattccaaagggaggtcacagggcctgctatggttggatttggtagggacaagttagtgtggcccatattcccattgctgtagcagaaattgcagtgtctgtggcaggggagggcacctgagggcaggaaaagagaaagataaattttgatcttcgtggaggagttcactgtccttgaatctcacctgttataaacaacataaatgggtggacattttctgcatgcctggatctttctgcctgtgtttgtggtggtagcaggtgaagggattgtgctgattcctttaaaggcatattcccaagatgcaggtgtgacttgtccagagaatatcacctgagaagaaatcctagaggaggatgatgaagagaaaaatggctctttctcaggtgactgtgtctcagatcaggcgctgtgttcactttgcctcctggaatgccgtatgtttagaacttacaaacctgtacttcttgactttatgctgtttctccctatatgtttatttaaacattttttcttctcatgatagtcaaggaactctgaaaaaatattttttttctatatactagagccttctcgacattctcttcatcttggcttcttctccgccatgaagaattctcatcattaatttacgactcgtaatattaaaaatattcccttttgctgggcacggtggttcatgcctattatcccagcactttgggagaccgatgtgggtggatgacctgaggtcaggagttcgagaccagcctggccaacatggtgaaaccctgtcactactaaaaatacaaaaaacagctgggtgtagtggcaggtgcctgtaatcccagctactcgggaggctggggcaagagaatcacttgaacccaggaggtggaggttgcagaggttgcagtgagccgacatcgtgccactgcactccagcctgggcaacagagagagactccatctccaaaggaaaaaaaaaaaaaaagaa

SEQ ID NO: 5650 - DNA, 1698 bp, Homo sapiens
ggaagaaaacaatgctggtcccttcatctaaattctgagtattattgaacacttagtacccaactctcaagttgttttgaagattaaatcacataatgtgatgttcccagcacagtgctctgtaacacactcctgagcacatagtacctgcttaataagcattgcataagtatatgtgtacatgttgtttttcagtgcagacttactcagacattgttgccttctcctgtctctgtaaactttaaagagctagcaaagaatgtgttttttcaggatagagattgattgtttatttgatcagaagtatttgtgttgtgatgaatgatgagtgtgagagtctgttctatgcctgctttttctagctaaatgctactaatgatgggtctgtggaagctacatcagcattgacaggagatgtgtttaaaatgcactttcatggatgcttttaaaacctgcagaatcacattacatagtgtggggccagggttaccaaatgatttatatgcacattgaagtttgagaggcaatgcttagctaagtggttcttggcccaggcttctaattaagattccatggccaggttgcagaaatcttttcacttgtgcccttcccgcaggctctgtatattgttctgggtggaagcatccttgttgatataattaagtgcctcatgtgactccaggttgaggccagggtcaaacacgaggaattcaaaatacattcatgagagttgagttcaaactttattccaaagggaggtcacagggtctactatggttggatttggtaggtacaagttaatgtggcccatatccccattgctgtagcagaaattgtggcgtctgtggcaggaaaagagaaagataaattttgatctttgtggagcagctcactgtccttgaatctcacctgttataaagaacataaatgggtggacatgttctgcatgcctggatctttctacctgtgtttgtggtggtagcaggtgaagagattgtgctgattcctttaaaggcatattccaaagatgcaggtgtgacttgtccagagaatatcacctgagaagaaatgctagagaaggatgatgaagagaaaaatggctttttctcaggtgactgtgtctcagattaggagcagtgttcactctgcctcctggaatgccatatgtttagaacttacaaacctgtacttcttgactttatgctgtttctccctataagtttgtttaaacattttttcttctcatgatagtcaagcaactctgaaatatattattttctatatactagagtcttctcgacattctcttcatcttggcttcttctctgccatgcggaattctcatcattaattatgactcgtaatattaaaaatattccctttggctgggcgcggtggctcatgcctattatcccagcactttgagaggccgatgtgggtggatgacctgaggtcaggagttcaagaccagcctggccaacatggtgaaaccctgtcactactaaaaatacaaaaaatagctgggcatggtggcgggtgcctgtaatcccagctacttgggaggctgaggcaagagaatcacttgaacccaggaggtggaggttctggaggttgcagtgagcctacatcgtgccactgcactccagcctgggcaacagagggagactccatctccaaagaaaaaaaaaaaaagaaaaa

SEQ ID NO: 5651 - DNA, 499 bp, Homo sapiens
ttttctgagactcattcaggtctggtcccaccctggagtctctcctcacagaactcattagaggagaccagagatttgggaggtggctcctgctgcctctccagagcttatgctcacaatattctgaaacccaaaagcagataaattagagcaataaactatatattttgaggtcttaacttctttctttctaattaaaaccagtgcttgtagagacattccatcccagtagttactccacaagtcacaagaaagtaaatagaaacacactaaaaaatccctctaaactacacttaaccctttcctttctgtatccctcccatctgtctatatttatctcttatgccatacatttttttaaaaaaatcagtgagaggccgggctctgtggctcatgcctgtaatactagcaatttgggaggtcgaggtgcgtggatcacttgagatcgggagttcaagaccagcctgaccaatatggagaaaccccatctctactaaaa

SEQ ID NO: 5652 - DNA, 399 bp, Homo sapiens
gtctttgcatatgtctttctttaaaaagtgaagtctctcatctttgtttactggtcataaaaacccaggctctgtcacttaatgaatgtttgacaaaatatttatcttgggccagaaagattggtgtcacttgtgagcttgttagaaattcagaaactcaggttttacctcaggtttcttgaaacaaaatctgcataaaaagatctccagtttattgttgtacacattaaaatttgagaggtactttataactaagcctgactttttaatctgagaaatatgcagaacttatactgtatgattaaatggagcactcaaaaatgtacatgtctatgttcctgttgttaattttgtactttatcattcaaaaaatatcatcaatacactacactggtattg

SEQ ID NO: 5653 - DNA, 399 bp, Homo sapiens
gtctttgcatatgtctttcttttaaaagtgaagtctctcatctttgtttactggtcataaaaacccaggctctgtcacttaatgaatgtttggcaaaatgtttatcttgggccagaaagattggtgccacttgtgagcttgttagaaattcagaaactcaggttttacctcaggtttcttgaaacaaaatctgcataaaatgatctccagtttatggttgtacacattaaaatttgagaggtactttataactaagcctgactttttaatctgagaaatatgtagaacttatactgtatgattaaatggagcactcaaaaatgtacatgtctatgttcctgttgttaattttgtactttatcattcaaaaaatatcatcaatacactacactggtattg

SEQ ID NO: 5654 - DNA, 498 bp, Homo sapiens
cttttctgaggctcattcacgtctggccccaccctggagtttctcctcacagaactcattggaggagaccagagatttgggaggtggctcctgctgcctctccagagcttatgctcacaatattctgaaacccaaaagcagataaattagagcaataaactatatattttgaggtcttaacttctttctttttaattaaaaccagtgcttgtagagacattccatcccagtagttactccacagtcacaaaaaagtaaatagaaacacaataaaaaatccctttaaactacccttaaccctttcctttctgtatccctcccaactctttatatttatctcttatgctatacattttaaaaaaaaatcagtgagaggccgggctctgtggctcatgcttgtaatactagcactttgggaggccaaggtgcgcggatcactttagcttgggagttcgagaccagcctgaccaacatggagaaaccctgtctctactaaaa

SEQ ID NO: 5655 - DNA, 1774 bp, Homo sapiens
atcttattttattttattattattatactttaagttttagggtacatgtgcacaatgtgcaggttagttacatatgtatacatgtgccatgctggtgtgctgcacccattaactcgtcatttagcattaggtatatctcctaatgctatccctcccccctccccctaccccgcaacagtccccagagtgtgatgttccccttcttgtgtccatgtgttctcattgttcaattcccacctatgagtgagaacatatggtgtttggttttttgtccttgtgatagtttactgagaatgatgatttccaatttcatccatgtccctacaaaggacatgaactcatccttttttatggctgcatagtattccatggtgtatatgtgccacattttcttaatccagtctatcattgttggacatttgggttggttccaagtgtttgctattgtgaatagtgccacaataaacatacgtgtgcatgtgtctttatagcagcatgatttataatcctttgggtatatacccagtaatgggatggctgggtcaaatggtatttctagttctagatccctgaggaatcgccacactgacttccacaatggttgaactagtttacagttccaccaacagtgtaaaagtgttcctatttctccacatcctctccagcacctgttgtttcctgactttttaatgattgccattctaactggtgtgagatggtatctcattgtggttttgatttgcatttctctgatggccagtgatggtgagcattttttcatgtgttttttggctgcataaatgtcttcttttgagaagtgtctgtttatgtccttcgcccactttttgatggtgttgtttgtttttttcttgtaaatttgtttgagttcattgtaaattctggatattagccctttgtcagatgagtaggttgcgaaaattttctcccattttgtaggttgcctgttcactctgatggtattttcttttgatgtgcagaagctcttgagtttaattagatcccatttgtcaattttggcttttgttgccattgcttttggtgttttagacaggaagtccttgcccatgcctatgtcctgaatgataatgcctaggttttcttctagggtttttatggttttatgtctaacatttaagtctttaatccatcttgaattaatttttgtagaagatgtaagggagggatccagtttcagctttctacatatggctagccagttttcccagcaccatttattaaatagggaatcctttccccattgcttgtttttctcaggtttgtcaaagatcagatagttgtagatatgcggtgttatttctgagggctctgttccgttccattgatctatatctctgttttggtaccaataccatgctgttttggttactgtagccttgtagtgtaatttgaagtcaggtagcgtgatgcctccagctttgttcttttggcttatgattgacttggtgatgcaggctgttttttggttccatatgaactttaaagtagtttttttccaattctgtgaagaaagtctttggtagcttgatggagatggcattgaatctataaattaccttgggcagtatgaccattttcacgatactgattcttcctacccatgagcatggaatgttcttccatttgtttgtatcctcttttatttcattgagcagtggtttgtagttctccttgaagaggtccttcacatcccttgtaagttggattcctaggtattttattctctttgaagcaa

SEQ ID NO: 5656 - DNA, 100 bp, Homo sapiens
aggctgaggcaggagaatcgcttgaacccgggaggtggaggttgtggtgagctgagatcgtgccattgcacttccagcctgggcaacaagagcgaaactc

SEQ ID NO: 5657 - DNA, 399 bp, Homo sapiens; identical to SEQ ID NO: 5652

SEQ ID NO: 5658 - DNA, 499 bp, Homo sapiens; identical to SEQ ID NO: 5651

SEQ ID NO: 5659 - DNA, 1134 bp, Homo sapiens
aaggcaataggtcggggaaggtgatgaatgttctgtggggcatgtcaaattgggtggaacctctggggccttctgtgggagatgcccagggagcacagatttaggagatgggagcaactagtgtgatggtggtgagggctggttgaaaccctggggagtatgtggagctcatctgtgtttccacagagcttatctcccaggagatagccatcgggagtgccttgcctggcatgttcccctgctgaggtctgttacccaggagcctgcagacacaaagagcaggctggtaatgctgagaagcgaacattcagtacctgtcaccagaacccagcatgggtgttcaacactatctggtgactctgtgagaagaccctatgctcaggggatgaagtgtgttgcttgtgcaagagggatggagagagagtgttttccaagtatatgtgtgtgtgcatgtgtgtgtacccaggtggaaccctcctgcatgctcacatatgcctttatgaatactggaatctctaaacctaccatcatgcatctcgtcttagcttcctacctctctctttctacccctgcaacagccatgttattgccagtaacacatgagaagagtgagggagacctgtctgtagacaagctcagtgtgctgctaaggaggcaggcagcagttctgtcctcatgcgttcccattgtgccctgtcctgggatggcaaatgcaaggccagacaggctctgggctctctggtctgaccactaatagcatcttctcctcccgctaggctgaccagcctccaaggcaggactctgacaccagggttataaatgcatctgtctgggcacattatctaaattgttatgtatcaccctgggtaatggcaaaagtaaaaaccgctgttagctcagtgaataaatccttggtgctgatcaatcattgcacgacatagactcttttaataggcacaatttacacagaggcttggcagactgcttcgtcttctaattgccgatggaaaatggatgccgatctctgctgtgccgtaaaaatgtaaactataaatgacttaaaaacttgtgtgctcccttctccacccagcactcattttaaccttttatttagaaacaaaacaaagaaaaaaa

SEQ ID NO: 5660 - DNA, 2008 bp, Homo sapiens
tcaatgcgcccgccgtgtccatggagagaggctgaggcggccgacctccggcccgaggcaccggggcatcgggacggcgaagatgtcggcttccttagtccgggcaactgtccgggctgtgagcaagaggaagctgcagcccacccgggcagccctcaccctgacaccttcagcagtaaacaagataaaacaacttcttaaagataagcctgagcatgtaggtgtaaaagttggtgtccgaaccaggggctgtaatggcctttcttatactctagaatatacaaagacaaaaggagattctgaagaagaagttattcaagatggagtcagagtgctcatcgaaaagaaagcacagctaacactttgaggaacagaaatgtgctatgttgaagacaaattatccagtgagtttgtgttcagtaacccaaacatcaaagggacttgtggctgtggagaaagctttaatatttgaaatctcaggactcttctggccgtaggttccaggaaagctggtggaagctttggggttcaatgcagaaatcatgtgactgtcacgtgctggaaaataaagtgatacatcttgaaaatgaagccagtgtaacggattctagaagaaatgatatttatattctctataggggacagaaaatgagaagccatcactctctttggatcatttaggtctcttgcatcctttattttagaaccagtttcattaaagttgccttcctgggcacttgtttatccatttcctcaactgtgtgcactccttagatcgctattgaatggcttgaacatccctcagcatttctcccaaccagatcggcgacgcctaaaatccaagacaggacatcctgactgctggtagtaatgtggcggtgcattgtttttccacccaaacttaacatagcctttttatacatttttatgaaaaatttcattttcagctgcctcactgcataccctttaataataccaggcaaagattttcttcaactatagtacagattagttctgagtgatggtatcaaaaggtgagaaagacgtcatccaccttttttttaatccatttcttttgccaccctatatgtctgttcagagatgggatctcaagctgactttgattcttttagttgaggagtctcttaaagccatctagcccacctccctcaattccctatgtgaggaagcaaaaccccagggaagccaaagggctcctctctaccctgactccacaggccgggggagagtagggactctacccccctctccccttccttgtaggtgacacatgttctgccctctgaggcagtcagtgaaggcaaatggtctgacttctttatgtggtcaacattttgatagaatttctttataatttgatagagattatattatttttattttattttgagtgggaagaattttaaaaccttttatatgtgaattaccatcttgtttctttcacctttgaaacaatggtttgtagcagagacgacattgtagcaacccagatatgcttttggaatgtggtcctcactgtacaggagaatgtggggatcttttgttaaaattcccagtgtgcatacactttctggttccttggtccagttgctaaagttcttagtattttagcctaacatatttatcaccaacttttccttaaaagtgttccttttgtcacttagttactgattttcctgggtttgacataataagtattctatgagatgatatatatgctttttctgaaagctaattctcatgaattcaagtagctgagttcctttatgtttcgtttattcactaaagtagctggcacaaaacacaccaaaacctagagtggtagttttatgtaaatgctcatgagtttgtatcaataatataattgttgatccacttataattcgtgcagtactgtatgtatgtagagattgagttgtcaattaaaaaaaatgtggcctctttgtgatcacacacaaaaaaaagcccctatctccaaatacagtca

SEQ ID NO: 5661 - DNA, 295 bp, Homo sapiens
ccgggcgcggtggctcacgcctgtaatcccagcactttgggaggcggaggcgggcggatcacgaggtcaagagattgagaccatcctggccaacatggtgaaaccccgtctctactaaaaatacaaaaattagccaggtgtggtggcaggcacctgtagtcccagctacctgggaggcagaggcaggagaattgcttgaacccgggaggcggaggttgcagtgagccaagatcgcgccactgcactccagcctgggcaacaagagtgaaactccatctcaaagaaaaaaaaaaaa

SEQ ID NO: 5662 - DNA, 1579 bp, Homo sapiens
atataaattcctttttcttattttcaaatttgacattatcatccttgcctcttaaaaagatagattttaattgttttcatacttcatagaaatcaaagtctgtgtttgctacaaattgaatgctcacgttacctgaaatattactttggactgcaggacaggacagtatttattcctaagtagattgactataatctcatgataagtatgtatatgtgcatgggaaaaacacattcaataatagtctttgtgtttaaaactatcatggtatacattttcttatgtggtgcttgaggagtttcattctacagattacaaggtgtaggtttgcaccccaaattctcagggtatgctatttcacccaaatacttgaaagaaaaaggtgccctgtattttatcagtactgttgagggggaaattttttgtgtaagtttgtttgataaaactgcttataaaaatcaaattcacaaaatatgttaggctttcacataatttctaaggagatatatgtagaaataagatatatattatcaagagactgcttatatattcttaactagcttctgggtcctaagtagacctcacaggtgcataaaatcattaataaagcatgtagcacttgctaattggtgccttaagcttgaatctaatcagaattgcagactcgggtcctctgggaaaaaaacatgtccgtctgtggcacgtgtgagtactaggcccaggggaagagtctgaaaattgaattcttttgtgtgtcctgtgtctcagaagagaactgaatgttcagagcagcgtttgtaagctattaacattcagtatttcgtgttgcaactagaacacattattagatttattcctgtttaattcataatggtgcagaataaaacacacacatctgatttgatttctttttctttttttaagtttcataattgctttttatggctagtgttaatggcaaaaagtcctttccagggctccctgaataatctaccatacctgtatccatagcaggtgatgcttttttttatccccactttgaagacgtgtgtttctgtatttacacataaatcatactattgtatattaaagacagcagtggttgaaaagaatgtgaacactgtagaagttatgttggaaaaaaggagagtaaattgtgtgattaatggggaaggatattggataatgttataccccggactatgaaaaaagctggtggtaaatgggaagaatgtgaaattttaaactgctctcaacgtaggaatcttggtggaaaagttcctacctgaggtctgatatgattcaattatagaatgcaatgagcttggccaaggggactttgaatccagccaaggaaactttgaatctcgacagctctgagaatcacattttcagtgcattgaatatggagtaaactatttagacaaggattctgtgagactaggctacttacctttaattgccagcatttgtaaatgattgtgcaatcttgtgtaatggtcttttattttgactgttttggaaaaaaaatgttttattgtttttttttcccagtaaaaattacttcaaagaaaacgta

SEQ ID NO: 5663 - DNA, 17777 bp, Homo sapiens
atgagagtgtgatattttaaagtcagacgcagcaaaaactgtttcagggtgaagaaagacccctttcagccctgttttgcagccctgggtgggggcatgagatagacagcaagcttctgatcttgaagcttgtctagaagacacatcttctaggtctcgtggtcatttggtaggctgacctttgagtgagcgaggccactattgagtggatagcaagaacattggaaccaaagcctcggcacaggcctggcactggctgtacatcagctcttacaactaaacaactcaactaagcaactgaaacgaaacaaaggagcattcgttctctgttgttaggaatcattctgctctgttagggaagggctgcaggaagggcagtttcctgaataaaaatctggctgcgaccagtcccatgtgtctggtaagtaagtaagtaagtaagtgccctttgaagggatcattaagacacagggagcatgaacctgagatcagaagcatttctttactaatttagattctgcgaaatagacggacctctccacccccaaacctaaaacaggccaggacttgtctctgtgctgaaagcaaatagcaagactaactcaagccccagcctctttccacactccctgatacctaaggactgctttctcagctagaccagggtgggcatcagcgacgccttctcagctagaccagggtaggcatcagcgtcctctctccatctctatacccctctctctcacatcaggaagatgaaatgtgtagctctagcggcaacctctagccaggagcccagtggcctctcagattgctttttggccaggtctcagcactgctggcatctttacatcttactccttaaaaccgcctctcgctgaggagccactgcattttgaagaatttctcagtgtctgtcaggaaagtgctcctgctcatttggaacgccacacaccacccgcactcacctgtccaggcgaatgagcaggtcctgtagctttacaaatatgccgctgatgccgcttctccccagggtctctcagttttccaggacaaaaagatttagggcctataccctatgggcaaaacacctaaaatgtcaacagtcaaaatgccattctttttggccatcataagagggagtaggtatcactgctgcatgccagttgtttttgactagaatatgccaaccagagcttgttggggcaggagacgtttttccttacaagcagactgcctgtgccctgtgccctgtttgctacttcactgccatggaatgatccgagtactgtatttcagagctgccccttccccagcagcaaacactcgctgagtccatgtctggcttcaggtgggaggaaatgtttcagatgaaacttactcaattcataccaccctgaaatggaggacagaggtgacaaacttcagtttaataggtttctcaccaagttgtatgttccattggcccaggattcttgcactaatgggtttctatcacatcatgtctataaatgggtgcactttactgtttgaatttgtaactgaagtactggatatttaagtgtgagtaatgtcttcattagaaaatagcagaaccgctcttgtcttttagtgtatttttcaagaaaaaaggaaaggaaagacatcaagcagtggatcacaacatttatagcacaagaaataacttgtatataagcatcaaaaagattaagaattttttaatatgaaaaatatttgcagtgattttaaagtgcttttccagcaatgttcttagggactcctgagacacggttactttatctactggatcagtaaggcacacaattaacaattaacaattaatgtttatttacaaagtaaagggaaaacctgtgtaacatgagaatttggcatgacaaaatggagaccattttgtatctgctgttgtatcttgtccgggttgcagacgtgcactattaaagtcccaagttaatagagcacaaacccttctcgctcctcccccatgtgcccctctttttagatgtgtataacttaaactcgatggctcaggaaaattccactaattagaatcatgtacagtaccccaggtcgttgtccagatatacaagtttgctaatgtagttaagcctggattattaaacacttttcctaaattattgtaaacagaacagcttagagaaaggtattctcagtccttaatattgtatagtagtttatgagcccctctctaaatattggtatttttatattccagagatgtacccaatagaaaaaattaaaaattaatcagtatctaatttaatatccataagtatttttccttagattttagtcacgtacagtgggctatgtggatgtcacttgtgcttcaccatagtttaccactaggtgtcactgtggctctgcactgcgcttgttttgtagcaaagaacagcggcatcccctcgggagagaggagctgcttccagggcaacaggcaagcgggctcagaggttcaggagaaggcaacagaggcctggaaggggtcttcgtgcatctgtgccagttgtgcaagacgaactctttgaacactacatgctttggacttcagccaggcagaggctggaagaaggttgaccagagctcccttgctctggtagagggatgggtacatggagaagccccttcttccccatgagcctccctcctgtcagttcctctcagcctccagcttttataactccagaagcgtcacagttgggtggtttgattcagagagagttatttttctactgcagaaatgccttggacaaaaccagtgctcactgaatctttgccacaaaatggaataggctatcccagggggcaagaggtgcccgcccctgtgcccagcctcctcttgatgctcccagtgcccagcagcctcgcacaccctgcctgtctgttcctgggctgcccatttctcaagaaaccgacctgcaaaggcagccggctgctgcctccacaccgagggctgtgcggtcctgctgctcgctcactgggaggtgcagctctttctcctcttcctctaggaattccagaccgaccatctaccatgactaacaacaatgaacaaagggcttaggggcaagagctacctgcaaagacgtgtcatggaacccttcaccatgcaatgccttgaactcagctctggctgctcccaagaaaaggtggctggctgggggcctggacacaagcacaatggggctggtggagccactgtgcagagctacttgaataatcactgggttttcatcaactccttttgtcatacagaccactcaagggctgaagtgttggtaaccttcatttcggtgtccaaagcctcacagcaggtgagccaccctgagatgcttgtggccacatggtggccacagtcagagctttgaaagtcagtaccaaatgaacgcataattggacaccaaaaatcaagtgttactttcatgtttcctcaccccatcatctcattgcctcctgctgactctgataccgacgctgagctgacttgccaggctgccgctggacgcgtagagatcaggccagcgccgcgctcatttttccaggtagacctactctgtggaacggaagtgccctagctgctttgtttttgtagcacttgctggctgaatttttcttttgctaatcgctaaccagaaagtctggttagagggggctcaactcaatccctttggtccccagcgccagacaagagttaattctggaaaattcagtacttgaatgtacctgccttattgcataccaatttactggggggaaaaaaaaagttaagagatgccggctccagatctccacttcattcacaggtgattttggaaatcctgtaagttacacttcctgttctggttttgttttgttttttgtttcctttggctgattcctgctgagtgaggccagttcctcatcaggctcagggcaggtgccttttcaggcgtggcctcctttccatctagcacagcatctttgtctctgttctgtctcctccaaatccaagatgattttaattagtacagacatgtacagtctacaattaaagagtgatttgtactaatatgattttgattcttcctcctctttgctgtcctttcaagacacttgctggaaaaagctttaatgcacttagttttcctttaggttttctatgactcagatgtaaaggactttctctgtacagtatattatccaatgcatgtttgttctctctcctgatatattgaacaccacacagttgtgaagccgtgcagtggggatgccccacaccccacagaggcatctacccctgtgtataaggaaagacattttcctttgctgtacttgcttgagcagttttattgtctgtacatgtgagctgtgtgagatagatgtgaaaagttcaaatgaatgcattttcctgccccatgtatacagattgtcatctgtacaaggaactgtatgtatgaaagcaaatgtacttatttataaatggctaacacttggaaaaccatggtgttgtgatgcttttctccttccattacagcctcttcagggagctggcttttaagcttaccctcctgaggatgcagtgatgggggcaccctccctcaggaggaattgggcaggttagggctaaggccaaattcccgatgatttgcttggtctcttgtgggacattcagagccacccctttgtgcatttatttgctcggtcacgttattgagcacctcctctcctcagagttggacactgtggtaggccctcaagagagctgtggacaagagacgccgttctaaggagctgtcagcacaggcctgtgacatttgttgagaaaggggggctttttcttcattggaagaggtttctctctagctatacccagggagcactgagctcttgtttcattttgtagctgaagctgcacccaatccagccaccctaccaaagccaaggctgaggtgggctgccagcttgagtggctgtgtttagaggctgcatgctgagagggtagcgagcagagggcacagctcccactgcagacctaagggcttcgtcacaactggaggcccactgcttccaggggctttgtcttttcatcagaaatctggtcgaactccagtcctcaccatatagagagctaggcagctgcattgtgaatggaaaagtggcaggtttcctgcaactggctggagactcaataccatctaaaagggagtggggaagcgggggagcagcactgagcctgcagcctttcctgtttaactgctacctctgtgtttacttcagggacaagcgaggagggagaccacttcctcttgacatcagatttgtgctaaacaaacattcctgctgtgcatacctgcatttcccaaagcctagggaagcagacaaactgcaggcaacacacagcccagcctagatgccacagttgccttcaaagagaagaggggactctggcagcagccacctgctcaatctcaaaaccattcctgggctgctccagttatttcattaaaaaatgggtaagtcggggccgggcacggtggctcacgcctgtaatcccagcactttgggaggctgaggcgggcggatcacgaggtcaggagatcgagaccatcctggctaacacggtgaaaccccgtctgtactaaacaaaatacaaaaaattagccaggcgtggtggcagtcacctgtagtcccagctactcgggaggctgaggcaagagaatggcatgaacccaggaggcagagcttgcagtgagccgagatcgtgccactgtactccagcctgggtgacacagcgagggtccatctcaaaaaaaaaaaaaaagtcattggcaaaaccccagctttttaatttatattttttctttcttttttttttttttttttttttttttttgagacagagtctgtcacccaggctagagtgcaatggcgtgagcccggctcactgcaacctcctcctcccaggttcaaacaattttcctgcctcagcctccctagtagctggaattacaggcacccgccaccatgcccagctaatttttgtatttttagtagagacagggtttcgccatgttgccaaggctggtctcaaactcctgacctcaagtgatccacctacctcagcctcccaaagtgctggaattacaggcataagccactgtgcccgacctagatgttttgttttgtttttagatggagtctcactctgtcacccaggctggagtgcagtggtgtgatcatagctcactgcagcctcaacctcctgagctcaagtgacccacccacctcagcctcccaagtacctgggaccacagtgcatgccaccacgccctgctaacttttgttttgttttgcagagatggagtcttgttatgttgcccaggctggtcttgaactcctggcctcaagctgtcctcccgccttggcctctcaaagtgctgggattacaggcatgagccaccacacctggccaaacccccagctttttaagaagtcctgggacattggaggaaaggaaaaggagtgattcatttaaaatattaatacttcttaaaaagaatttaccctcaaccttaataaaaagctactcagagtagaagcaaacagcaaactcagcagaagtctgtgtagatcctccgaagcactaagtaagtcagactttcttcccctggatatctgctcatgggtaccttttggtaactgcaggcagacacagtacgcacgtgcacatggtggccaaactcccctgcggtcggctgggaatgggtaggcgaaccagcggggaatggagtcaccctctttcagctttaaaaacaagttggaggagcttggagtcttggcagctgagttattccattctcaggaataagatggggcactgataacaggtatcatgtctggaaggccctgtgatgaagagagggcccacatagaagagaaggtgctcagagtccattctaacaggccatcctcttgggaggtccattgtgtcccagacactgtgatagggacttcacatgtgttccctaatgtattcctcacacctcgacagacgacactgctgtctccaaaacaaatgcagaagcagatcctgagagctgaagttgctcagggtcacagaggcacaggtaggcctctgaatcagccacactgacagctcttccctccaccacgctgcctcctctctcagaagggatggtctgaaaagagcaagcaacccgaatggcgccccacggagtgcaggcgctgggtccaggaggatggcttgggaaatgccgcgtgcttgtttggagaaataactctatgccacagtcaagaggagtcgctttgggaccccagtaagaaaatgaggtccctgctattatccagccagagattcgtagaggaagaggtgaagtggctggctggagagggaggcatcatcccttggtgactgggatcacttcaatattcacagagacccataagattcagaggctggtgcaaaaaaaaaaaaaaaaaaaaaaaaaacagaaatgagatgctgactgaggaaccagtttgtgacatgtatcaagccttgtgctttgaatgcttttcagtaaataaaggtccacactcagctgggcgtggtggctcacacctgtaatcccagcactttgggaggccaaggcgggtggatcacctgaggtagggagttcaagaccagcctgaccaacatggagaaaccccatcatctctactaaaaatacaaaattagctgagtgtggtggcgcatgcctgtaatcccagctactcaggaggctgaggcaggagaatcgcttgaacccaggaggcggaggttgcagtgagctgagattgcgccattgcactccagcctgggcaacaagagcgaaactccgtctcaaaaaaataaaataaaaataaaggtccacatggaagccttgattcaggagggactctacaggtgccctaaggaaagacctctccgttctggctcctacacgttagagaccagctacaatgcagaagacaaagttgagaccaacgcggggaagcagggactcctgttaccttattagaggatttgctgttgggtccctttaaatagtgagctctggtgagtttttaaattgctttaagtaagtcagaggtccccagccccagggccacagaccagtatgggtctgtggctgttagaacctggctgcacagtaggaggtgagcagcagcgggtgagcatgaccacctgagctccgcctcctgtcagatcagctgcagcattagattctcataggagtgcagaccctattaattatgaactacgcatgcgagggatctaggttgcatgctccttaggagaatcgaatgatctgtcactgtctcccatcacccccagatgagactgtctagtttcaggaaaacaagctcagggctcccattgattctacattatggtaagttgtataattatttcattatatgttacaatgtaataatataaaaatgcataataaatgtaacgtgcttgaatcatcccaaaactatcccccacccccagccctggtctgtggaaaaattgtcttccacaaaacctgttcctgctgccaaaaaggttggcggccactgctttaagtgacaaggcacaaagcgcacagtacgatcccacccaaatttgccaaaaactcaccttctgcctgagccacgtacgtggatctaaagtggaatctcagctcgttccaaaagctttgctcctcttcttaaggatcaaaaagactgatttcaaagggaaaggggtccattaaacactgggggaccttccttgccaaggctcttatcaggctcttgcagctccaccatccaggccaccctctcaggctgagaggaaagggcttatctaaccatgtggaaacaacactgcctctgctgggtcgagactggacaaccgctgggccttttcagcccctaggccatgatcaatatcactaatcgctttaccttctgtgcccagcctgcggatattcaatttctctcaggcctagagctaacgtcatgtgtctggctgctaaaagctccggctccttttattaccacagtaaaggaagataacaggcgagaggtctgctgtagacatttattgaatcatctgttgcaccaacagcacattgtatttcacagaagattggccacaggcaaaataaaataacccaccacaaatccgcttctgggggccttcttcagctccttagtcatccagtgttcactttggcaaacagaccagtttacagacttttgttgcaaatctaaggttccatttctctctgtagcattccggctagagagagacacgattgtactttggtagtttgtctaaggcggagttttcccacatgtaaacatttcactatacaagtgtgtgccagctgattgaagaactgacggcacccctacccctgaagagtgtacagtctaaacaggaggcgaacactgtcatccggacaggctgagaggaggcggggaaaggggctcgaaggagcctgggcagaccctgctggggaggggcctggactacaaccacctgctcccagaaatgacactgcctgaggcaggagacacagcaaaagccaactatgggaaatctgagcattagaggagactggcccctttctctaagacggcctcaggtaggaaaagggcagccattacaagaagaagagtcgtcaggtttggaaactgtatattaagcccttcactgaagtacacagtgtctgtgtgtgtctcaagctaagccatgctcctcaaacacccaaaaagaaaggaaaacagggagagaacagtcaccagatccaagaagcacatgatcggtgttcttttttttttcttttttgagcctgtcgcccaggctggagtgcaatctcagctcactgcaagcgccatctcccgggttcacaccattctcctgcctcagcctcccaagtagctgggactacaggcgcccaccaccacgcctggctaatttttttgtatttttagtagagacggggtttcactgtgtttgttagtcaggatggtcttgatctcctggcctcgcacacgatcagtgttctaatcacactatttccaggccgaagccaaatggtgactcagctaacatgacactctttatggggctggagtgatgtgcagacaccacgggggatgactgtagttgttctgactccatcctgacttcctggaaagatgggcagcagataaggagaaggctcgtcctccagaacagaggcagcagctccagcagccccagggggctctagccacagccagcagcagcggtttttcatttaaaaaattataaggtttgtgccctctgcctcccagcctgagcagagcctgggtgagcctgggagaggaaaccagagctgagccgcaaggggggtgctacaaggagggagccccagcaggaaggggctgcaaggtgccccccatccccaacccccatgtctggagcagcctgggaggaggcccgcctgcatctgccaagagaaagtctgtctgaagtcatgggcttctatcccctctcccaccaaagccatcctagggctaaagggttaaagaagaggaaggtcaggactacagctgggccacagcctcatctcagagcttcccaggggccagtccctcccctctcctggggaaccttgctttcaccaccaacatactttacacatcatatcacttgctcctctgccaaaggccgggcccatttgtgccacgtgttattcaggctggagggactccttgtttgaattcagcagccatcgtggcctttccaggcctgtccctgaggcccccccagtttcccctggccttgccccaggcatctgctgccaggagggtggggcctcctctctcgcttctttaaagatctgtgctctgcgaccaggaccgaacacccgaagtcctacccaaagccttctgcactgaagggggcaacagagacacgggagccacacacaatgaactggtctatagcagcggagaaaggagaagcagaggaggcggagacctgaccccagaaagcagcactcaaacagatgcagctgcacccacgcgcccgcctgctgccagagccactctccggagcctgcagtcctgaagacgcctcagcaggggcaggcaagaagacaccccgcgaacccccagggccggccgggcgcatcactgggagccggggctatctccctccgtcagcgtcttgaagtccatggagagggcctgctcttccgcctgggaaggccgcttccagtcggcccgggtcaagatgtagagcaccgccccaccgaagcaggccagcagcaggcccagcacgttggccaggacaccctcgggctcaaatgcgctatacttgcccctgcaggggtgagaggaagggagaagctgcccaaggggtcacaattaggccaaatgccctttgtatcctgggccttaaagatgccatggggattccagcaccagcccctgcctccctgccctgcctgaagagaacaaccatccccccgcccccaaccagcaatctccagctatggctcacagacaaaaagagatgggcaatgtaaaaacctagatcaatattctagctctaagcagttgtcctgcagatcctgctgcgtggtgggaataaatagggtgcccatagcccagaagtttctttgaaagggtaaaatcaagaaagctaaccaaagccaagccccaagcacccaaatcttagcaagcataactacagccaccagttgtgacgccacgagaggcggctcaggaagccacagctggggaagctgaaggcagggtgaggtctgtgcaagggtggcccaggccctgccctctcccacccaggacactcacccgaggttgaacagcagtgcctccttcaggcccagcagggcggtgcccacggaaaggaggaagatggtagcaccaaagaagatgtgctgtgggcggtagcggctccgcagggagaatgaagctccggggaacaggaagaagctgaagcccaccagccactaggatttgaaaggagacggttccgggacagggcggccggacaccccagcagccgaggtcggccaggcccacacccacgtgcccacgtggcgactgtgagcccctcagccctgcctggtttccttcctcctcagcacagtggtgggaggagcactaagcgcttagggacaagggaccggtcccccaacgcttgaggccttggcacactcagaaagctgggcttgtggccaaaagtgctgagtcagccatggggcgcctgggagctgggcacccttggccgccaatcctagctttgcacccgcacaggcctgggaaggcagctctctcacctgcacacaccccagaaatcaggcccttccatgaggtacatttcagcccagctcccctcctcctcccacctccctggtaggtggccccaggcccggggtgttggaaggactcacctgcacaaagtacaggacaaagacaaggatcccgcaccagctgtgtaggctgtacaggtcagcgtagcccttcttcctgtggtagtcgaacaccgccaccaagcctgggccagagacaggtcatatgaggacagggttggatgtggaaaaggaaggtgtaagatgacccaggggaaccagctagcgggacttctgggctttagtcccagctcgagggctgccagcacctagtggccctgcaggggatgtttggggtgggggcgggcccatcacagctctggggagggaacagagcaggtgaagcggctgtttgccatacctgaagaggcaggcaggtggcggggaaggccgcgcccgggaactcaccaaccagggcgatgacgagcgcaaagatgtgcagcagcccgtgcaggaccttggtggtgcgtttagcttcgttcctgaagacacggtaaaccagcagggctgtgggaggtgagagagggaacgtgagtgcatccgcctgtgcgtgaggcctcctgccccagcagcaaggaggcaccttggtggagaggtgatgtgagctgacggcttgtaacaggagcctagctgcaggaaccggaggagaaagccaggttccctggggaccctgggcagctcctggccttctctgagggcacctagggctgtgtgcaccttaacacccctcccccaccctccaacctcccccagctgtgcacaaagagggcagggccggaggctgcaccacagtccccaccaccaggacaggcagtgaaggcagcgcctctgccctcgtccccacctaaaggagctgcccggcccagcagacgcccccctccacccaccttcttgtcaggtgtcctgcaaattccaggctgtgtttgaggtccactgttggtcacactgaggcaacaagcagcctctgagttcacctgttagccacgtggctcctcacacaggcccccacctaagcctgggcagatggtcctactcctagcaagcaggcgcctggctcccaagcagaaccttgtgatcccagcctgatctcccgcgtccagaagaggtgggcaaggccaggtcacgtgaggaatgcctcttagctttctgctgctcaggaatggctgtcaccaggaccacctctaggaagagcgggtcaaccggatgcagatcccgcttcctggatccctggcctggaggcaggtggaggccaagcactgccttgctcctgccccagggggaggcgctctagctctgccaagtccaagaccaacaacacacatgcgcgcgcacgcacgcacgcatacaaactctcacatatgattactttttttccctcaattcaaaccacccctgcagcagggcctggctcggagcctcattcctttccctctgctgcaagaagtgcccgccttggatgctgtgtgtggaaacgaggtgaaaatgctggaccaggctggagaggagctgccactcaccaacctcagagcctgggtttggattccatctccccaggctctgaaccagcttctgtctctgtcttttctagaatcttagatttgtccaaccagaagagaccgcaggggtgacaagacccctgcaaactgcctctcagggacccccacaagcccgggaaaagaggagcggcccatgggactcaccatttccctgcaggaagatcaggcctatgaccatgcagagggggtgcgcgttgaactgcaggtcgctctcccaggcaatgccgcctcggtacagcccgagccacgcgccggtcatggccaccaaggtcaggcccagcagctgggagaaggccacgtagtaaggcagtgctgtgggggtggctgccgcggccccgccctccatgctgaggcaaacgctgcaagaaagagcagagctcagaggagcagcgcacagcaccccgagatgcgcacagcccccgcggatgcacacagccccccaagatgcgcacaggccccccgagatgtacacacccctcaagatgcgcacagccgcccccggagataagcacggtccccccagatatgcacagccccccccgaaatgcgcacagccgcccctgctagatgcgcgcaacaccccccccgggttgcgcacagccccctccagatgcgcacagccaccccgctagatgggcacagcccccccgagatgcacacagcacccccagatgcgagcagcccccctgagatgcgcatgtcccccccacggatgcgcacagcccctagagactgcgcctgagatgcggcgcggctcctcccacggcggccccgccaccctcccccgaggctcccgctggaagcagcgctcgctctcctacccgcaagccccttcccacccatcgtcctgaggcagaggtctcaagtctcgggagtggctggggggaggggcccagcctccccacggggacaggcgtgacctgggacacgacgccaggagttccatatgcggtgagggtgcaaggaaagataccccaaattctagtgagctcaagggcccagtgcccggctttgttttctgtttcatgaggccctggccttccctgggtgggctttacaggtgagttacacaggcaagcgcgctccttgacgggaaggaaggggctggtcacaccttttctccagacgcgtcatgaagtacatctcgggagaaatgggaagtctccctcccccatcctggtttttaactccatgctggcgatgaggaggcctccccaccccacacccaggagagccagccccgctccccccacgcccccgcccgccccccaccccgctccccgcccggccgcgcctgcagagtagaagtgccccgaccatgctgcacacagggacctgtcagcacacagggacagggcacttcccctccacaccaggggcggggcggacccgcactctagaggggccctcagggaggtttccaaaactgaaggcccccagaaacgaggcctgcgaaggggccgggtagagctcagcacggctgtcccaggtgctcggccccacgtggccctccaggaggaaaggagagcgggtggttcctagcgaagcagcaatgagaaggccccgctaagagcccaagggagtgcccagtgcctgcacagcttcatgccggccggagagcacccagcagctggggatgggaggagaggcggcaggaggagaacaagcggggctctcccctcacccggcagcggcctgtgcgccacggaaaagtgctgccatggcccacagttgccactgcaactgccaccaccatggccaccacaagcagaccccagagcactgctgctgccccccatcccgccccggttccccactggccccttgccacggtccagcctctcctggcagcaactgtatcagaactagggggacagtggccagcacaggggcactgacccccttcacacccggcacacgctctgccctgcagtgcccaggagctggttttcagtccctcccagtgatgggctccttctctgctccccagttctctctgccacatcggacaactgttggcaactccaccattaaagggggggtgtgtgtgtgggccgggtgcgatggctcacacctataatcccagcacctggggaggccaaggcgagtggatcacctgaggccaggagttcaagaccagccacaacatggtgaaaccctatctctactaaaaatataaaaattagccgggcatggtggctcacacctgtaatcccagctacttgggaggctgaggcactagaatcccttgagctcaggaggcagagtttgcagtgggccaagatcgcaccactgcattccagcctgggtgacagaatgagactctgtctcaaaaaaaattttttttaattaaaaaaaaaagggtgtgtgtgtgtgctaataatccacacgcactgcagtagaatatggatcagcaaaaaaggtaaaatgacaggccatcagaatttgatctatatcctcacacaccttcttcctaaaacacatatgcatccttttatagaagcaggatcatttattccattttctaacctgctttttaactgagggcgtagcacacatggatgtttgtgtcaatggatacgcgcccacatcatcattttcgtaacctcacactcttgcattgcacggccattttttagccaactagttcccattgttcagcatttagctagctttcgatttcagttttccaccaaataaacaacaggatgtggtcatctgcaaacttctctgcagggaatcctgaaacaagggctaggttctgttttagacttctgacacattccatcaaatcatctcccagaaacatagctccaatccacattcccagggtggacgggaatacgggattccagaagccccagccaacaataaatcctatttttggaactcctgcctctgtccttatctgtcacctacacgggtatcagttctgtccccgccaccccaaattcaagccccatttctgacggttcactactcatctctacctggacatcccacagacgcttcaaacccagctcgtcccaagtcaccttctctcccatcgtcgccaagttctctcatgccctccccactagctagcagggctgcccttcttccgggcccaggtgacacctcagctcctccacagaaggctgcccaggccgccgcatgctggcacccctcccctcacttccctcctgagcatcctcactgccccacccaagtcagggcctgcagcttctccctcttcaacgtgacagacatgccagggacaaagccagctcccaacatcatgctgtcccctgcgtaagtgcccccgagtgccagtgaaatgccaactgcatggcatgatcctgcccgtttccatctgcagcccccactgttcctgctaggccctctagaggagacgcctgggctcacagaatccaaggacatggcccagcctggctccctgctgtgggcccacacccctgcctccactcctcaggcaccgcggtgcgcagatcactctgtccccaggctctcccggagcctccttaccctcgcggtgccctgtctgctcctcgaaggcagggacgctctcactcctccttgggtatctttgggtctctaataccccgagtctaacaggaaaatgtactgaaagaagtgctgtcccccctggtcacttgttgtctgtcctcctctccaggtcgccgcctcctttattagattcatccccagagagcctggctgcaggcagaatctgattagctacaaattaggaagaacagagggg

SEQ ID NO: 5664 - DNA, 20813 bp, Homo sapiens
  SITE (1056): n equals a,t,g, or c
  SITE (1060): n equals a,t,g, or c
  SITE (1068): n equals a,t,g, or c
  SITE (1244): n equals a,t,g, or c
  SITE (1944): n equals a,t,g, or c
  SITE (1949): n equals a,t,g, or c
  SITE (3956): n equals a,t,g, or c
  SITE (4155): n equals a,t,g, or c
  SITE (5594): n equals a,t,g, or c
  SITE (5597): n equals a,t,g, or c
  SITE (5684): n equals a,t,g, or c
  SITE (5870): n equals a,t,g, or c
  SITE (6644): n equals a,t,g, or c
  SITE (6647): n equals a,t,g, or c
  SITE (6657): n equals a,t,g, or c
  SITE (6692): n equals a,t,g, or c
  SITE (6698): n equals a,t,g, or c
  SITE (6727): n equals a,t,g, or c
  SITE (6733): n equals a,t,g, or c
  SITE (6890): n equals a,t,g, or c
  SITE (6900): n equals a,t,g, or c
  SITE (7018): n equals a,t,g, or c
  SITE (8611): n equals a,t,g, or c
  SITE (10148): n equals a,t,g, or c
  SITE (10379): n equals a,t,g, or c
  SITE (10677): n equals a,t,g, or c
  SITE (10838): n equals a,t,g, or c
  SITE (10890): n equals a,t,g, or c
  SITE (10955): n equals a,t,g, or c
  SITE (10958): n equals a,t,g, or c
  SITE (11101): n equals a,t,g, or c
  SITE (11178): n equals a,t,g, or c
  SITE (11273): n equals a,t,g, or c
  SITE (11491): n equals a,t,g, or c
  SITE (12008): n equals a,t,g, or c
  SITE (12329): n equals a,t,g, or c
  SITE (12338): n equals a,t,g, or c
  SITE (12375): n equals a,t,g, or c
  SITE (12544): n equals a,t,g, or c
  SITE (12712): n equals a,t,g, or c
  SITE (15467): n equals a,t,g, or c
  SITE (17110): n equals a,t,g, or c
  SITE (17157): n equals a,t,g, or c
  SITE (17159): n equals a,t,g, or c
  SITE (17160): n equals a,t,g, or c
  SITE (17244): n equals a,t,g, or c
  SITE (17248): n equals a,t,g, or c
atgagagtgtgatattttaaagtcagacgcagcaaaaactgtttcagggtgaagaaagacccctttcagccctgttttgcagccctgggtgggggcatgagatagacagcaagcttctgatcttgaagcttgtctagaagacacatcttctaggtctcgtggtcatttggtaggctgacctttgagtgagcgaggccactattgagtggatagcaagaacattggaaccaaagcctcggcacaggcctggcactggctgtacatcagctcttacaactaaacaactcaactaagcaactgaaacgaaacaaaggagcattcgttctctgttgttaggaatcattctgctctgttagggaagggctgcaggaagggcagtttcctgaataaaaatctggctgcgaccagtcccatgtgtctggtaagtaagtaagtaagtaagtgccctttgaagggatcattaagacacagggagcatgaacctgagatcagaagcatttctttactaatttagattctgcgaaatagacggacctctccacccccaaacctaaaacagggcaggacttgtctctggtggctggaaagcaaatagcaagactaactcaagccccagtctctttccacactccctgatagctaaggactgctttctcagctagaccggggtgggcatcagcgacgccttctcagctagaccagggtaggcatcagcgtcctctctccatctctatacccctctctctcacatcaggaagatgaaatgtgtagctctagcggggacctctagccaggagcccagtggcctctcagattgctttttggccaggtctcagcactgctggcatctttacatcttactccttaaaaccgcctctcgctgaggagccactgcattttgaagaatttctcagtgtctgtcaggaaagtgctcctgctcatttggaacgccacacaccacccgcactcacctgtccaggcgaatgagcaggtcctgtagctttacaaatatgccgctgatgccgcttctccccagggtctctcagttttccaggncaanaagatttngggcctataccctatgggcaaaacacctaaaatgtcaacagtcaaaatgccattctttttggccatcataagagggagtaggtatcactgctgcatgccagttgtttttgactagaatacagtgagcgcaacgcaattaatgtgagttagctcactcattaggcaccccaggctcnacactttatgcttccggttcgtatgtggtgtggaattgtgagcggataacaatttcacacaggaaacagctatgaccacgattacgaattcgagctcggtaccatcccaacactttgggaagctgaggcaggcgtatcacaaggtcaggagttcgagaccaacctgaccaacacggtgaaaccccgtctttactaacaatacaaaaatcagtcgggtgttgtggcacatgcctgtaatctcagctactcaggaggctgaggcaggagaatagcttgaaccgggaggtggaggttgcagtgagccgagatcgcgccattgcactccagcctgggtgacagagcgagaccccgtctcaaaaaaagaaaaaagaaatgcaaaaaaaaagatttgtcttagatcttagtctggctaaaagaaatttttttttttttaataaaaatgactgattgattgagacagggtcttgctatgttgccaaggctggtcttgaactcctggcctcaagtgatcctcccacctcagccacccccatgcctcagctgggatcacagaccactgtgcccggccacaagtatttatgtagatgtctcctctggtagactgcaaccaacttgagggccatgtcccctggcatagaggaggtgctccactgaattaacaagtgaatgactaaataggatataaaaggtgatgagtagnactgnccggctcgggctggggcactgccactgtctatggaacatgaccaaagtgacaaaatgggaagaactgaattcgtcacaaaaagaaattcagtcaatctatacatgttcaagttttattacaaagtatgatgggcagaaaatacggtacttcttatacaggaggctgaaacagaatgaaagggtgaaaattaggtttaatttacttaggaaacaagaaatagaaagtcatagctataacactccactttcaggtgcccatgaagtagccttcaatggagattccccatagttgtttcacagcacagtgttaaaattttattacaagccctgtgtacaatcagtcctgtgaaaatatttataaaagaaaaatattacagtacagttctgcaaggggcagcttcctctacacctgaccgtggatgccacaaaacctataatatagagggaaagtttaaatatataacaagaatggaagttcagacatactaggctaaaggacacagaaatggatcagttagagcttaacatttcagagcaagaaatctccattttctacatagaggtttatacaatcatgctacaaattcactctgggtggggtggggaaggaaggtcactgacaagaggggtagtaaaatacacaggaaccaaagcaagtgagtcagactcaactaaatcgattcaaagcttcagctcaacaattttcataacacatggtataccacaatcaacccaaggtgagaacatttcttttaaatagtagatatcacatgttcataatcactgggttgtcccaaaggtgggtgcctataaactttccagctgttacatagactgtcaacatctttcttcttgagtttaaactttctttagcttatttgtttctcgttggatataccagtccaagcctctttgggaaggcacctgcatgtttccatattttaaaaatgacatccagaaagtagcctgagaggacctggcccatcccatgtggccacacatttgactttgaccattagcagcagtgacactgtgagagggggagaaggtgcaggtgggtgaagtgggcaagggtctgcaacacgagacgctctcaggagctggcccagccagggcctggcccagggttcacagtgactttgctctgctccgccctcttccctgggaaaaccaatctaagtatcaagcatgatcttccttcttcgtcctggagtacacacagtaaagggaaaagtctgctttgaggcttctacttcaatggtctcccctaccccaagccaggaatgaaaggggctgccatattctcaaagtggggaaggcagagggacagtactgggctgccctcccacgtgtggtaaaccctgcagctgctacatgtcttcacagcccaggaattcaaggcccaggtggcagcaggaagaaacagtggaaaagcaaggggaagagaaaagagaaaaaggagggggaaagtctgcataactgtcataacctctgcttctcctgctctgtaacaaacccacaaccaggaagagtcatggtctggaacaatcatgggaccccaaacgcctgtaggttttttaccaccaaacatcacccatggctgctctaagctgtcattttgttcccacagttacctagcatcacggatgcccaatttgtggcgcaggaaggctggcccaggctaagggcagtctcactccacagccatgcaatggacagtctgaatgtttccctaccccagaccttcactgacctctactatttcctcctctgatataaagaaaacactttaattttctcctgcatcctacatctcctcctaaaattttggccctaattgtcatcaaaaccttgtaggattctgaattttttgtttcttcctgaatcttagccagttctctcagagccaatcctggatttataaggaattttcacctatttttttttttttttttattttttgagacggagcttgctcctgtcgcccaggctggagtgcagtggccngatcttggctcactgcaagctccacctcccaggttcacgccattctcctgcctcagcctcccgagtagctaggactacaggtacccgccaccacccccggctaatttttttttgtatttttagtagagatggggtttcaccatgttagccaggatggtctcgatcttctgaccttgggatctggccacctcagcctccncaaaatgctgggattacaggtgtgagccaccacacccatcctcgcccagttattaaataccttccctcttcaagtcctaaccttgcaggctaattcctccctggaagaagaggattccaatgctcctgagcataaaaaattcaggtccttgaatgacgtggacccattctccagctctctggtggtagaggcctgaggcctaatttattcagcacctccatccttcagtcagaacagatgaggacaatacaggcagctgtgcctcaggctgccaggagcaaaagggccatcaccagctgggccacagcctgcggagcctccatgtgggcttcctgctaaagtcctagtggctgctcctcccgcagtcagggagaacagatccagggcctcccacccagtctcgctggctgtcagtttgagaacctcaacaaattacagagttgtttttgcaactacaacagatcggtgctttctggagcatggatggcttacagactttctaaatcctgagactgtagaaatcccctcctcagtcatgggtcgtcgggctggtggagtaaagggagggtaagagagctgggactcaaagaccagcaactcatcaactgtgagtatgtgtgtgcttgcttaggggggtggagtccccctgggtccccggtggcattcaggggaagactgtactgcaggacctaaggaaggatgacaggagctgggcgtccacagggcaagggaaatctcaaaagttgttggtttccagagtaaatagctatcttatgcaaatatgttctaattattatttttttttcaagttgttgtttctgagttccagctgacaaattccaccatacagaccaggcgtaggtgcagatcaggaaaggaatcttagaactcagtggatgtaagccctgcccagcagaccagccccttctaccactgacttccatttcagacccttctccacaggaaggaactgatggcctcctaaacaagcagccatcagcttggccttgctacccttgagagaaggacccagtaaccattatcaaacacaatgaaaagcagaggagggttctgaccaagaactgctcgctttgtatctccaaacgatgcagtgcaaatccagtggcaaatgcaggagaggcaaccacaagcacatggccagccagagtcctaaaatcagaacaacaaagtaaaagggtagaaggggaaatatgctggctaaaaaaagagcctttttctttgggacaggtccctgtatggtaaagcaaagagctagacttttggcatataatgacatctacttctgaaaaggaagacttaaccaaaaaagcttaagggcccagaagaacaaagttactgttttacttctcaagcaggtgagaaccaaagaggacaaaaccatcatccttcaggcctgctactctactaatctcagatgnagncaattcagagggacttaaaaaccttcgggtaggagcagagcgcaaggaaacagccaactttcccccaagagcacatcccaaactgcnctgccccaagggctcatctaacggtggaatcacacatatgcccctccatggaactcattcacataacagaaagacacctgcggcctgcaagtcaaaagacaactgcaggctacaagtccaatactgctcagaacctaaactgggggagagaggggttgacaggtgtgggtagagctcttaactggnctgaccctgggggtctataattccttttccttctttttttttcctctcccttttcattacccacagtataatgctttttaactatctatccacttgacagcccaggattgccgcagtccatcagtccatctctcatgtaaggtcttgttcagggttggaagcacagacaggatgcctcgggaagactctctcacctcagaacactcaatccaaagaatgcccaatataccaccaggcacagtaaactcaaacaacagaagcaccgaagttcaactcagatatcattcttgcctatcattgaaaagacactaagtggaatggcctggggcttatatttggatggaaaaacagactctgaaagaatgtactggaaatatgcttgaagttcagcttcatgaaacgattcccctcaagtcaggtaccctgagagcctgtttctctcagctctaccatgctgccagtgggaaccaatgggctggacagtggtgcttcagggtaaacagaggcttcctatgtctgtttacaagcccagaatgcccttgagaggagccaggctaagaaaggtgtgatgagtcagtggacttcagagcaccaaggtggtttggactcccggtcaggtatgtactacacaggcagtgactcaagaaggcaaactgctcatggggccagggccgttaccagctccgggactgggggagagaagaggtgcaagaggggggctttagacaagaatgagcgggggtaattctttcatttctttttgctttctggcgnttnattcgtcgtngatctgagagtcagagatattttctcccattccangttgtntcctttttgctctgttacagtgttttttnatatgnaaaagtttaaaattttgatgaggttcaatttgcttattttttcttttgttgcctgtgcttttgatgtcatatccaagcaatcattgccaaatccaatgtcatgaaacttccctctgtgttctaagaattttgtagactttgctcttttgttcccccnttcttctccnacacaaagatctcatgactgtcacgttgtccaagataaggtgttaaatgtactattttattatttttattttatttatttattttttgagacagagtttcattctgtcacccaggctngagtgtagtggtgtgatctggctcactgcactctgcctcccaggtgaagcgattctccagcctcagcctcccgagtagctgggattagaggcatgtgccaccatgcctggctaatttttgtatttttagtagagacaggatttcaccatgttggtcaggctggtcttgaactcctgacctcaagtgatccacctgcctcagcctcccaaagtgctgggattacagacatgagccattgtgcccagccttaaatgtactcttttaaattgaaaaaagaaaataagctgtgatccatttttgagctaatttttatacatggcataaagacctgcattttaagtcccttttggattgctctgctacttgtccttcctccattgcagtctgcttcattcattgtgtctgcagtttagcacaagctctggaaccaaccatatgaatttgagtcccacttccaccatctgctggctgtgtgactatgagcaaattcctcaaccgttctgtacctctctttcctcatctgtaaaatgggagcgttgatcacagtacttacctcatgggtttcttgtgaggattcatatgttgaaagcccccagatggtccctggcacctggaaccaacccacagtgagggttggtaattattattgtccctcctaaaactggattttctcttatacttggtaaactgtacctatcagccatcttcagttgggttggaatggcctgcacaatcccatgcatgcacctgacgcttgcaggggctcccagcttggcagagacgccatttccatcgggatcagctatccccccacaccaatgctgcagctctctggatggatgcaccctgacctcccctgtgttagaggagaggtgggcgtgttgaatcatggaggcagacttctcctttgccgttctcgtgatagtgactgagttctcaggatctggttgtttaaaagtgtgtagcgcctcccccttctctctctctcctgccaccatgtgaagatgtgcctgcttccctttcgccttccaccatgattgtaagtttcctgaggcttccccagccgtgcttcctgtacagcctgtggaactgtagagccaactaaacctcttttctttataaattacccagtctcaggtagttctctatagcaatgtgagaatggactgtctacatgcttgaagcaggaagggagactttcctgtgagctcagtcgatcagcttaaccagaagtgtcactatttttttctttctttcctcatgttataaatatattttacccataatggatcatattggggggttatttggtcagtttctctagtcgtggtatcagcccatgtgtagaggtagggcctttttgaagatgtgagccattgtgggctgagagtgatggaaggcaacccagggtacagggattctgagtgtggagggaagtgagtctgaggagaaatccaaggtgagacagatggagctggcctccacagacctcagtgcaagagtactgggggtgaccacaggcctacagagagctggtgtcttgccagctggttttcagatcaggctcaggtactcatgggcatgcaccctggnatggagggtgcccgcctcacctctccacaccccacccagtccctaccttgtgtgccctctcctaattgcaaactcataacatcagggtctccctggagaaataggtatgatggggagggccctgcacagccctggggttgattgcacagcccataagagagaaaaagcccaaacatgtgaacataagaggtcaagttagaagaacctagagagataacctggcttccagagacccagatatatcacatccatccatccatccatccatccatccatccatccatccatcatcccatccacctgctcagaagtggtcccagcctatggagggagggcctcatcaatccctggccataacccaagggtggctcaagccccagggaaaagtggccgaggagagcagaacaagttctggcctaaaagtcaagacccctggttcctctttttggctcgccattagctaactacatgaaccagatcatttggcttgactttctggacctcagtctccccacctgtaaaatggggacagttggaccaggaggtggatggggatttccagttctaacattctgtagctgagcctctggcctctgacgtcacaatatggagctggcctcacccagctctgctgctctgttggtcatgggagcaaggtggacttgccctggaccttccctacttgtgctcctctgttatgggcagctcttgccttggctcaggatcaagggtgaacacagtttaggtgtggctgggaccccaagaagcatgggaccagacaaagggactgggtgcggacaggaccttctcagcacatgatgcccatatccttccctgcagatgacttctacaatgagaccgagaccaagatcttcctgcagttttatgaccaaacaggtgaagttgtgttgaacaagttcatggaggccacttggaactatgtcaccaatatcaccaggaaaaatcaggaggagatgatgtgataccacctccaccccagcctctcctctctttgctctttttagggatttgggaccatggggcaccacacctcctgcccccatcccaagcaagaggaacaagggaagccccagtgtacatgtcaaagagggctgcaagctctgggcctcctggaagccctaatcttcctccaggcaagaatctcttgcttcttgtcctttgtaaatctcacctccttgcttttagagatccaggtttctgccctctccctctcagcaaatcttgctccctaagccaatgggattagggagtcagttagggtgccatggccctggaggtcaagtgggacccttcccctgtcccccaaccttggtggctctctttgcagctgcacaaggacatggagaggtcccagttcatgatttactttggcacccaggcccacctgtttaaagtcacccagttcaaggacccggatgtgaatggcatgctgagtaagctgcagaacatagacaaggcggctctgtccaaggacgagctgcgggaggtgatggatggaacccccaggcctttaggncacatgctccctggtcctaggggtctggtaggggagacagagtgcctggggcaggagggaggcagggagtggaggaagggcaggatcagaacttcctctggagaaggagaggagtagaggtgggggtaccgatctctcctggctggtggggcgagcactggggggggacctggggcaccagcctaccctgggtaacacctgtccccccagtataacgagcttctggcctancctggagatgacatacagtatggcccaggtgtgcctgaatgaggggccctgcctgtccctggagtctggtgaacacccaagccctgtcccacccaaccacagaatctccagcactcagtcccttccaggggcccctcccagcccccaaccaccctcccttattgccaggagggtgagggaagaggcaagtgggagtgggtcccccatggctccttttctgggcatagaactcgaagtcatggccacctccagggacaaagaggagctgctgtgggcctggcagggctggcaggatgcngtgggccgccagatctgcaccaccttcgagcactatgtggagctcagcaacaaggctgcacagctcaacggtgagcagatgggatgccacagagcttggagtgatggcaaggaaggggcaaagctgagctttcccagagtgaaggtggccgtagggccctnggagacaggacctatgagccctgcagctgggctctccaaatattcatagagncacctaggtgctaggtgctggggaggttctgacgacacataggtgaaaagacaggcacctgcccntcnatgcacctacggtcctgcagggagacagaccatattcagtaaacacctgtctctcactaccatctggggtgatgcggaataggaagaggctgctgagaaagagaatgagaagaggctgctgcagacaagtggacagggaaggnactctgacatttatccaagacctgaaagatgggcaaaagacgggaagcaagatgtgaaagaagagcagcctaggcangaggctccgcggcaggaggagccggtgctctggaagacctgaaagaagcccaggtggccacagggctaaggatgaggtgggataagaggggactncagggccttgcaggcatggtggggagctcggatcatggactttgctcagtgcctttctgaaatgggcaggtattctccccgttttgccaaagaagacccagacggtcagcgaggttgagtggcttccctagaaggcgtctgggtatcctgtcagctaggccatggctaaagggtgagatggtgagctcctggtgagtcctctctcctgtcctaggttnacaaagacatgggggccttgtggcactccaagtatgagtcggataccctggagcaagacctggagcggctattccaggagctgcggccactctacctgaacccgcacacctacgtgcgcagggccctccaccgccactatgggcccgagctcatcgacctgagggggcccatccctgcccacctcctgggtaaaggccctgctggtggccgaggtgagtgccagataagggcagagactgtctccagcctcctcttagcccctctcctcctcttccagagaacacgttggctcagtcctgggtcaacatcttagacccggtcctgcccttcctgaagaagatcccagaggatgtcacaaagatcatgaaagtccaggttagtgcttggcctgtctgtccctgcccctccccattggcatccttggacaaacagggcagcgccccccacaccccctcttctcccatagcactggaagccagagaaaatgttggaagaggctgagacattcttcacctnccttggcgctgccacctgccccacccagtttctggaaaaagttgatgctaatgaggccaaccgatgggcgagaggtggagtgtcacatctctgcctggaacttctaccaggacgacgatttcaggtgctcacagcggcaccacacacccggtcctctcctctgccctgtctggctgtcttaggtatgggcaggggaaagccagggcagaggagggagaaggcaagtgagaaacacagaaggaaaggtgacgtgagaggaaagggcttggttgctgggtggatatggggcctggagtaagaaagaacaattgccggccgggncatgggtgntcacgcctgtaatcctagcactttgggaggccaaggncagtggatcacgtgaggtcaggagttcgagaccagcctggccaacatggtgaaaccctgtctctactaaaaatacaaaaattagccaggcatggtgacatgtgcctgtaatcccagctaggaggctgaggcaggagaatcactggaacctgggagccggaggctgcagntgagccaagatcgcaccattgcactccagctgggagacacagcaagactccgtctcaaaagaaaaacaaaaaaaagaacaactgccaaggcctgtctgggctccaacccgaccacccaatccctcaaggagtctgaatggggaaactccctttctccatgctccttgnacccatgccctttgcttgtagaataaagaagtgcgcggaagtgaccacagaagacccgctctccatcttccacgaaatgggccattccagtacttcctgcagtacaagaacctctccatcatcttccgcacaggtgccaacccagcctttgaagaggctgtggggtctgtgatcaccctctcggcctcctcccacaagcacctgctcaacataggcctgctcagcctctagcaccaggactcaggtgatgaggatcaagggcccagcaggagggcagcacaagcctgggaccgcagctagggcttggtggggtcagggctctcgggcaaagctacgggaaggagatcccaggggttgcctcttgactgccctcaccctcttcccagaggatgaggtcaatttcctgatgcatattgccctggagaagatcgccttcatcccctttggctacctgatggacctgtttcgctggaaggtctttgacggcaccatctggaaggacatctacaatcaggagtggtggaacctcaggtgggttgggcaccatcttccaccagatgggccatttccaggactttctgcagcacaagaacctctctaatcttccacacaggcactgagcaggtcttttagcctttctaggcttcagtctcctcatctgtgaaaaatggaccctggtgatggccccacctgctccctgggtagctgggaagctcacacaatgattgcaactgagcttctctaatcacagaacactgaccaccaggcaggccctcccaaacctccctcccttcctggtgccaggcaatggagtgtgcgggggcctgagcactttcctttctggggaaagactccccatgggagagaggcaggcccctaaaatgcacgcatgcctgcctcgggcttaacatccccaagctgccatgggaacccaccagcagttgggaggcatcactctcgagtgagggacccccgtgttacacctcatcactgacccctggccatttgatgggataataaatgcctgtgaccagggctcctccatatgtggcaggccgcggactgaccagcttcagtctgctggtcatagtgtgattcggggttgccagggggtgctcctggctctgcaacaggctcttactttttttgtttgttttttgagacagggcctcgctctgtcactcaggctggagtatagtggcatgatcacggctcactgcagccctgacctcccagcctcaaccaatcctccttcctcagcctcctgagtagctgggactataggtgtgcgccactatactggctagttttgtgtaatttttttttaagagatggggttcgccatgttgcccaggtttaaactcctgggctcaagggatctgcctgcctaggcctcccaaaatgcggggattacaggcatgagccactgtgcccggcctcttatgtttaatttgaacatttacaaccaccttgcgttgtgatcacttcaaagcgctcagctcacagaagcaacagctgaagctcacagaggtcacaaaccagcccgaggtcacacagcaaacgagcaggtgacagagctgggagctcctccccttgtcctctcactcccacccttgacttcaggagcaggtctccctggtgggcttggcagagtcttgacctcgtgcctctctaaggtcaccctcataggccatctgaggcacctgcaggaggcctctgtcagccctgcccatcaccccagctgatggaaccctggggctaagcaggaggggtggcaactccctgggccttgaataaggccctgtcaactgggagggaagctcctgacactctgttgaccttggagatggttcagaggctccagtgagccaatgatgaagccttgtttttgagacagggtctcactctgttgcccaggctggagtgcagtggtgcaatcatggctcactgcagccctgacctcctgggctcaagcgatcctcctgcctcagcacctgagtagctgggactacagatgcgcaccagaacacctggctcatttttgtattttttgtggggacagggtctcactttgttgcccaggccggtctcgaactcctgggctcaagcaatcctcccacatcagcctctcaaagtgctgggattacaggtgtgagccaccacacctggcctacttccttccattttatagacattttacaacaagactcggagacaatcagcaactttcccacagtcgcacatctcagaggggcaaaaacagaccttcaggttatcagggtgtgactgtgactggctctgtgtcctgaggccaattccctgatctccaaaccttggtttcctcatctgcaaaatgggaataatagtagtactgccccacagtgatgttactcttttttcttctcaagacttcttactagatgaaatgaccttgtttattggtctataatctgtcccccactgttaggatgcaagcaggggccttgcctcccccgctcccccactggtccctcccccagagaccaggacggtgttgagtgcatgatgcgtgagtctatgtggagagccagacatggttctgagcatagaggaagtgttcagtcagtgttaactgctattgttttactctgattcccaatcccatgtgttttcatttatttaatcaataaaaatgcattaggtatcctcagcctgccaagtccagttttgatagacacgtaggtgctttgaaaagaaaaaggcaggccaggtgcgngtggctcacgcctataatcccagctacttgggaagctgagacaagagacgcacttgaacccaggatggggaggttacagtgagctgagatcacgccactgaacttcagcctgggcaacagggcaagactctgaaaaaaaaaaaaaaagaaagaagaaaagaaggaaaggaagaaaggagggagggagggagggagggagggagggagggaaggaaggaaggaaggaaggaaggaaggaaggaaggaaggaaggaaaagaaagaggctctgagaacctgccagacaccaccaccaagccctctgccttttccctgccaggttgaaataccagggcttgtgccccgctattcctcactcagaggaagactttgatccaggtgccaagttccacttttctgctggtgtgccctacatacggtaaaggtctgggccctgttagcagtgccagtcctaggagttgaggggcatgggaactggggtgaggatttgcaggaaggccctaggtccaaatgtcaccctgtacccgtgcccatctcttcctgttgggctgcgcagccttctgaggcctctgacctagaatcctttgagcttttgcatcaggtccagtgtagagggcagagctgatgagaatattctacaccatccctgctgtcccttggaggagagcaggtcagaggggggcaagggttggggtgactgctggttcagaaagctagagaaggagagccccccagcactctagggtcagcccaagcactggccctgcccaaggagcctccgctcaggcagtgactgctgacatggggccctcgtggccactgcatgtcagagctgcctggtcccaagtggctctgagtttgccactcctggtctccactccccagcctgccctcacgtttctcaaccaggtacttcctcagtctggtgctccagttccagttccacgaaacactgtgcaaagcctcgggccacatgggtccactgcaccagtgtgacatctacaactccaagattgccgggaagctcctggggtgagtgccctctccttcatttgttctgggctcccccatctccctttaaggaagtcctgctccaggctccctctccacacctgactacactagacaccttgagcagagcttcattaagcttatattctagcggaatttcttcctcatgtcagactgcagtctttcctacattaatcagagcccatttcctcttgtgcagccttctgtgttcagagacactgcttaggctgggcgcagtggctcatgcatgtaatcccagcactttgggaagtcgaggcaggcggatcacctgagggcaggagttcgaaaccagcctggccaacatagtgaaaccccgtctctaccaaaaatacaaaaattagccgggcgtgatggcaggcacttgtaatcccagctacttgagaggctgaggcaggagaatcacttgaatgtgggaggtggatgttgcagtgagccgagactgcaccattgcactccagcctgggcaacaaggtgaaactccatctcaaaaaaaaaaaaaagaaagaaagaaaagacaatgtttagcccctcccactaacacacacacacacacacatgcacacacatatgccagtaagccaaactgtcccnagataggaagccagcactggggttctacctcaggcttcagccttccngnntccgaatcccccttatcctttccttacaaggtgctgacctaccctctcagcagcacttggcacacccttcagtgcagtctgttntctncccacctcttcttggaggtgcccaaatccagttcccaggctgatccaggttactttcacagtagcctcttggcatgcttctggtcagcctgtggtccactttgacccttgagtctttttctctgcacttggtgtttagcttattctttccatgcttacctatgtggcagtggtttttagtcccaaagcaaaccctgagggagtaggggactgaactgaaaatgtgaagcatttactactacaggaggtgctctctgatgagtactcttacagtgtttcatattataataatagctcttaactttgcaaagtggatattattatctgccttttacaaattatgaaactgaaggcaagagaggtggtgtcgttgtgcatcattcatctagcaagaagcaaagtcatgctttgaaaccagaactgactccagaacacattatctttcaccctgggaggacagaggtgacaaacttcagtttaataggtttctcaccaagttgtatgttccattggcccaggattcttgcactaatgggtttctatcacatcatgtctataaatgggtgcactttactgtttgaatttgtaactgaagtactggatatttaagtgtgagtaatgtcttcattagaaaatagcagaaccgctcttgtcttttagtgtatttttcaagaaaaaaggaaaggaaagacatcaagcagtggatcacaacatttatagcacaagaaataacttgtatataagcatcaaaaagattaagaattttttaatatgaaaaatatttgcagtgattttaaagtgcttttccagcaatgttcttagggactcctgagacacggttactttatctactggatcagtaaggcacacaattaacaattaacaattaatgtttatttacaaagtaaagggaaaacctgtgtaacatgagaatttggcatgacaaaatggagaccattttgtatctgctgttgtatcttgtccgggttgcagacgtgcactattaaagtcccaagttaatagagcacaaacccttctcgctcctcccccatgtgccccctctttttagatgtgtataacttaaactcgatggctcaggaaaattccactaattagaatcatgtacagtaccccaggtcgttgtccagatatacaagtttgctaatgtagttaagcctggattattaaacacttttcctaaattattgtaaacagaacagcttagagaaaggtattctcagtccttaatattgtatagtagtttatgagcccctctctaaatattggtatttttatattccagagatgtacccaatagaaaaaattaaaaattaatcagtatctaatttaatatccataagtatttttccttagattttagtcacgtacagtgggctatgtggatgtcacttgtgcttcaccatagtttaccactaggtgtcactgtggctctgcactgcgcttgttttgtagcaaagaacagcggcatcccctcgggagagaggagctgcttccagggcaacaggcaagcgggctcagaggttcaggagaaggcaacagaggcctggaaggggtcttcgtgcatctgtgccagttgtgcaagacgaactctttgaacactacatgctttggacttcagccaggcagaggctggaagaaggttgaccagagctcccttgctctggtagagggatgggtacatggagaagccccttcttccccatgagcctccctcctgtcagttcctctcagcctccagcttttataactccagaagcgtcacagttgggtggtttgattcagagagagttatttttctactgcagaaatgccttggacaaaaccagtgctcactgaatctttgccacaaaatggaataggctatcccagggggcaagaggtgcccgcccctgtgcccagcctcctcttgatgctcccagtgcccagcagcctcgcacaccctgcctgtctgttcctgggctgcccatttctcaagaaaccgacctgcaaaggcagccggctgctgcttccacaccgagggctgtgcggtcctgctgctcgctcactgggaggtgcagctctttctcctcttcctctaggaattccagaccgaccatctaccatgactaacaacaatgaacaaagggcttaggggcaagagctacctgcaaagacgtgtcatggaacccttcaccatgcaatgccttgaactcagctctggctgctcccaagaaaaggtggctggctgggggctggacacaagcacaatggggctggtggagccactgtgcagagctacttgaataatcactgggttttcatcaactccttttgtcatacagaccactcaagggctgaagtgttggtaaccttcatttcggtgtccaaagcctcacagcaggtgagccaccctgagatgcttgtggccacatggtggccacagtcagagctttgaaagtcagtaccaaatgaacgcataattggacaccaaaaatcaagtgttactttcatgtttcctcaccccatcatctcattgcctcctgctgactctgataccgacgctgagctgacttgccaggctgccgctggacgcgtagagatcaggccagcgccgcgctcatttttccaggtagacctactctgtggaacggaagtgccctagctgctttgtttttgtagcacttgctggctgaatttttcttttgctaatcgctaaccagaaagtctggttagagggggctcaactcaatccctttggtccccagcgccagacaagagttaattctggaaaattcagtacttgaatgtacctgccttattgcataccaatttactggggggaaaaaaaaagttaagagatgccggctccagatctccacttcattcacaggtgattttggaaatcctgtaagttacacttcctgttctggttttgttttgttttttgtttcctttggctgattcctgctgagtgaggccagttcctcatcaggctcagggcaggtgccttttcaggcgtggcctcctttccatctagcacagcatctttgtctctgttctgtctcctccaaatccaagatgattttaattagtacagacatgtacagtctacaattaaagagtgatttgtactaatatgattttgattcttcctcctctttgctgtcctttcaagacacttgctggaaaaagctttaatgcacttagttttcctttaggttttctatgactcagatgtaaaggactttctctgtacagtatattatccaatgcatgtttgttctctctcctgatatattgaacaccacacagttgtgaagccgtgcagtgggatgccccacaccccacagaggcatctacccctgtgtataaggaaagacattttcctttgctgtacttgcttgagcagttttattgtctgtacatgtgagctgtgtgagatagatgtgaaaagttcaaatgaatgcattttcctgccccatgtatacagattgtcatctgtacaaggaactgtatgtatgaaagcaaatgtacttatttataaatggctaacacttggaaaacca

SEQ ID NO: 5665 - DNA, 521 bp, Homo sapiens
aaggtagctcggactctacctgtggctcaggcataccaggacaacctgtacaggcagctgtcccgagactctcggcaagggcagacatcccctatcaaaccaaagagaccgttcgtggagtctaatgtttaaaagacgttttgttggagtgagacccatatgttttcactgcacattttcaggcttggtttccacattcgaggtagttctctggcttaatttctcatgtagtttctgtgtggtgttcagaggtggcagcccacatgctgaaatcctttgcatgcagccgactgggaagcggcctcccgggagccaggacttcagtttctcttgtctgtgcccagccacatgctctctccctctcttcagatgccaacgaggagattttcgtgctgtgtgctttaacccagggagatcagacacactggtcagctttttccaggagacaatcgctttcactgatgttcttgttgtgtaattgtctttttccttttttaaaaaataaggtgttcttgttcgtt

SEQ ID NO: 5666 - DNA, 4269 bp, Homo sapiens
  SITE (727): n equals a,t,g, or c
  SITE (1178): n equals a,t,g, or c
  SITE (1216): n equals a,t,g, or c
gccaagtcccttatcactggcacttgatttcctactgggctagaaccttaagctgtttggtgaaagaagggcacagaagtcacacaaagagagcaacagatgcttgcacagcagctcacactgccctgggacagctccagtaaagagcagtcctgtgttcaggtcctaccttctagagcaggatctaacacaggacaccagttgaatagcttatgctctagataagtacagttcttggtatatagctagtgttccagaaatattagttgcatgaatgaatgacaggtttaggctgtaagaccagcatcagaccatggagtgcctggatacaactacatttctatggccaattaaaaaaataatcctgggattggagtagtagagctaagcctagggacttgaaagttagtccagaggatcccaacagctggacacaaactcaggaagactcaagagccatacaacagcaatgcagcaaccaataatcaccgttattattaagagcagtttctagtacagagcgcctcagggcacttacaatccccacagaggccagctacccaacatcagagtctgaccagctgggtggtcctgccctgcatccgagagggtgtcgggacactcatccagatggctctgagacagcagcagagctgacaaggaggccccacaagtgagattcctttggcttcaaggtcgcaagtcctgtccttgggcctcctggctngctgagcctcccaccggctttaccctcagagattgctgcagaagcctgtgtgctggaatgggctgccacatttctaggaaggaacccgggggcacatgtagcctggttattcaatgttatcatagacgtgaatcacatcctcgtggttgctgagagcctgaatgagatgtgcggcctgttccaggtcgggctcagccagctgcacctttgagttggggatgaactctagtgcacaggacacagaacacaggcccagggagtccagcttcttcctcacttggtgcagtgaagaggcatcacaaataaactagggataaaggaaagtcaggaggtgaggagccaggaggtaatgagacaaagccacacaggaccttgcaaagtcctgaatgtcagtactggaatggatcactgggtttgagctcttcactggcagggacatcgttttcaatgnttttgactctttctttctcatagtcctcactagagtcnggtcctattcagtattcacttaataaatgtttgtacaatatgtgaactgtctcacctataccctggggcacatgaaggaagaaaccaagaggcatgcataaggcatctatcagggtcctcccggaagcccaccaaacacccatgttttcatgcttactttaaaaacgttcctttcttcttcatcttcagtttccttgacatcctcagctcctgcttcgattgccatctccagggcacgctctaggttcacagccttcttctctctgtcctccacttcaaccacaatcaccccctttttgtcaaaagagtgacgagctcctacagccatcactcctctgacagggaaggaaacaggctggcatgagtggatgcctctagaagctcagcctccataaagctcatcattctatcactgtctctttcttacccagtctatgaagtacacacagacatggagcagatcgcatcctcaaggagaaaatgcagctgctgctgggtaagggaacagcccaagaatgtccccacgctcgattttctgccctgattgcagttgggaggaagcagacttagctgataatttcctgtgccattaagatgccagtcctggtggagcattttaagacttaggcattatatggctacagatggggataataggacaaagatccccttctacatccgatgaacaagtctttgggatcctgctagtagaaactacattaagggaaagtcaattaactcattagattctgctaaggagcaagtgtgcttaaaacctgaaacatggccaggcatggtggctcccagcactttgggaggctgaggcaggtggatcacctgagatcaggagttcgagaccagtctggccaacatgatgaaaccctgtcacctctactaaaaatacaaaaattagctgggcatggctgtgggtatctttaatcccagctactcaggaggctgaggcaggagaatcacttgaacccagaaagcagaggttgcagtgagccaagatcatgccattgcactccagcctgggcgacaagagtgagactccgtctcaaaaaacaaaaaaacaaaaaacaaaaccctgaaacactagcagagatcaacagtacttgccttgcagagaattggaacataaaggctctgtcccctaccactcctcccagacgcacacttacccattcttattcaggatatgtctaatgtctgcttggcacttgtggctactgttagataatgcctcgatgagcagagaagagccaccagggcctcgaccctcatacagcaaataagtgtccttggatttctgcaataaacaacacaagcacattttcctgtttcccaattccttcccacatgtcagcccagaactacaagtatcgcaaaactaactccatgggatgggctctctaggctggagcctgagctctcaatctttatttttgtccccaccctctaaccaacttttgaggtaacaggaagtactacccctaacttggaaggagtctgtttctccggtccctgaacaatccatcagccatctctcagctttgcttcctaccatccctaaccaaatgccacatctagtccctacccaatcccactcagactcatcctcctacacccccatcctgtaagaaacccaccggtcaagtctcaaggtccctaccctgggctgctgagtactgctgtgaaatatcacacacctaggccttgtcgtaagagctgctgaaaacagcatggtctcaaaattgaaacaattaatccagagctctagggactaatctcttctggaccttccatgcccctactcatcccttgtccatgtattcaatattccccactccaagcaccctgtcctgcaactttccaggaattctcaactcataacttctcccttcctctttcacaaaggtaaaaagggccactaggtggggaaaatagttgctgtctccaccaccttctctgcaccatggcctacatgaaggcaataagcataacggttagagcacaggctctaaagtctgactatctggtttcaagtctgtcattttctatgcgacttgagtcaactcacctaacattcctgtgcctcagtttctacttacggtggttttgaggattcgatgagataacacacatagagtttttatccatgcttagcctgcaggaagcactcaataattttgagctattaagataactattacttcctcagagcctccctacctgccccagagaaaggtgtacccttacgtggactctatatacctgcccctcccaccatctctatcacccccatcctctccctttctactggcttttctcctttagggcataaacatctgaaaaacaaacacttcctccacctaacgtaagggctttctcccacactgccccttctttctataatacctcatctccctacaacttggctgagcagtcccggtcttgactgtatggccctgcatactgcctatgcatcctactcccagttgtgctcctagaaccaatgaccaaggacggtgagctctcagaagactctaggctgagggcgtcaactacattgctaccgttctctctgataatttttttttttttttttgagacagagtctcgctctgtcgcccaggctggagtgcagtggtgcaatctcggctcaccgcaatctctacctcctgggttcaagcgatcctccacctcagcctccccagtagctgggattacaagcatatgccaccacgcccagctaatttttgtatttttagtagagatggagtttcaccatgctggccaggctggtctccaaactcctggcctcaagtgatccacccaccttagcctcccaaagtgctgggattatagtcgtgagccactgcacttggcccctctgataatttacagtgtgtttgttggccatccagacatgagcccggtagaggctgtgatcaataaaaagcatgtcaaacagtacacacctccattttcagtgctgtctcaatcgttgacttgggcatatgtttgctgcgacacacctctaagatattggc

SEQ ID NO: 5667 - DNA, 521 bp, Homo sapiens; identical to SEQ ID NO: 5665

SEQ ID NO: 5668 - DNA, 6439 bp, Homo sapiens
ccgattttttggagaccacacatcaaacctcagtatatttggatgcaaatatcgctacctcccagagagacctcatttaaggagattagtgcgagggtcagtctgtggtgagtgtctgacatacttatgggtgtcttccctgggaattaagtagtgaaaatagaacttggaaatgtgcagccatggtaattcagagcacctgccatgtgcccagtgttcagaggaggatattctctcaccctttaagaataaaatttaaaacttaaattttgttaccaggacactacttatatgagcaagtagtaattttgtttgaaaaagcagcttattaatcacacgcagaaatctgaagttatttgcctcttaaatttctgaaaccctgtcgtaagccacttaacaagaggggcagtgtcatgtatatttttgtaatggacaatatccagcagcaggtcgtacacatatcctccactcattcatggaggacctgcaatacagtacagcatggagcgtagcctaggaaggcaggggaaaaaatctaccttttagagccctgtaatagagttccattatgtctatataagtgataagttgcatatatttttcattgttttaattattaataggtaacagttaatataataagtatcaaatgccctcagtgcatacaaacccaagtttaattatccaagtgaaaatgcttttgtggattgactttttaccccctcttcctcaacaacacatagtagcctcatacacaaccccttcccacactggtacacaagtatgcaaatagaaacacagacacctgcccataaacaaatcaccctggccaaatgccactgcctttgggtaatgcagggttcttcggcggaatatttcttcttctgctcctctggaatgtattccattccctgctgctctggaatgtaaccatgtgagatttcttcccctttttcatcacatggatgtctgttagaattccttttctggccgtgtttctcatgtgtaggcaatactttttatcatcttccacatttccgttttccttcctacttttgcctagttgctttatgaaaatctttatatctctccttagcccttggtcacttcatgactgttgtgaaccattttcctccttagaagcatatgatacctgatcagaacaaagctgatgttagtgatagatttctatcaggtaaaagatagaacatgtatacgcaaatgcactttcacatatggaaaccaatgccgtcattttctaaaatctatgtgatctctataaaaatattcttcctgaggttaatggaacataattttccacagccaatagcattcaatagtcaagactgcttttaatgattttccagtgcgtgccgcttcttaatttgcaaatatggtggatgttataattatataaccaatatgtatgtattagttaaacagatattggagggataactagggaatctaaccttaacctctaataccatgagaaaatcaattgcaaattaagttctgagatagaagctgtttgcaaatctgtatatggagagagcaacatgaaaacacaaaatcactgtattttttgcattgttattttattttctacttcagtgccacctttaatttggtcgtggcagtgtgtttccgtccattctttattttaaatagagaagtcatttatttggctcatggttctggaggctgagcagtccaagatgtagtggctgcatctggtgagggcctttgtgctgcaccatagcatggcagaagggccagcaagcccacgagacacagaaaatgggagccaaacttacccttttgtcaggaacccactcccttgataactaacacgctcctatgatagtggtattaatccagtcataagggctctgctctcaagatctaatcacctcttaaaggcccaacctcccaacctcctttttggcctgtcttttgtgtgtgcaggcgcatgtgtgcaaataaaatcacatcaggttaagcttgtcaaagtagggagcagctggctttaagataaactctctcatccacacatattttccccaccccaagcacagctgcctcttaactgctgttggaccataactccaagtgaagtggtcctccctcccccatctccacaaatagcaggaaaagtaatgttgtaatttacaaagttacttactccctgccatttcagagagaagatggagtataggaaagccctcccacccactgtccttgtgtgatgtgacacaacttgctccctcagtcttggaatacagcctcatgtggtccttggccagaggcagagaaagggccttcatctctctcacagctgaagggtgggaaacatggtcttcattccgtgtaaccacgtgctcagctagagatcagaggttctgctcataaattataaaggagaagagagatttggggatgattagcagcctctgacataggggcatctcccccagtgaggcgtgggcagattattaaaggaatggtactgggaataaaagtggctgaggataaattttaaattctcatattacttcttacaaaaattctaagttttaaatcaagtcgtataatttttaagaataggtcttcaattgatttctagatggcaaataatttatataaacaaaaacaatggagccttctccaaaaatgaatactcaattaaaaaaaaaaaaaaagacaagcctggagccagaattgaagaaatacaaatagccaatacatatgttcaaaaatattcagtgttactagctgtcagagaaatgtaaattggcagtctcaaaatgagatactttgagtattattaacttgataagacatctgctaactattgattagcaaatgttttatcaagttaatacttaatattggactttcatacttaatgaattgaaattttgtacaattcttttgcaaagaaatttgatactaatgtgaaggccattttaaaacatgataaatctagataaactgaaaatgggttatgtgcaagtataatttaaaatagggaaaagaaacaaaaaattaagtataggaatatttaaataaaatacgatatatggatatgatagcaattaaaaatgatgttttagagcaatgttactaacctaggaataagagatagtatgcctagtcccttaaaacagtttcaaaagtagatgtaaacatgttttgaacatggattacataattggaataagtttatttcctatctcgttccttcaattctgtgatatttgagaggaaaaagaaaatcaatgctgttactttttagttatgttttattactattaggaaaatatactgataattatttaaaaaggaaatatgaatgaacagactgagctatgtgcataggagaaaaacacattcttttaaaatatatgtgcttatatattctaaactcttaagcatcactttaagagtgtactaaacgtaattattcaatgggacttattacttacttggattctgtcattggcaaaaaatataaataaaacccatatctagacatggtgctaatggaatggagatctttttaaattagatatttaaaacagtgttgtatacatgtctggtcatctggttccaaagatcatttcttaagaataaaaaagttagtatgttttgacaaacttccaacaaatggctgtattagtttcttttttagtgtaattgattattctaaattactgtcctttaatttatagaatgatattgctgtttcatccttaaattgccttgtgagtctactgcaaagtttctctctttctcatctcttattgcatttgagttgtgcggccctgaagctgtgtcacatgccgtaaggtttaaaatacaataacaacatgtatttactaacctcttttttgtgcctgtgtctttcaaagtcagtgggattctgatgttggactctgctatgtatacttatggctagagtttatcatcactgcttagtgattcatttagaaaagaaaatgctggctgataccacttgacatccttaccagcactttgcctttttattttataagtgcttcctttttcaattcgttaaaatgattcacttgagtaactttcaacgtactaggtatttattcatagttttctctaacatcttgaaacgtcccatttttagttcagtctgttaggcgttcatattattagttttctttggacccaggatgtaaataaaccacttctttagatgtgggcttggacagaagccctctgtaggacctaccagctctccatgttatgaggtaacaagattttctcctaccaactcaaaatgtgccacttctttcttaatcttttagcattgcgaacattgaaaatggaaaggatcttaaggaaaagcacaaagatgaactgtcctggtagaatacagtaagccagttgctttggaatgtttttggttagaaaggataagtgatttatgtttgatgcatgtgctcaggactttggtgaagttactaaacttacatgtgtatatctgttctatacctaatcctgatacatttcttagatatatacagccttaagtgtaatcagactacttaaaaaataatatacactgtggtatttaaaaagcatcactgtaattatttggtaggttagttttaagactccttaaataattttgccttttgttttccagctggaaaattattcattgcacctctaattatggttttgggattggcactaggggccatagcggttgtaatcggtaagaaacacttcatgcatctgagattagaattatctgagggccatagagagaatacgagtgtaaatgtaataatatgaatcagttattaagtggacataatttatgttgtatgcctgctttagatagattaccagcatatcatttaaaaggtcagaggagcgtgtttcctgtaggatatgttagtatgaatttttcagtctatgaacactgtgattcatgtaccttataaagcattattaacccttttataacacaaagctaatagaattagtatccttagggaaaaaggcaagtggaatagaacccaaattttctaattctgagttcaggttgaagcatcaaggaaaagaagctctgcaccttatgtgtttcatttggtccagtaaaagatgccataggtacaaacagataatgtcagtgtgtacaggaacatatacccaacatacacttgagcactgacaaatagaaaaccttgcagtgatttgcatagttttatttatgcaagtatattaaaatgtgtattttaaagcagtggttctcagactctagcatgctttagaatatcctcaagggctggataaaacacacattgctggtttcggtctgcagtttctgactcggtatatgggaaaagtccattgatttttatttttaaaaagttcccaggtgatgctcatgcagctggttcagggaccatactttgagaactattgctttagtaattttaagctaaatgctatagataaaggctgctttgatcattgttccatatattagatggggtttttttgctaaataaaatgattttcgtatgtcaacttgggtttagcaagtaataaatgtgcaggacagatagaattataaagtatctgacatttaagttcttgcaatgtgagttaggacattatgtaatagatattattatctgtattatacagttgaggaaattaagacttactggaacctcataagtggtagaaccaggaatcaaacccaacatttggctccacagcctgtgttgttaagtgatatgctatactgcctgaaacaagtgtgagtatcatagtgtgcaaatgatatgactgtggacaataaagaagatttaaaccaaagttttgatatttggatagaaatcattattattaaactggtatcactgagggtgctaaaggggagaaaagctaaagggaaatattaaagaatgaaatattgaagaagtaaatacatttcatagcatagatgtcttcttctttgtatgttcgtacactgcaaataaataaacatagacattttaaaataggaaaacctaaatgcctctcatcctaactaactttaattttttcttatccctaggtttatttgtatttcctatctattgcctttgtaaaaaacagagaaaacgatcacggacaggtatgcactggtaacatgcagatgatttcatccagctaagctggttggagtaggagcgataccaaagggtacacccatctgtgagtcacatcttgaaaaacactgagaggaaccttctaccatctcatctcccagtgattctccgtgggccacaatgcctctagctatggtgcactcccaacatggtatcctgtcctttccctaaacaaattgctgctgcttttaaaaaatggtcactttcataaactataaacatctatatcataa

SEQ ID NO: 5669 - DNA, 6439 bp, Homo sapiens
ccgattttttggagaccacacatcaaacctcagtatatttggatgcaaatatcgctacctcccagagagacctcatttaaggagattagtgcgagggtcagtctgtggtgagtgtctgacatacttatgggtgtcttccctgggaattaagtagtgaaaatagaacttggaaatgtgcagccatggtaattcagagcacctgccatgtgcccagtgttcagaggaggatattctctcaccctttaagaataaaatttaaaacttaaattttgttaccaggacactacttatatgagcaagtagtaattttgtttgaaaaagcagcttattaatcacacgcagaaatctgaagttatttgcctcttaaatttctgaaaccctgtcgtaagccacttaacaagaggggcagtgtcatgtatatttttgtaatggacaatatccagcagcaggtcgtacacatatcctccactcattcacggaggacctgcaatacagtacagcatggagcgtagcctaggaaggcaggggaaaaaatctaccttttagagccctgtaatagagttccattatgtctatataagtgataagttgcatatatttttcattgttttaattattaataggtaacagttaatataataagtatcaaatgccctcagtgcatacaaacccaagtttaattatccaagtgaaaatgcttttgtggattgactttttaccccctcttcctcaacaacacatagtagcctcatacacaaccccttcccacactggtacacaagtatgcaaatagaaacacagacacctgcccataaacaaatcaccctggccaaatgccactgcctttgggtaatgcagggttcttcggcggaatatttcttcttctgctcctctggaatgtattccattccctgctgctctggaatgtaaccatgtgagatttcttcccctttttcatcacatggatgtctgttagaattccttttctggccgtgtttctcatgtgtaggcaatactttttatcatcttccacatttccgttttccttcctacttttgcctagttgctttatgaaaatctttatatctctccttagcccttggtcacttcatgactgttgtgaaccattttccttcttagaagcatatgatacctgatcagaacaaagctgatgttagtgatagatttctatcaggtaaaagatagaacatgtatacgcaaatgcactttcacatatggaaaccaatgccgtcattttctaaaatctatgtgatctctataaaaatattcttcctgaggttaatggaacataattttccacagccaatagcattcaatagtcaagactgcttttaatgattttccagtgcgtgccgcttcttaatttgcaaatatggtggatgttataattatataaccaatatgtatgtattagttaaacagatattggagggataactagggaatctaaccttaacctctaataccatgagaaaatcaattgcaaattaagttctgagatagaagctgtttgcaaatctgtatatggagagagcaacatgaaaacacaaaatcactgtattttttgcattgttattttattttctacttcagtgccacctttaatttggtcgtggcagtgtgtttccgtccattctttattttaaatagagaagtcatttatttggcttatggttctggaggctgagcagtccaagatgtagtggctgcatctggtgagggcctttgtgctgcaccatagcatggcagaagggccagcaagcccacgagacagagaaaatgggagccaaacttacccttttgtcaggaacccactcccttgataactaacacgctcctatgatagtggtattaatccagtcataagggctctgctctcaagatctaatcacctcttaaaggcccaacctcccaacctcctttttggcctgtcttttgtgtgtgcaggcgcatgtgtgcaaataaaatcacatcaggttaagcttgtcaaagtagggagcagctggctttaagataaactctctcatccacacatattttccccaccccaagcacagctgcctcttaactgctgttggaccataactccaagtgaagtggtcctccctcccccatctccacaaatagcaggaaaagtaatgttgtaatttacaaagttacttactccctgccatttcagagagaagatggagtataggaaagccctcccacccactgtccttgtgtgatgtgacacaacttgctccctcagtcttggaatacagcctcatgtggtccttggccagaggcagagaaagggccttcatctctctcacagctgaagggtgggaaacatggtcttcattccgtgtaaccacgtgctcagctagagatcagaggttctgctcataaattataaaggagaagagagatttggggatgattagcagcctctgacataggggcatctcccccagtgaggcgtgggcagattattaaaggaatggtactgggaataaaagtggctgaggataaattttaaattctcatattacttcttacaaaaattctaagtttcaaatcaagtcgtataatttttaagaataggtcttcaattgatttctagatggcaaataatttatataaacaaaaacaatggagccttctccaaaaatgaatactcaattaaaaaaaaaaaaaaagacaagcctggagccagaattgaagaaatacaaatagccaatacatatgttcaaaaatattcagtgttactagctgtcagagaaatgtaaattggcagtctcaaaatgagatactttgagtattattaacttgataagacatctgctaactattgattagcaaatgttttatcaagttaatacttaatattggactttcatacttaatgaattgaaattttgtacaattcttttgcaaagaaatttgatactaatgtgaaggccattttaaaacatgataaatctagataaactgaaaatgggttatgtgcaagtataatttaaaatagggaaaagaagcaaaaaattaagtataggaatatttaaataaaatacgatatatggatatgatagcaattaaaaatgatgttttagagcaatgttactaacctaggtataagagatagtatgcctagtcccttaaaacagtttcaaaagtagatgtaaacatgttttgaacatggattacataattggaataagtttatttcctatctcgttccttcaattctgtgatatttgagaggaaaaagaaaatcaatgctgttactttttagttatgttttattactattaggaaaatatactgataattatttaaaaaggaaatatgaatgaacagactgagctatgtgcataggagaaaaacacattcttttaaaatatatgtgcttatatattctaaactcttaagcatcactttaagagtgtactaaacgtaattattcaatgggacttattacttacttggattctgtcattggcaaaaaatataaataaaacccatatctagacatggtgctaatggaatggagatctttttaaattagatatttaaaacagtgttgtatacatgtctggtcatctggttccaaagatcatttcttaagaataaaaaagttagtatgttttgacaaacttccaataaatggctgtattagtttcttttttagtgtaattgattattctaaattactgtcctttaatttatagaatgatattgctgtttcatccttaaattgccttgtgagtctactgcaaagtttctctctttctcatctcttattgcatttgagttgtgcggccctgaagctgtgtcacatgccgtaaggtttaaaatacaataacaacatgtatttactaacctcttttttgtgcctgtgtctttcaaagtcagtgggattctgatgttggactctgctatgtatacttatggctagagtttatcatcactgcttagtgattcatttagaaaagaaaatgctggctgataccacttgacatccttaccagcactttgcctttttattttataagtgcttcctttttcaattcgttaaaatgattcacttgagtaactttcaacgtactaggtatttattcatagttttctctaacatcttgaaacgtcccatttttagttcagtctgttaggcgttcatattattagttttctttggacccaggatgtaaataaaccacttctttagatgtgggcttggacagaagccctctgtaggacctaccagctctccatgttatgaggtaacaagattttctcctaccaactcaaaatgtgccacttctttcttaatcttttagcattgcgaacattgaaaatggaaaggatcttaaggaaaagcacaaagatgaactgtcctggtagaatacagtaagccagttgctttggaatgtttttggttagaaaggataagtgatttatgtttgatgcatgtgctcaggactttggtgaagttactaaacttacatgtgtatatctgttctatacctaatcctgatacatttcttagatatatacagccttaagtgtaatcagactacttaaaaaataatatacactgtggtatttaaaaagcatcactgtaattatttggtaggttagttttaagactccttaaataattttgccttttgttttccagctggaaaattattcattgcacctctaattatggttttgggattggcactaggggccatagcggttgtaatcggtaagaaacacttcatgcatctgagattagaattatctgagggccatagagagaatatgagtgtaaatgtaataatatgaatcagttattaagtggacataatttatgttgtatgcctgctttagatagattaccagcatatcatttaaaaggtcagaggagcgtgtttcctgtaggatatgttagtatgaatttttcagtctatgaacactgtgattcatgtatcttataaagcattattaacccttttataacacaaagctaatagaattagtatccttagggaaaaaggcaagtggaatagaacccaaattttctaattctgagttcaggttgaagcatcaaggaaaagaagttctgcaccttatgtgtttcatttggtccagtaaaagatgccataggtacaaacagataatgtcagtgtgtacaggaacatatacccaacatacacttgagcactgacaaatagaaaaccttgcagtgatttgcatagttttatttatgcaagtatattaaaatgtgtattttaaagcagtggttctcagactctagcatgctttagaatatcctcaagggctggataaaacacacattgctggtttcggtctgcagtttctgactcggtatatgggaaaagtccattgatttttatttttaaaaagttcccaggtgatgctcatgcagctggttcagggaccatactttgagaactattgctttagtaattttaagctaaatgctatagataaaggctgctttgatcattgttccatatattagatggggtttttttgctaaataaaatgattttcgtatgtcaacttgggtttagcaagtaataaatgtgcaggacagatagaattataaagtatctgacatttaagttcttgcaatgtgagttaggacattatgtaatagatattattatctgtattatacagttgaggaaattaagacttactggaacctcataagtggtagaaccaggaatcaaacccaacatttggctccacagcctgtgttgttaagtgatatgctatactgcctgaaacaagtgtgagtatcatagtgtgcaaatgatatgactgtggacaataaagaagatttaaaccaaagttttgatatttggatagaaatcattattattaaactggtatcactgagggtgctaaaggggagaaaagctaaagggaaatattaaagaatgaaatactgaagaagtaaatacatttcatagcatagatgtcttcttctttgtatgtttgtacattgcaaataaataaacatagacattttaaaataggaaaacctaaatgcctctcatcctaactaactttaattttttcttatccctaggtttatttgtatttcctatctattgcctttgtaaaaaacagagaaaacgatcacggacaggtatgcactggtaacatgcagatgatttcatccagctaagctggttggagtaggagcgataccaaagggtacacccatctgtgagtcacatcttgaaaaacactgagaggaaccttctaccatctcatctcccagtgattctccgtgggccacaatgcctctagctatggtgcactcccaacatggtatcctgtcctttccctaaacaaattgctgctgcttttaaaaaatggtcactttcataaactataaacatctatatcataa

SEQ ID NO: 5670 - DNA, 535 bp, Homo sapiens
gacctttgtggttcttggaagaagatattttaagaaccagttatcctaagaattctgagcacgcctcttctgagaattgcttggactgtctttgaactctgcacctccttccaggccatcttgtgagacttggtgttaatagctgaagtcctatctgtaccaacaagcaaggccacttttcagaagataagagttcactgaatgcacctattataatctgtggccccagcagtataattcttttatctttcaaatgttataattgcaaaaaatctcaatgtccaaaagggaatgagtgaaactaaattaatgagaagaatattaagttactgaagtgtatatgcgtaggggcgtgaatgtgtgtgtatataaatatgtattaaaactaggcccagtaaccttgtacttacccagttccatgccgctacactatttttccacattttcatagacctattgaaagatgatggctcctttgtggacataatttagcaatgtattaaattaaagtcaatgtagacaacaggccatttcg

SEQ ID NO: 5671 - DNA, 535 bp, Homo sapiens; identical to SEQ ID NO: 5670

SEQ ID NO: 5672 - DNA, 2026 bp, Homo sapiens
ggaatttgactggggagggatgtacagtgagcatcagttgttacctatgatcagggaaggatccaggttttgtggggcctgatgcttaaggtgtgtgtgtgtgtgtgtgtgtgtgtgtgtgtgggagttaccctctaaaaaaaggactttacaataaatctgcctctcactggttattgtaagagtgtatgtgatgcactgagaagtcatttctgaagatacgtggggcgctctttgtagagaagtgaaaataacattcactatgacaatagctaacatttatcgagcccttaccatatgccaggcactcgggcaagcatttgcaggcttttctcattgattcctcacaatcagcctaggatacagatgctgcctattagtctcattttatggctgaggaagcagaggctcagaggggttaagtcatttgcccaaggccacacagctagtatatgatagagtcagggttcaagcatatggagcaaaacaggacttgtttcctatggtttaagcattccctacatagtgatctctcactgtcataattacatgcctactatgttctcttcagtaaagatctcttatttttagttgactagaggaagggcaatatgagcagaaaatttttcttgttttggggatgaggtctcactctttttccaaggctggagtgtagttgtgcaatcatagctcagtgtagcctggaattcttggactcaagcaatcctgctgcttcatcctcccaagtagctggaactacaagtgtgcaccatcacatctaactaatttttgtagagatggggtctggctatattgcccaagctgatctgaagctcctggcttcaagcaatcctcctgccttggcctcccaaactgttgggattacagtgtgagcctggaaaatatttgctaaaatattaaaaaataaagttttatttcttcccacttcacgaaggttatatttggaattaagacagtgtgttctttaatagtatttttcatagtaattgatttgatgagtaggcaagaatgatttgtgataagttaaatgtcttagataagtgtatgattaaaaaatagctcatccgggtgtggtggctcatgcttgtaatctcagaactttgggaggccgaggtgggcggatcacttgaggtaagtagttcgagaccagtctggccaacatggtgaaacccatctctactaagaagataaaaattagctgggcatggcacctgtagtcccagctactcaggaggctgaggcaggagaggcaagagaatcacttgaacccgggaggcagaggttgcagtgagccgagatcacaccactgcactccagcgtgagcgacagagcaagactctatctcaaaacaacaacaacaacaaaaacctcttgaaaattcttactactttatctgttggctgaactaatgccaagctcccatcatgaataatcaagaatttcaacctgatgacttcttggtaataataaagttcaatggggttcttctcatatggagtgtacataaaacactgtgagggcccagaacagcaaaacgtgcttaaaggtggacatgggatctgcttcagggtatctgctgaggttaggactctgtgtgcctgtgggcataaacatgtggacataccttcctttggatcctgaaatggccaattccacagtagggggaaaggaggaaggacagctgtgtttgaatctatcatttcttgagacagcttgcattaaaagtcaaaccaagaaaacccaaatggccacttggctttctgtggtgtttgggaaggcagtttgaggagtggtctgtgaagtccctgggcaggagggctcgggctgagggctcagctgtggcacccccagatgactgctgaggtcatgaaggagctcatagcaccattcatgtttctggactcagtcattgtgcctggggtccccatagcaaggaaagtagggaagtgaaccaaggtccagccagtgttgctcttggctgcagggaaggaaaaaaaaaaaaaaa

SEQ ID NO: 5673 - DNA, 98 bp, Homo sapiens
cgggtggatcacttgaggtcaggagttcgagaccagcctggccaacatggcgaaaccccatctctactaaaaatacaaaaatttgccaggcaaggagg

SEQ ID NO: 5674 - DNA, 209 bp, Homo sapiens
ctggaggccctgtgtggggatgctggggtagggatcccaggaaatgagttgaggggtaggtgaggtggggagggttgtaatggctagagcaggggtgttcaatcttttggcttccctgagccacattggaagaagaataattgtcttgggccacacataaaatacagtaacactaatgacagctgatgagcaaataagcaaattgcaaa

SEQ ID NO: 5675 - DNA, 15413 bp, Homo sapiens
ctggagtctggaaaaccacgcgggaggaggttgtggggatatggacgagcatccgaggcccccgggtgcgtacggctgcgcatgagtgggctgtaatcgggtgtctgggggtgagtgactgcgttcgtgcgatgcgcgcggggagcagctgtcactttgcccaccctgctccggggcaaggtctctggcgccaggatcttctgggtgggtgggagcagcgcccctcccctccgatctgggcccgcccccaatgcagagcccgcccctccctctgggtacagctaataacctctaattagtgcacattaccccgcccgtctaccggggaggggttgcagagggaccctggggtcacagggcgcgagcctgggcttcacccttcccctcaaaacccggtccactcggaacctctgttttctcgccggcaaagcagggaattaaaacagcacttgccatctggagacatggggaggattcaatagtctatgtatttaaatcgcttagcgcaaggactgcatacagtaagcactccatacatggtgactgcaatttattgttaactataattcccatcactttccattgacccccgctccaccgccccagccggggtttcagggcgggcgcacagtcttccccctaggccgcgttctgcggtctccgcgccccctggtgggcccgggcgacgcggcagcttcagccaaatcctgggttctgaggtgggggtgatgccgggcgcgcatctggggagggcaaggcgcggggggaatatcgtggaagacggatccaggctgggcaagggtgcctatccatcagccaggacatgtgtgtctaactgacctcttctcgacctaggaccatacccgtgtccccttatctactgctggagtcaataatgcagggaggatccattcatttatttatttcttgaaacagggtctcccccctgacgtccaggctggagtgcagtggcgcgaccacggctcactgcagcgttgacctcccggactcaagcgatcctcccacctcagcctctggagtagctgggaataggcgcgtgccaccacgcccagctacttttattttttattttatttttgtagagacggagtctcgctgtgttgccagggctgttctcgaactcctgggttcaagcagtcctccctcctcgacctcccaaagtgctgggattacagatgtgaaccatcgcgccaggcattttattttattttattttattttatttattttttttgagacagtctcactctgtcgcccaggctggagtgcagtggcgcgatctcggctcactgcaacctccgcctcttgggttcaagctattctcctgcctcaacctcccgagtagctgggactacaggcgcgtgccaccatgcccggctaattttttgtatttttagtagagaaggggtttcaccgtgttagccaggatggtctcgatctcctgacctcgtgatccgcctgcctaggcctcccaaagtgctgggatacagacgtgagccgccgcgcccggccctatttttaaatttttactgtttttttttgagacagagtcttgctctgtcacccagactggagtgtagtggccctatcacggctcactgcagtctcgacctcctgggctcaagctatcctcccacctcagcctctgtagagctaggagctaggaccacagaaacacgccaacatgtctggctaatttttttttttttttttttgaggagtcttgcactgttgccccctggagtgcagtggtacgatctcggctgactgcaacctccgcctccagggttcaagcgattctcctgcctcagcctcccgagtagctgaaatcaggcgtgcgccaccacgcccagctaatttttagtatttttagtagagacggggtttcaccatgttggccaggctggtctcgaacacctgacctcgtgatccgcccgcctcggcctcccaaagtgctgggattacaggtgtgagccaccgctacctggagtaatttttaaattttttgaagagaggctggtctccaacttctatccaaattaattctccctcctaggcctcccaaaatactgggattacagtcgagagccaccgcgtcggcgggaaaacccctttagcatcccctctcccagtccatagaaagtgccagggctcgcccctccccgcacaacggctccgattataaagtggttagacacaagaatttacttaaggccgggcgcggtggctcacgcctgtaatcccagcactttgggaggccgaggcgggcggatcacgaggtcaggagatcgagaccatcctggctaacacggtgaaaccccgtctctactaaaaatacaaaaaattagccgggcgaggtggcgggcgcctgtagtcccagctactcgggaggctgaggcaggagaatggcgtgaaccccagggggcggagcctgcagtgagccgagattgcgccactgcactccagcctgggcgacagcgagactccgtctcaaaaaaaaaaaaaaaaaaaaaaagaatttacttaagttgcagggaaaagacgtgaatgcgcttgtgtaacaggggtggagcacctccgtctcaaaaggatcttgaggacctcccaccccaaaaagggccagggcgaggatgggaggtgggaccaccctcggatgcacaaggctgggccaggctgacccctagcggcagggcgggcgcccgaacggtgcccggatccaagatggcggggctggaggcaagagcgggcgtagggaggagattacgttccgaggcggagcctgggcttgggggcggggcggggcctgcgcctaggggggcggggcggggcggcgctctaggccgagcgggaggtcggggctgcgggcgctcgctggtggcggacccggaggctgctgcggcgccggggctccgtggcctggattgaatccgatcgggagccatgagcgtggacaaagctgagctatgcgggtctctgctcacctgggtaggtcgtggggcggggctaggggaaggtgagcgcccgctcctcttgcccgggatccctggccctggttcggtcagtctcttggtgctggggctgggaggtgcggggtcgtcgacttgctggaccgttggactctggcccgagcacccgcccccgtcacgtggcaagtctgcgtggaaaggacaggtgaggccccgcccctctgtggttggttcacgtggggcgaggacacaggtgaattggcctggtcacgtggtgcctgtggggcccaggtgactcgcgataccaccctggcctggacgcgcagggtttgttgggcagaggtgaggtgaggccacgccccctccggtctcaggtgagcagaagccagtccctcgcagagctgctgtggcggagcagcgcccgccccaccatgtgaggttcgctgactggaaaagtctgcaaaaggggagcggttcggcgctcccaggccctaactctttccttgtcctttcctttacccctcagttacagacgttccacgttccgtctccctgtgccagccctcaggacctgagcagcggccttgccgtagcctatgtgctgaaccagatgtgagtggagctgaaggggaggatcccaaaagtgtcccccagtctgctcatcccaccttctcgcccccagagacccctcctggttcaacgaggcatggctccagggcatctcggaagatccaggtcccaactggaagctgaaggtgacaagtggactcctgattagaggacagactggtgaagagatgaccagggacgggccagctaggcacatgtcctgggtgatgggcaggaagagggacagatgtctggtgatcaaccatttgttcatccattcatctatggagtactcaccctgtgccaggcctgggcattcagcaaggaataacacagacaaaaacctgccccacacagccatcattctagtgacaagcaacacatacacaaccataaaaattaacttccaggctgggcgcagtggctcatgcctgtaatcccaacactttgagaggctaaagtgggtggatcacctggggccaggagttcaagaccagcctggccaacaagttgaaaccccatctctactaaaaatacaaaaattagctgggtggggtggtgtgcacctgtaatcccagttacttgggaggctgagacatgagaatcacttgaacctgggaggtggaggatgcagtgagctgagattgagccattgcactccagcctgggcaacagagcgagactcttgtctcaagaagaagaaaaaaagaaaaagaaaaagaaaaagaaaaaacttttgatgccagtagttctgtgaagacaacaaaaaagcagggctttgagagagagcaatgagggcataggtggctgattacatcagatgggttaatctccaagtgaaatttgggggaacggtgttccaggcatagggaatagcagatgtaaaggccgtgatttgggaataaacttggtgtgatggaggaatggcagagagggcagaacagagcaagagggcaagatttgtaggagatgaggtcatcaggggcctggcaggccatggtgggggtgtggattctatttttaagtgctgtggaaagtcaaggcagggttttagcagagcaaagatgcaacctggcttgggctttataaagctccccctggctgcatggagagaaataaaatgtaggcagcaaaagtggaagaggagaggcagctggtgcactaatccaggtgagaggtaaagatggatgggtagggctgaaggatggtggggcaggtggtgagaagtgacttggttctggagacatatgaaggaagatggtcaggcaggccgggcacagtggctcatgcctgtaatcccagcaattttagaggctgaggtgggaggattgcttgagctcaggagcttgagaccagcctgggctacatagcaaaacctcctctctacaaataaaaaaaagtagtcgattgtggtggcatatgcctgtagtcccagctactgggaggcagagataggaggattgcttgaccccaggaggtcgaggctgcagtgagccaagattgcaccactgcactccagcctgggtgacagagccagaccctgtcttaaaaagctaaagcaaaaaaaaaaaaaaaaaaaaaaagaaacaaagatggtcaggcagacaaaaggggcagacagccagacaggtcacccctagaggaaggcgcacgcagacagaataggatgagatgagcagggaaggagaagtgaggtggagagaggatgggacctacagattcagagtgggaggcctctgaacttgtccacagttccttgttcctccctaggtcagcaatctgaagatggtcttacggagcctagtagagtactcccaggatgtgagtaactgtaaagggattcagggggttgagttgggagaagggtgggcccatgagcccctgacacccccttctccccaggtcctggcgcatcctgtgtcagaagagcatctcccagatgtgagcctcattggagagttctcagacccggcagagctcggcaagctgcttcagctggtgctgggctgtgccatcagttgcgagaaaaagcagggtatggggagcttagggggtccccagggctggcctgaggaaatcctccttcctccccacctcacccctgggtctcagcctcccccaccttgatccccagaccacatccagagaatcatgacgctggaagaatcggttcagcatgtggtgatggaagccatccaagaggtgggtgggggcactcagtgtgcaattggaaaatgtcaggagaggggacatctctagggcagagagaactgggcacaggtcctgccctggtaaggtctggactctgcctggaactcagctggccagacatctctgtctcatgtgtctgccagctcctcccagctctaagtcgcaatctagcaggctcaagggatctggcttccctctgtgttggaggcacggagggcagcctctgggctggggttattgggcagaactggccttgacgggaggatggagaggttctcaggttggatagtagatactttgaaggctggcctcagatatccagttcattacaatgccccttcccactcctcagctcatgaccaaagacactcctgactccctgtcaccagagacgtatggcaactttgacagccaggtaagagatttgggggaaaggtgttccaggcacagggatcagcaaatccaaaggccgggagttggggataagtttgctgtgattaaccttgtgacttaaccttgttaaaggtccagaccccacttacagatgctcagggtagcctaagggggaggggcttgtccttaagcctgtaagccacgcccatcttccagggtgctagccacttcctgtaccaggtctccagtgttctggaatcgctcttccttcagtctccaaccccagccctgttttcttttcttttctttttcttttttttttttttttttgagatggagtctcactctgtcacccaggctggagtgcagtggcacgatctcggctcactgcaacctccgcctcccgggttcaagcgattctcctgcctcagcctcccgagtagccaggactacaggcacacgccaccacacccggctaatttttgtgtttttagtagagaaggggttcgccacgttgggcaggctggtctggaactcctgatctcaggtaacccacccgcctcagcctcccaaagtgctgggattataggcgcgagccactgcacccggcgccagccctcttttcaatcctgagggtttcttggccccctccatttggcctctagagatctcagcctccctccccccgtccttctcctgaatccctgagttcctcttccccctcatctctgcagtcccgcaggtactatttcctaagtgaggaggctgaggagggggacgaattacagcagcgctgtctggatctggagcggcaggtagggccctaggtggggcagggtcacttgagtagcccctctccaagcccaagctcatctttctgccctgcccgcagctgatgctcctgtcagaggagaagcagagcctggcgcaagagaatgcagggctgcgggagcggatgggccggcctgaaggcgagggtaccccaggtctcactgccaagaagctgctgctgctgcaatcccagctggagcagttgcaggaggagaacttcaggtgtggtcagctggggactgggccaggcaagccaggggaccgggggagggcagccccctcatgtgctcttcccccaacacccccaggctggagagtggcagggaggatgagcgcctgcgctgtgccgagctggagagggaggttgcggagctgcagcaccggaaccaggcgctgactagcctggcccaggaggcacaggccctgaaggatgagatggatgaactacggtgagtggtgggttcctgggtccccatcacggggggcggggggtaaacctgtttccagagttcccctctgatgccatagcagctctgtaattttcatgtgcccagtgaacccccaatatgccccctggactccacagtgccaccctgagccctacagaacgcccaaggccacattgcactatcctgaattccaccatatcccctggaccccacactgccccccccttatcccacagtatgcttccaagaccccatagcatccctgtggccccccaaaacacaagaacctcccctacaatgctctgcagatcccactgcacagtttgggcttcataatgcccctggatcccatggtaccttctaggactccacaatgcaattactttgcacccccttttgactctactgtgccttctgtaaccacaaagggctccactgggcccctatagcatctctgtaatgcgaaggtactagtgcaccccccaattgcacttctaaggaccccgcaggtcctcttgtcccatacctcccccaatgactccaaggtatccttggcagatgctcagacctctctaggctccccatcactccccctataaccccaccctctgtgtccccacaattccaccccaggggatacctgattataaccctgggctaaccattgctgtaatgactctcaacagctccaggccctgattgacccctaaccctcaactttcatgaccccttcaccttgaacccaaaagcctcaggctgaacaacaccctgtgctccaagggccactccacatcccagctgacccctgatcagagctctcagccctcccccttccctcccactcccctaggcagtcttcggagcgtgctgggcagctggaggccacgctgaccagttgccggcgccgcttgggcgagctgagggagctgcggcggcaggtgcggcagctggaggaacgcaacgccggccacgcccgagcgcacgcgacaactggaggatgagctacgccgagcgggctccctgcgcgcccagctggaggcgcagcggcggcaggtgcggcgggggcggggttagggccggggccccgcccctggcagcaagtctctcaccgttggccagccctccgcccacccctgatcccctcccttatttgtacgtaggccacgctctccgggcctcttccctccacccacgctgctcttctgtctgggttagtaagcccagcctttcccttcccttaagtaccgctcctctaaattctttgatgcccgccgcttcaccatgctgcttgatttccttggggctacctaaccatgtaacaaaactcgtggtaaattgaaaatatcctaaaatgcataaaggccaggcctggtatcccagcgctttgggaggctgagccgggaggatcacttgagcccaggatttcgaggttgtagtgagctgtggctgcatcactgcattccagcctgggtgacagggtgagaccctgactcaaacaaaagaaaaagaccgggtgcggtggctcgcgcctgtaatcccagcactttgggaggccaaggcgggcaccccataactccttctgtaaccccacatcacttgaggccaggagtttgagaccatcctggccaacatagcaaaaccctgtctctacttaaaaatagaaaaattagtctgggcgtggtggctcactcctgtaatcccagcactttgggaggccgaggcgggtggatcccgaggtcaggagatcgagaccatcctggctaacacggtgaaaccccatctctactaaaaatacaaaaaattagccgggcgtggtggtgggcgcctgtagtcccagctactcgggaggctgaggcaggagaatggtgtgaacccgggaggcggagcttgcagtgagccgagatcgtgctactgcactccaggctgggcgacagagcaagactccgtctcgaaaaaaaaaaaaaaaaaaattagccgggctggtggcgcgcgcctgtaatcccagctacccagaaagctgaagcacgagaatagcttgaacctgggaggtggaagttgcagtaagccaagatcgcatcactgcactccagcctggttgagagagggagactgtctcaaaagaaaaaagtaaaagatattaaaaaaagaaaaagaaaaagagagctgggcgtggtgactcatgcctataatcccagcactttgagaggttgagatgggagatcgcttgaggccagcagttcgagaacaccctggtcaagatagcgagattccatctgttttcaaaaaataaaaatttttaaattttttttaaaaaagaaaatccattgaacatactttacctactgagcatcacagcctagcctagcctaccttaaacatgctcagaaaacttaccttagcctagtttggcaaaatcatctaccataaagcctattttataataaagcgttgactatataacgcaatttattgaagactaattcattgcaattgaaaaacagaatggttgtatgggttcctactattaacattcacagtcggctgggtgcaacggctcacacctgtaatcccagtgctttgggaggctgaagtgggaggactgcttgaggccaggagtttgagatcagccagggcaacagagggagaccctgtctctaaaaaaaacaagcaaaaacatacacagctgaaagcaccatagtaaagtcaaaaaaataataagtcaaagcatcctggatcggggaccatttgtactcagcccctgcccctgctcccagccctgctgtccttattcctcccctctctgtgttcaggtgcaggaactgcagggccagcggcaggaggaggccatgaaggccgagaaatggctatttgaatgccgcaacctggaggaaaagtatgagtcggtgacaaaggagaaggaggtgaggctgaggttccactgcccaagccccaccctgccaattctggggtagcccatttcccaggaggccgagcctgacccgtggagtgtcttgtaccctgtccctgcagcggcctgttggcggagcgggactccttgcgggaggccaatgaggagctgcgctgcgcccagctgcagccgcgggggttgacccaggccggtgagatgaagccccatcccggggtcttacctgtcctggtgtactgtttgggtagaacaggttgtgtcccagtgcatgtctaggttggggacagagctaggccaggctggaggtgaccagaaagaggtgacacggtcaaattgaagagagaggctcagggtctcagggtggagcaaaggctaaaaagcttggccaaccctcccggttctctatcaagccggggatggagcttgtgtcaagccagactgttggctgaacttgaagccccaaaagatgatccttgggaagaagaccctaggggcggggacaggggatgcgaagagacctgaagacttttctcgcattcttcagatccctcactggatcccacctccacacccgtggataacttagccgcagagatcctgcctgcggagctcaggtatcctggggtcactcaaaactctggccccacccaggcttgccaaggcccgccctcagccccgctcccgccctcccatcttctgctagccccggttgcttggtctcagctccaggtgccagccgggctcctaggcccacttactcctgatttggctctgtccagccctaccagatgactttgcctctcaagggtctatccttagtacacaaattatgtccaacacctggctccagttcctgcacaaaaatcctatgccctagccccgctgactttgatcctttcccccagcgtccacccctgttagtgtaacctctgtgagtttcagtcccctgtgccctgccgggattaactctcccaccccgggccaggcacggtggatcatgcctctaagtcccagcactttggaaggccgaagctggaggatcacttgagcccaggagtttgagagcagcttgggcaacatagtggccctctctacaaaataaaaatgatttaaaaacccgaaaaacgaccgggcgcggtggctcacgcctgtaatcccagcacttcgggaggccaaggcgagcggatcacaaggtcaggagatcgagaccatcctggctaacacggtgaaaccccgtctctactaaaaatacaaaaaattagccgggtgtggtggcacgcacctgtagtcccagctactcgggaggttggggcaggagaatcgcttgaacctgggaggcagaggttgcagtgagccgagatcgcgccactgtattccagcctgggcgacagagcgagactccatctcaaacaaacaaaaagccaaaactaaccaaacaaacaaacaaaaaaaccccgaaaaactgtcccatcctagttcttcccatttctgcttcccgctttccagcagtcccatcccagctgttcgaatccactcttgtagctccgcccctgcctagccccacccactatcccagcttagagctccgtccactttaaccctgggccgggaacctgaacccgtagtaggtcctcggtgctccaaccccatggtctggctgggctcttccccagggctctgtcccgcccctagctccactctccctgagccccagcgagcctgcgaggtgactcgaccctggccctgctctctcctcccgggtctgcagggagacgctcctgcggcttcagctggagaacaagcggctgtgcaggcaggaggcggccgaccgggagcggcaggaggagctgcagcgccacctggaggatgccaaccgcgcgcgccacgggttggagacgcagcaccggtgagcgcctggggacctacctgcgcggagcagggacagagggggccaaaagtgggcacaggcactaagcggccccccaccctcgcaggctgaaccagcagcagctatccgagctgcgggcccaggtggaggacctgcagaaagccctgcaggagcaggggggcaagactgaagatgtgagtgtcacccaccacctcccagcctggccctcccttgtgccccgaagtaaccctcctctctctcccatgctgcccgatgccccatacaggccattgtaagtaccatgggcccaggatggcaccccctaccctcaccctgggaaggaagaattagggcctctctggatcccccactcaccttgcctcttctctctcccagtccattttgctgaaaaggaagctggaggaacatttgtaagtcgcagaaagagggaactcctcgtgggggcatggatttgatattagtggggagtttcttaggcatgtgccaccatgcctggctgattttttatatttttagtagagacggggtttcactatgttggccaggctggtctcggactcctgaccccagatgatccacccgctttggcctcccaaagtgctgggattacaggcatgagccaccgcgcctggcctgctttcttttcttttacctgtctgctattgaagagatttgtattctagaaagatccctggctgctggatggagtgcttgagagtagaagaagctagcaagggaagatggtggctgaaccagcttgggagctgtgggatgggaagaagtggacagcaggggctgttccggggcatacctgctaagggtgcggagggttgtggctctgacagctgtggagccggtgggaccagggcacacagccccaggcatgaggggcaggcagagagggctctgtggccatgtaggggcatttctggctggcggggaggtctgtggctaccactgggacaaaagagaagccagcccggaggtcagcccactgctgctcatccccggcccacaggcagaagcttcatgaggcagatctggagttgcagaggaagcgggagtacattgaggagctggagccacccactgacagcagcagtaagtaggacctagtgaccagagggtggggagatcccagagcccagcagcgtggagctgatgggccacctcttccgccagcagcccggcggatcgaggagctgcagcataacttgcagaagaaggacgcggacttgcgggccatggaggagcgataccgccgctacgtggacaaggcccgcatggtgaggacgctgggtgttcccacaagttgcctgccctggcttcttactttttgtgcctcctattgagtcaaacctcctgcttgcacatctgtgcccccaactcatacctgtcataccccaccataagacagacttctgcatgattccccactgctactgattgtcacattaaaatactgcacagctggctgggtgccgtggctcatggctgtaatcccagcactttgggaggtcaaggcaggcggaacatgaggtcaggagtttgagaccagcctggccaacatggtgaaaccccatctctactaaaaatacaaaaattagctgggcatggtggtgggtgcctgtaatcccagctactcaggaggctgaggcaggaaaatcatttgaacccgggaggcggaggttgcagttagctgagattgtgccactgcgctccagcctaggcgacagggcaagagtccatctcaaaaaaaaaaaaaaaaaaaaaaaaaattacgcacagccaggcgcagtggctcacgccgctaatcccagcactttgggaggctgaagcagctgatcccttgaggtcaggagttcgagagcagcctggccaacatggcgaaaccccgtctctacgaaaaatagaaaaattaggcgggattggtaacatgcgcctgtaatcccagctactcgggaggctgaggcaggagaatcacttgaacccgggaggcaaaagttgcagtgagctgagagtgcgccacttcactccaggctgggcaacagagccagactccatcacaaaaataaaaataaaaataaagtaaaaataaagtactggctggatgggcacaatggctcatgcttgtaacctcaacactttgggaggctaaggcaggagaattgcttgatgccaggagttcaagaccatcctgggcaacatagggggactctgtctctataatgaatgaaagaatgaatgaatacacacaccccagtatgtcccagggggtttcaaggccaaagtcacctggctatgacttcctcaacctgtaggtcatgcagaccatggaacccaagcagcggccagctgcgggggcacctccagaactccattccctgaggacacagctccgagaacgggatgtccgcatccgacacctggaggtgggtgtcctcgtccctttacgctgcctccaacgtatctaggcccctgacacttgcctccttgacagatggactttgagaaaagccgaagtcagcgggagcaggaagaaaagctgctcatcagtgcctggtataatatggtaagtgtggggtctgggctctaagatctcatgggtagaatattggtgggggggtcctgtgagctcacctgaccccaaccacacctcctcctgaagggcatggccttgcagcagcgagctggggaggagcgggcgcctgcccatgcccagtcattcctggcacagcagcggctggcaaccaattctcgccgtggacccttgggacgcctggcatctctgaaccttcgccccactgacaagcactgacagacctcacaatcaagccagcctgggctccacccaccctggcttcctccagctcacatggcgcccagcactgggcttcagccaggtgctcgagagctttgaggccatgatctctgctcttccctctcccagattggtggggagggagggcgggaggtagatataggcctgttctttttagcaatgtgattcttgttgttgattctctctctggagttcatgtgctgcctcaggagactctgattttatatttgagaaaaataaaggcgttcaatctgcc

SEQ ID NO: 5676 - DNA, 7443 bp, Homo sapiens
ctggagtctggaaaaccacgcgggaggaggttgtggggatatggacgagcatccgaggcccccgggtgcgtacggctgcgcatgagtgggctgtaatcgggtgtctgggggtgagtgactgcgttcgtgcgatgcgcgcggggagcagctgtcactttgcccaccctgctccggggcaaggtctctggcgccaggatcttctgggtgggtgggagcagcgcccctcccctccgatctgggcccgcccccaatgcagagcccgcccctccctctgggtacagctaataacctctaattagtgcacattaccccgcccgtctaccggggaggggttgcagagggaccctggggtcacagggcgcgagcctgggcttcacccttcccctcaaaacccggtccactcggaacctctgttttctcgccggcaaagcagggaattaaaacagcacttgccatctggagacatggggaggattcaatagtctatgtatttaaatcgcttagcgcaaggactgcatacagtaagcactccatacatggtgactgcaatttattgttaactataattcccatcactttccattgacccccgctccaccgccccagccggggtttcagggcgggcgcacagtcttccccctaggccgcgttctgcggtctccgcgccccctggtgggcccgggcgacgcggcagcttcagccaaatcctgggttctgaggtgggggtgatgccgggcgcgcatctggggagggcaaggcgcggggggaatatcgtggaagacggatccaggctgggcaagggtgcctatccatcagccaggacatgtgtgtctaactgacctcttctcgacctaggaccatacccgtgtccccttatctactgctggagtcaataatgcagggaggatccattcatttatttatttcttgaaacagggtctcccccctgacgtccaggctggagtgcagtggcgcgaccacggctcactgcagcgttgacctcccggactcaagcgatcctcccacctcagcctctggagtagctgggaataggcgcgtgccaccacgcccagctacttttattttttattttatttttgtagagacggagtctcgctgtgttgccagggctgttctcgaactcctgggttcaagcagtcctccctcctcgacctcccaaagtgctgggattacagatgtgaaccatcgcgccaggcattttattttattttattttatttattttttttgagacagtctcactctgtcgcccaggctggagtgcagtggcgcgatctcggctcactgcaacctccgcctcttgggttcaagctattctcctgcctcaacctcccgagtagctgggactacaggcgcgtgccaccatgcccggctaattttttgtatttttagtagagaaggggtttcaccgtgttagccaggatggtctcgatctcctgacctcgtgatccgcctgcctaggcctcccaaagtgctgggatacagacgtgagccgccgcgcccggccctatttttaaatttttactgtttttttttgagacagagtcttgctctgtcacccagactggagtgtagtggccctatcacggctcactgcagtctcgacctcctgggctcaagctatcctcccacctcagcctctgtagagctaggagctaggaccacagaaacacgccaacatgtctggctaattttttttttttttttttttgaggagtcttgcactgttgccccctggagtgcagtggtacgatctcggctgactgcaacctccgcctccagggttcaagcgattctcctgcctcagcctcccgagtagctgaaatcaggcgtgcgccaccacgcccagctaatttttagtatttttagtagagacggggtttcaccatgttggccaggctggtctcgaacacctgacctcgtgatccgcccgcctcggcctcccaaagtgctgggattacaggcgtgagccaccgctacctgggtaatttttaaattttttgaagagaggctggtctccaacttctatccaaattaattctccctcctaggcctcccaaaatactgggattacagtcgagagccaccgcgtccggcgggaaaacccctttagcatcccctctcccagtccatagaaagtgccagggctcgcccctccccgcacaacggctccgattataaagtggttagacacaagaatttacttaaggccgggcgcggtggctcacgcctgtaatcccagcactttgggaggccgaggcgggcggatcacgaggtcaggagatcgagaccatcctggctaacacggtgaaaccccgtctctactaaaaatacaaaaaattagccgggcgaggtggcgggcgcctgtagtcccagctactcgggaggctgaggcaggagaatggcgtgaaccccagggggcggagcctgcagtgagccgagattgcgccactgcactccagcctgggcgacagcgagactccgtctcaaaaaaaaaaaaaaaaaaaaaaagaatttacttaagttgcagggaaaagacgtgaatgcgcttgtgtaacagggtggagcacctccgtctcaaaaggatcttgaggacctcccaccccaaaaagggccagggcgaggatgggaggtgggaccaccctcggatgcacaaggctgggccaggctgacccctagcggcaggacgggcgcccgaacggtgcccggatccaagatggcggggctggaggcaagagcgggcgtagggaggagattacgttccgaggcggagcctgggcttgggggcggggcggggcctgcgcctaggggggcggggcggggcggcgctctaggccgagcgggaggtcggggctgcgggcgctcgctggtggcggacccggaggctgctgcggcgccggggctccgtggcctggattgaatccgatcgggagccatgagcgtggacaaagctgagctatgcgggtctctgctcacctgggtaggtcgtggggcggggctaggggaaggtgagcgcccgctcctcttgcccgggatccctggccctggttcggtcagtctcttggtgctggggctgggaggtgcggggtcgtcgacttgctggaccgttggactctggcccgagcacccgcccccgtcacgtggcaagtctgcgtggaaaggacaggtgaggccccgcccctctgtggttggttcacgtggggcgaggacacaggtgaattggcctggtcacgtggtgcctgtggggcccaggtgactcgcgataccaccctggcctggacgcgcagggtttgttgggcagaggtgaggtgaggccacgccccctccggtctcaggtgagcagaagccagtccctcgcagagctgctgtggcggagcagcgcccgccccaccatgtgaggttcgctgactggaaaagtctgcaaaaggggagcggttcggcgctcccaggccctaactctttccttgtcctttcctttacccctcagttacagacgttccacgttccgtctccctgtgccagccctcaggacctgagcagcggccttgccgtagcctatgtgctgaaccagatgtgagtggagctgaaggggaggatcccaaaagtgtcccccagtctgctcatcccaccttctcgcccccagagacccctcctggttcaacgaggcatggctccagggcatctcggaagatccaggtcccaactggaagctgaaggtgacaagtggactcctgattagaggacagactggtgaagagatgaccagggacgggccagctaggcacatgtcctgggtgatgggcaggaagagggacagatgtctggtgatcaaccatttgttcatccattcatctatggagtactcaccctgtgccaggcctgggcattcagcaaggaataacacagacaaaaacctgccccacacagccatcattctagtgacaagcaacacatacacaaccataaaaattaacttccaggctgggcgcagtggctcatgcctgtaatcccaacactttgagaggctaaagtgggtggatcacctggggccaggagttcaagaccagcctggccaacaagttgaaaccccatctctactaaaaatacaaaaattagctgggtggggtggtgtgcacctgtaatcccagttacttgggaggctgagacatgagaatcacttgaacctgggaggtggaggatgcagtgagctgagattgagccattgcactccagcctgggcaacagagcgagactcttgtctcaagaagaagaaaaaaagaaaaagaaaaagaaaaagaaaaaacttttgatgccagtagttctgtgaagacaacaaaaaagcagggctttgagagagagcaatgagggcataggtggctgattacatcagatgggttaatctccaagtgaaatttgggggaacggtgttccaggcatagggaatagcagatgtaaaggccgtgatttgggaataaacttggtgtgatggaggaatggcagagagggcagaacagagcaagagggcaagatttgtaggagatgaggtcatcaggggcctggcaggccatggtgggggtgtggattctatttttaagtgctgtggaaagtcaaggcagggttttagcagagcaaagatgcaacctggcttgggctttataaagctccccctggctgcatggagagaaataaaatgtaggcagcaaaagtggaagaggagaggcagctggtgcactaatccaggtgagaggtaaagatggatgggtagggctgaaggatggtggggcaggtggtgagaagtgacttggttctggagacatatgaaggaagatggtcaggcaggccgggcacagtggctcatgcctgtaatcccagcaattttagaggctgaggtgggaggattgcttgagctcaggagcttgagaccagcctgggctacatagcaaaacctcctctctacaaataaaaaaaagtagtcgattgtggtggcatatgcctgtagtcccagctactgggaggcagagataggaggattgcttgaccccaggaggtcgaggctgcagtgagccaagattgcaccactgcactccagcctgggtgacagagccagaccctgtcttaaaaagctaaagcaaaaaaaaaaaaaaaaaaaaaaagaaacaaagatggtcaggcagacaaaaggggcagacagccagacaggtcacccctagaggaaggcgcacgcagacagaataggatgagatgagcagggaaggagaagtgaggtggagagaggatgggacctacagattcagagtgggaggcctctgaacttgtccacagttccttgttcctccctaggtcagcaatctgaagatggtcttacggagcctagtagagtactcccaggatgtgagtaactgtaaagggattcagggggttgagttgggagaagggtgggcccatgagccctgacacccccttctccccaggtcctggcgcatcctgtgtcagaagagcatctcccagatgtgagcctcattggagagttctcagacccggcagagctcggcaagctgcttcagctggtgctgggctgtgccatcagttgcgagaaaaagcagggtatggggagcttagggggtccccagggctggcctgaggaaatcctccttcctccccacctcacccctgggtctcagcctcccccaccttgatccccagaccacatccagagaatcatgacgctggaagaatcggttcagcatgtggtgatggaagccatccaagaggtgggtgggggcactcagtgtgcaattggaaaatgtcaggagaggggacatctctagggcagagagaactgggcacaggtcctgccctggtaaggtctggactctgcctggaactcagctggccagacatctctgtctcatgtgtctgccagctcctcccagctctaagtcgcaatctagcaggctcaagggatctggcttccctctgtgttggaggcaggagggcagcctctgggctggggttattgggcagaactggccttgacgggaggatggagaggttctcaggttggatagtagatactttgaaggctggcctcagatatccagttcattacaatgccccttcccactcctcagctcatgaccaaagacactcctgactccctgtcaccagagacgtatggcaactttgacagccaggtaagagatttgggggaaaggtgttccaggcacagggatcagcaaatccaaaggccgggagttggggataagtttgctgtgattaaccttgtgacttaaccttgttaaaggtccagaccccacttacagatgctcagggtagcctaagggggaggggcttgtccttaagcctgtaagccacgcccatcttccagggtgctagccacttcctgtaccaggtctccagtgttctggaatcgctcttccttcagtctccaaccccagccctgttttcttttcttttctttttcttttttttttttttttttgagatggagtctcactctgtcacccaggctggagtgcagtggcacgatctcggctcactgcaacctccgcctcccgggttcaagcgattctcctgcctcagcctcccgagtagccaggactacaggcacacgccaccacacccggctaatttttgtgtttttagtagagaaggggttcgccacgttgggcaggctggtctggaactcctgatctcaggtaacccacccgcctcagcctcccaaagtgctgggattataggcgcgagccactgcacccggcgccagccctcttttcaatcctgagggtttcttggccccctccatttggcctctagagatctcagcctccctccccccgtccttctcctgaatccctgagttcctcttccccctcatctctgcagtcccgcaggtactatttcctaagtgaggaggctgaggagggggacgaattacagcagcgctgtctggatctggagcggcaggtagggccctaggtggggcagggtcacttgagtagcccctctccaagcccaagctcatctttctgccctgcccgcagctgatgctcctgtcagaggagaagcagagcctggcgcaagagaatgcagggctgcgggagcggatgggccggcctgaaggcgagggtaccccaggtctcactgccaagaagctgctgctgctgcaatcccagctggagcagttgcaggaggagaacttcaggtgtggtcagctggggactgggccaggcaagccaggggaccgggggagggcagccccctcatgtgctcttcccccaacacccccaggctggagagtggcagggaggatgagcgcctgcgctgtgccgagctggagagggaggttgcggagctgcagcaccggaaccaggcgctgactagcctggcccaggaggcaca

SEQ ID NO: 5677 - DNA, 104 bp, Homo sapiens
ttttttttttttttttttttgagatggagtctcactctgtcgcccaggctggagtgcagtggcacgatcttggctcactgcagcctctgcctcctgggttcaag

SEQ ID NO: 5678 - DNA, 427 bp, Homo sapiens
tggcagaggggcactgttctccagttgtgggactgagggtccccttctcagccctgatgaagactggatccctgcccagatgtgaacgctggagggggcaggccggggtccagctgtggccacagggaggggttgagtcagccgcttcccagcagtacaacctaggctgggcccagctgttcctggaaaccagtagagggggtgggctccccaatccagctgggggctgctggcccagacctgcacaccagggctctgtgtccctacaaatggcggccttcagaccatcccccaaaacgttgggggctctctttacctaaaacaggggtttggatccttcttccaaaatgtggagggtttttcagcccctcttgctgaattaaaggtgcctggatctccgcacagcggggctccctgtgtttcaaaa

SEQ ID NO: 5679 - DNA, 427 bp, Homo sapiens; identical to SEQ ID NO: 5678

SEQ ID NO: 5680 - DNA, 2749 bp, Homo sapiens
agaagcttgtaggttagcaaaatttcagtttctctagttcagccagtgtcttgtccttagtaattatttgctttccctgcagttcaatttctccttggaactctaacaggactaactggaaaaatactttgaccatagctctagtacttccaaataaattcatatctagattttcaaacaaagccccaagatgaagtctaattctgaaaatatctcacaatttttgaatgttctttttatcttaccgacctaacttctcttttccctcccaacttggcctcccacacgttccatttcattttggccattatagtcacatccgtttgactttggttgtgacatcttcctttcaggatgatggaattagatgcagtctgtctttgagtgagactggtcaccatcagaggagttttttctaagtgacgtgactagaagttgaaatctacttccctgctaaagggcacaggggtggtgtacaaagaaagctaccttcccagagcaagcaggctgcattttagctatggaagtgacctgctgtgacactgtgctctcttctgtgggcttaatggttcctttgctatgaagtggcaaattacatgtagagtgtctccttccttttcagagaacagttaatcaaggcaaatcagcaagcccccaaagtgctgtaatttaacatcatgattaccaccttcgaagctatatattttgcatactttaaaatcacctaacttggactgcttgaattacattggcttttagaaccgaaattgtaactatgtattgtatttcatgggaggtatattttatgagctttttggctttcttttttcccacagcaactgccaatgaaggatgaatcccctttttaaaaagttgttgttgttgttgtttatttgattttgagttaggagggataatagagaagtccatttaaaaattatttttagaagctaaagaaagtaattatgcttcctgtgaattgtcttttactggcatctttgttttcctctttgatgttagtaaatttggtgtaatacgtggggcttccatatttcaaagtggaagctttcttctctgaagtcgatatatggttttgaattactagagctttggtcagtatttccttccctatatgtcacagagggcaccactgagaactgcgtgcataggacctcaaaatacaaaattagcagggcctcacagtcagcttcctcatggctagtttttcccccttatattacaatttttgttttataagtcatttttttcctgatatttccaccacttttcagagtcatctacaaaatttttctttcctcaagaaaagagttccttttgccttattccttatgccttccccactggtattgagggttttgataataaattggtaggaaaaaaaagtacctcctagaaggaagccttccccaccatttccaggtgccaactgctaagcagatatattccaaaaatggtaactgtcatgtgcacactgttggttatttttaataagcctcttcctactagaacattttattttccttgttcaccatacaatcatgtactctttaacagaaattgcttttaaaaaatatctggaactatctttaaaaaaactttattaataatcatgtatttttactgatcacattttgaaatgcctaaaagactttattgttctaattatccagatgtacctttgtaaaatagctcttttatgaattagctgataaggctgtatgtttctggaacaaaatattggtcatctaaaaactttctgttttctggggtctgggaaaatagaaaataagatttcaaatattaaataagcttaaaggaaccaagcatgtgactttttatttgtattctggttgatttgtcttgtccaagttatattagaaaagttgaggagtcgaggagcctgtaattaattttcctgtcagtgactgtcagacatcttcctgcttattagagcatccctagcaacaaggctaaaccttcatgacagtgctggcaggtgggcttgccctagcatgtggggcaggtttgttgtttttttaatagctttattgagatattcacatatcatataattcatccatttaaagtgtataatcagatgggttttggtatattattgatttttaattgtggtgaaatatatatataacaaaatttgctattgtaactatttttaagtataaagttcagtgaggtaggccagcttttatgacgcacctgaagataactttggttttaatcctaccctaaatgaagcatatgcctctatttttcctgtccccagtgctgggcttcttcacataccaacatttctgtgcttttaccaacagcatttttagctcagaaggctcgcttactttgggcatttgctgtattttggttttgaaatacttgtaatttgacttattcttgggataatattttagttttcagtcattcaagggcacatttggctgacggagctaataagcgtaataaaatgcttagtagtttataccatcttttagttaaacattttaaagattaagactattcaaatgtactttgcggaaattaacctgttttgtatgcctggctttgtttacaaacatatatctatatctatatatatagatacagatacagatacatatctggtggaacaaagaaatacctgtaccattcccacttgctctttgatagccacctcctaggaatggagacaataaaactctgtatttgcatgtga

SEQ ID NO: 5681 - DNA, 4190 bp, Homo sapiens
gtggatgggcttcctcccgccctgaggcaagcacctcttctctgtagctgggatcaaccacaattaataggaatcctcaacatactaaatagcaggcacttgaaaatgggtgtgttttcttccattgtcgtcttttctattgagggttgggatttgggtgggagaggaaagcaaattttattttcttgactataaatttgttattcttggtatcatttcatttttataattatacattagacattggcacttgtgtaaaactgtccctgcagattgagcaggaagtaaaaacaaatggaaatgcttcggatagtggcaggggtgggggttgctaaggaaagggtgggatgggagtgggtaaagagtttgggaaggttatctaactgaatcactactgagttgaatcatggctatcattagccacaggtactgctgattataaggccagtaaaattttagtacctggaggtttgactctaatttttgcactgatggtgccaaagggccctgagtcaaaaggatagccaagggtggagtggaaaaagatatggtgaaggcagaactgctcacaccagctccagaagcacgtcctctgacttcactgccgcagctctttccacacggggccgtgattgaccctaaaaattgcagaccagcacatacactggacactgcaggcaaggtgttggtaactgcctgctctaggatgaatagtagcgttagcagcaccctacagagggtaagtttcagaattgtaatttgagaactccttcaattatattgactttctttggttttccttgtgcattaggtatatattttttgaagtatttttgccaactaaaatgaagtctgtaaattctgttaataaacaaggagttcatccgttgctcacatctttcattggtgccctctgaactctgtgggttgctaggatgtaattttaatgcttccctgcagtccaaagatgattttttcaccacaaatggtaagggatgcccacctacttttataaacaccactgcaacttaacaagtttatttatctatgtccagatttctgtttctgtcctaaattgatctgtgtttttaggtggatcaacttggatctttagacctcatctataaattgaaattatatttttagtcataagccaagtacaatctaactcagaatgggattaaaaattttagaagcagaagctaatatataaatgaagtttgggatttggaactttctgtatctcttaggaggaacaagtaaaaaccaaatggttacattgtgctgctagaaataatgtcattctcaattaaaagggttacacctgtagccacttgacactaacaccatcgagggcaattaatcaggagaaaagtaaatataaaaactttgctcttaacgtcacacactacagggtaattatgtaattctctagcactcaattaagaagcttgtaggttagcaaaatttcagtttctctagttcagccagtgtcttgtccttagtaattatttgctttccctgcagttcaatttctccttggaactctaacaggactaactggaaaaatactttgaccatagctctagtacttccaaataaattcatatctagattttcaaacaaagccccaagatgaagtctaattctgaaaatatctcacaatttttgaatgttctttttatcttaccgacctaacttctcttttccctcccaacttggcctcccacacgttccatttcattttggccattatagtcacatccgtttgactttggttgtgacatcttcctttcaggatgatggaattagatgcagtctgtctttgagtgagactggtcaccatcagaggagttttttctaagtgacgtgactagaagttgaaatctacttccctgctaaagggcacaggggtggtgtacaaagaaagctaccttcccagagcaagcaggctgcattttagctatggaagtgacctgctgtgacactgtgctctcttctgtgggcttaatggttcctttgctatgaagtggcaaattacatgtagagtgtctccttccttttcagagaacagttaatcaaggcaaatcagcaagcccccaaagtgctgtaatttaacatcatgattaccaccttcgaagctatatattttgcatactttaaaatcacctaacttggactgcttgaattacattggcttttagaaccgaaattgtaactatgtattgtatttcatgggaggtatattttatgagctttttggctttcttttttcccacagcaactgccaatgaaggatgaatcccctttttaaaaagttgttgttgttgttgtttatttgattttgagttaggagggataatagagaagtccatttaaaaattatttttagaagctaaagaaagtaattatgcttcctgtgaattgtcttttactggcatctttgttttcctctttgatgttagtaaatttggtgtaatacgtggggcttccatatttcaaagtggaagctttcttctctgaagtcgatatatggttttgaattactagagctttggtcagtatttccttccctatatgtcacagagggcaccactgagaactgcgtgcataggacctcaaaatacaaaattagcagggcctcacagtcagcttcctcatggctagtttttcccccttatattacaatttttgttttataagtcatttttttcctgatatttccaccacttttcagagtcatctacaaaatttttctttcctcaagaaaagagttccttttgccttattccttatgccttccccactggtattgagggttttgataataaattggtaggaaaaaaaagtacctcctagaaggaagccttccccaccatttccaggtgccaactgctaagcagatatattccaaaaatggtaactgtcatgtgcacactgttggttatttttaataagcctcttcctactagaacattttattttccttgttcaccatacaatcatgtactctttaacagaaattgcttttaaaaaatatctggaactatctttaaaaaaactttattaataatcatgtatttttactgatcacattttgaaatgcctaaaagactttattgttctaattatccagatgtacctttgtaaaatagctcttttatgaattagctgataaggctgtatgtttctggaacaaaatattggtcatctaaaaactttctgttttctggggtctgggaaaatagaaaataagatttcaaatattaaataagcttaaaggaaccaagcatgtgactttttatttgtattctggttgatttgtcttgtccaagttatattagaaaagttgaggagtcgaggagcctgtaattaattttcctgtcagtgactgtcagacatcttcctgcttattagagcatccctagcaacaaggctaaaccttcatgacagtgctggcaggtgggcttgccctagcatgtggggcaggtttgttgtttttttaatagctttattgagatattcacatatcatataattcatccatttaaagtgtataatcagatgggttttggtatattattgatttttaattgtggtgaaatatatatataacaaaatttgctattgtaactatttttaagtataaagttcagtgaggtaggccagcttttatgacgcacctgaagataactttggttttaatcctaccctaaatgaagcatatgcctctatttttcctgtccccagtgctgggcttcttcacataccaacatttctgtgcttttaccaacagcattttagctcagaaggctcgcttactttgggcatttgctgtattttggttttgaaatacttgtaatttgacttattcttgggataatattttagttttcagtcattcaagggcacatttggctgacggagctaataagcgtaataaaatgcttagtagtttataccatcttttagttaaacattttaaagattaagactattcaaatgtactttgcggaaattaacctgtttgtatgcctggctttgtttacaacatatatctatatctatatatatagatacagatacagatacatatctggtggaacaagaaatacctgtaccattcccacttgctctttgatagccacctcctaggaatggagacaataaaactctgtatttgcatgtga

SEQ ID NO: 5682 - DNA, 4192 bp, Homo sapiens
gtggatgggcttcctcccgccctgaggcaagcacctcttctctgtagctgggatcaaccacaattaataggaatcctcaacatactaaatagcaggcacttgaaaatgggtgtgttttcttccattgtcgtcttttctattgagggttgggatttgggtgggagaggaaagcaaattttattttcttgactataaatttgttattcttggtatcatttcatttttataattatacattagacattggcacttgtgtaaaactgtccctgcagattgagcaggaagtaaaaacaaatggaaatgcttcggatagtggcaggggtgggggttgctaaggaaagggtgggatgggagtgggtaaagagtttgggaaggttatctaactgaatcactactgagttgaatcatggctatcattagccacaggtactgctgattataaggccagtaaaattttagtacctggaggtttgactctaatttttgcactgatggtgccaaagggccctgagtcaaaaggatagccaagggtggagtggaaaaagatatggtgaaggcagaactgctcacaccagctccagaagcacgtcctctgacttcactgccgcagctctttccacacggggccgtgattgaccctaaaaattgcagaccagcacatacactggacactgcaggcaaggtgttggtaactgcctgctctaggatgaatagtagcgttagcagcaccctacagagggtaagtttcagaattgtaatttgagaactccttcaattatattgactttctttggttttccttgtgcattaggtatatattttttgaagtatttttgccaactaaaatgaagtctgtaaattctgttaataaacaaggagttcatccgttgctcacatctttcattggtgccctctgaactctgtgggttgctaggatgtaattttaatgcttccctgcagtccaaagatgattttttcaccacaaatggtaagggatgcccacctacttttataaacaccactgcaacttaacaagtttatttatctatgtccagatttctgtttctgtcctaaattgatctgtgtttttaggtggatcaacttggatctttagacctcatctataaattgaaattatatttttagtcataagccaagtacaatctaactcagaatgggattaaaaattttagaagcagaagctaatatataaatgaagtttgggatttggaactttctgtatctcttaggaggaacaagtaaaaaccaaatggttacattgtgctgctagaaataatgtcattctcaattaaaagggttacacctgtagccacttgacactaacaccatcgagggcaattaatcaggagaaaagtaaatataaaaactttgctcttaacgtcacacactacagggtaattatgtaattctctagcactcaattaagaagcttgtaggttagcaaaatttcagtttctctagttcagccagtgtcttgtccttagtaattatttgctttccctgcagttcaatttctccttggaactctaacaggactaactggaaaaatactttgaccatagctctagtacttccaaataaattcatatctagattttcaaacaaagccccaagatgaagtctaattctgaaaatatctcacaatttttgaatgttctttttatcttaccgacctaacttctcttttccctcccaacttggcctcccacacgttccatttcattttggccattatagtcacatccgtttgactttggttgtgacatcttcctttcaggatgatggaattagatgcagtctgtctttgagtgagactggtcaccatcagaggagttttttctaagtgacgtgactagaagttgaaatctacttccctgctaaagggcacaggggtggtgtacaaagaaagctaccttcccagagcaagcaggctgcattttagctatggaagtgacctgctgtgacactgtgctctcttctgtgggcttaatggttcctttgctatgaagtggcaaattacatgtagagtgtctccttccttttcagagaacagttaatcaaggcaaatcagcaagcccccaaagtgctgtaatttaacatcatgattaccaccttcgaagctatatattttgcatactttaaaatcacctaacttggactgcttgaattacattggcttttagaaccgaaattgtaactatgtattgtatttcatgggaggtatattttatgagctttttggctttcttttttcccacagcaactgccaatgaaggatgaatcccctttttaaaaagttgttgttgttgttgtttatttgattttgagttaggagggataatagagaagtccatttaaaaattatttttagaagctaaagaaagtaattatgcttcctgtgaattgtcttttactggcatctttgttttcctctttgatgttagtaaatttggtgtaatacgtggggcttccatatttcaaagtggaagctttcttctctgaagtcgatatatggttttgaattactagagctttggtcagtatttccttccctatatgtcacagagggcaccactgagaactgcgtgcataggacctcaaaatacaaaattagcagggcctcacagtcagcttcctcatggctagtttttcccccttatattacaatttttgttttataagtcatttttttcctgatatttccaccacttttcagagtcatctacaaaatttttctttcctcaagaaaagagttccttttgccttattccttatgccttccccactggtattgagggttttgataataaattggtaggaaaaaaaagtacctcctagaaggaagccttccccaccatttccaggtgccaactgctaagcagatatattccaaaaatggtaactgtcatgtgcacactgttggttatttttaataagcctcttcctactagaacattttattttccttgttcaccatacaatcatgtactctttaacagaaattgcttttaaaaaatatctggaactatctttaaaaaaactttattaataatcatgtatttttactgatcacattttgaaatgcctaaaagactttattgttctaattatccagatgtacctttgtaaaatagctcttttatgaattagctgataaggctgtatgtttctggaacaaaatattggtcatctaaaaactttctgttttctggggtctgggaaaatagaaaataagatttcaaatattaaataagcttaaaggaaccaagcatgtgactttttatttgtattctggttgatttgtcttgtccaagttatattagaaaagttgaggagtcgaggagcctgtaattaattttcctgtcagtgactgtcagacatcttcctgcttattagagcatccctagcaacaaggctaaaccttcatgacagtgctggcaggtgggcttgccctagcatgtggggcaggtttgttgtttttttaatagctttattgagatattcacatatcatataattcatccatttaaagtgtataatcagatgggttttggtatattattgatttttaattgtggtgaaatatatatataacaaaatttgctattgtaactatttttaagtataaagttcagtgaggtaggccagcttttatgacgcacctgaagataactttggttttaatcctaccctaaatgaagcatatgcctctatttttcctgtccccagtgctgggcttcttcacataccaacatttctgtgcttttaccaacagcattttagctcagaaggctcgcttactttgggcatttgctgtattttggttttgaaatacttgtaatttgacttattcttgggataatattttagttttcagtcattcaagggcacatttggctgacggagctaataagcgtaataaaatgcttagtagtttataccatcttttagttaaacattttaaagattaagactattcaaatgtactttgcggaaattaacctgtttgtatgcctggctttgtttacaaacatatatctatatctatatatatagatacagatacagatacatatctggtggaacaaagaaatacctgtaccattcccacttgctctttgatagccacctcctaggaatggagacaataaaactctgtatttgcatgtga

SEQ ID NO: 5683 - DNA, 279 bp, Homo sapiens
ggggttcaagcgattatcctgcctcccgcatgaaatggggttttgccatgttggccaggcttgtctcgaactcctgacctcaggtgagccactgtgtccggccctgttgtggtatgttgaagtatataaagaaaatccaggttcacacggatacatatttttaaatggagaaatattggaatagccttttcagataattatggatattcttctttgatactgtacaaaatttggcaagtgatagttccttcaaagatagctgcagtgtggaatctgaaa

SEQ ID NO: 5684 - DNA, 972 bp, Homo sapiens
agaaggtggaggaaagttacaccattctttgccaaaggctggctggatcagccctcacagacaagcactcaggtatgtaaaagttgtgagttccagactctagactaatcatcctacactgaatgaaatgacttatcatactttgaagtgaaaaccttctgagattccatttctcttctgtctttaaagaactgcctgtttctaaacatcagatatcaagcggaagctcatgcctgctgactctactcttctctaagaggaactgcagttgtcagttcccataccatcccctcttctctctcttttcaccttttcaaagcagaaggcagagcagtgggaagcctggtaaatcacagattcggtgtgaggcttactggtactgctgtgactccctagtgtggaggatttggccttattggatgttggtgcacttgcctctgctgacagtgtggctggtgtctcccctgactgcagatggatttgtgttccctgcagcagtttatactcatctgcttacatactgattcagaaacaaagattgaaccacgcccacagatgtcatgggtattctttgcaatgttagtatattctttttcttaatatcatttccatgtatctttattcttctcagataaaagttagagccgcatgtcctggaggtgactgcaggttgttggatttggagtatcggccgtgtctcaccacatcctggctccagtgtggatgcagagagagtgtgacagaggatctgcctgtgaaccacctgggattagtcaagtcccaaggtgcccagagtgggactagttcttcacagtgtggcagctgcactaatctgtttgtgagggaatatccattccctcactctactctcctcactatcggaaattcattttgattcagaataaaaaccaaatgtatagagctttgggtgtaggatatgaaattgtacttagatttaagaaaaagagaaaa

SEQ ID NO: 5685 - DNA, 279 bp, Homo sapiens; identical to SEQ ID NO: 5683

SEQ ID NO: 5686 - DNA, 972 bp, Homo sapiens
agaaggtggaggaaagttacaccattctttgccaaaggctggctggatcagccctcacagacaagcactcaggtatgtaaaagttatgagttccagactctagactaatcatcctacactgaatgaaatgacttatcatactttgaagtgaaaaccttctgagattccatttctcttctgtctttaaagaactgcctgtttctaaacatcagatatcaagcggaagctcatgcctgctgactctactcttctctaagaggaactgcagttgtcagttcccataccatcccctcttctctctcttttcaccttttcaaagcagaaggcagagcagtgggaagcctggtaaatcacagattcggtgtgaggcttactggtactgctgtgactccctagtgtggaggatttggccttattggatgttggtgcacttgcctctgctgacagtgtggctggtgtctcccctgactgcagatggatttgtgttccctgcagcagtttatactcatctgcttacatactgattcagaaacaaagattgaaccacgcccacagatgtcatgggtattctttgcaatgttagtatattctttttcttaatatcatttccatgtatctttattcttctcagataaaagttagagccgcatgtcctggaggtgactgcaggttgttggatttggagtatcggccgtgtctcaccacatcctggctccagtgtggatgcagagagagtgtgacagaggatctgcctgtgaaccacctgggattagtcaagtcccaaggtgcccagagtgggactagttcttcacagtgtggcagctgcactaatctgtttgtgagggaatatccattccctcactctactctcctcactatcggaaattcattttgattcagaataaaaaccaaatgtatagagctttgggtgtaggatatgaaattgtacttagatttaagaaaaagagaaaa

SEQ ID NO: 5687 - DNA, 5850 bp, Homo sapiens
ccaccacctcatagcctaggcgcacaaagaagtccagctgctccttccagatggccagggaaccgccgacaccatggatgaaaaagagcaccacgtcggcctgggcgcctttgcagctagtgatgcgcttctcacagtcaatatggatggtcctcttggggcgcctggctcgccgccgccgcccaccactgccactgccgctgccgctgcctgcgctgccgggggccaagcggccatcgctgcccgccggatctgccagctccacctccagggcggccggcggctccccagagccattctgcccgtgtaggaggtcggctcgaggggctcggcccaggttttccaccagcaaccgcccattgcggtacacggtgatccggcgctgacagcggaccaagccggagaggtccccctgggctgcatccgaggatgcggatgatggtggaggtggggcagcggctggggcgggtcctgcatgcttcacccgcagcacgcggccgggcttgacctctacaaaggtgtagccatcgctggactcgacgctctccagtggccccacggcgttggggggcgtgcccagcaggcaacagaagataccgtcggtcaccccggtcagcatggtgtgtcctgtgagtgaggacagcagccagttcaggtgctgtctcaatgagaaccctgcaccgtgcagcaggcactccctgagccttgggagaactgttttagactccagtttggggagcgccagatcaagtgagccacggcactgagatttttttgtttgtgtgtgtgtgtgtgtgtgtgtgtgtgtgtgtttttgagacagtctcgctttgtcatccaggctggagggcagtggccggatttcggcttactgcaacctccccctcctgggttcaagcgattctcttgcctcagcctcctgagtagctgggattataggcaggtgccaccatgtctagctaatttttgtattttttgtagagatggggtttcaccatgttggccaggctggtcttgaactcctgacctcaaattttcctcctgcttcggcctcccaaagtgctgggattataggtgtgagccaccgtgcactgacatgttttgtctgagcagtgcctttgtggtagttaccctcctgggtcaccctagtctatcctcagagagaaagacttggctatggcttaccccacagggtgtccacagggaaggtggtggcgtcttgtgtggggatgttcctggagaaggggacattgtggcaaatgtggaccagccggaagacaccccctccccccagctggagtttataccatttatggcctcctaactcattcattcaggtatacactaactcatccattcaggtatacactaactcattcattcaggtatacactaactcactaactcatccaggtatgcactcactaactcacatatccccagggcctcctaaggcatctaaaatatgcaaatctttggtgagcccccagtgaggctcctggctctgaatttgactcctgaaaggtgaggccctaggagagggggatggggactgagccacagaaagccttgctcagctcccctagaccggggtgagccggggtctgtttcatagagggccaagctgaggcccagacactctgagaggaagctagactctgaacttcctccttggcaccctggattctggggatctgctatacaagtccccagaggtggcgaagaggatgggagaggcagggccctggctgggggcctccaagcctccatcccactccttgggccacccccgcccccgtgtccatggcaaccacaggcggttacataacctaagggggggatacccgagcagtgcacccccattgtcgaggtgtctagggcctggagatgggaccagctgcctgcctgccccctaccccaggttgggcgccgctaaggtaacgcacgcccgagactgagccgcagtggccccagacatactggaggggaagcaggccatgccccccacctcgagtggggccctaatcccggattgtggagggcaacgcacaggcgccaccccagccccgcttccccgcccccggcccccgccttccaggtgttcgtcatccctgcagcggggtcgagcccactggggctccgtggcttcctacgagcccaaacgcggggttggtggacaccactcctccgaagtggaggccccggggcttcgatctctccttttggggcccgttccccgctcacctcatcgagggccgcggggcccgggtcggggcggaggggtcccaggcggagaagccagcgtccgcctgctggcgccgtttacatggtggcgcggggtcaggccgggtgcgtctacgcgggcgggcacctgcccctggcggtcagcgcaggggcatcccgcggccgccgaaacagccggccctttaagttcctcccccgagtaggcggagccacgtgccgacgggcgggcacttcggcctatcgcagctgcggactgacctggcctagttaggagcccaatgagaggcggcaattccgtagtggaggcgggctctgggagcaacggccccgccccttttgggggttcaccgaggttgggggagggatggggcctggctcaaggcggagaagggggttgcagtctagggtctgcgggacgcctgggagtgtgcggccggggccctctctctgcaaatgggtctcccaagcccttgccccccagcccctgcctcccaattgccctgttcctctccaaacgaggcccccatactcttctctctgtattgacctttccattctagaagcagagactccaagatctttttccaatctccggtggggaaactgaggctcataaagggcacaagagcataaatcaagcaaggagcaaagctgggacttgaacccaaggctgtgtgattccaaaccctgggaaccattatttgctaacctcccccctacgccccccccttttcttttggtagggacgaggtctcgctatcttgcccagactggtctcgaactctgggcatcaagcaatcctctcgtctacggcctcccaaagggctgagatcactggcgtgagccatcgtgacgggcttctctaaagctttcaaggaaagtcttggagctgtgggtaattagagagtttgaatttcataatcagccgatttaacccatggctgccatggttctgagaagggctgatagcaagaggcaggcatcccagctctgtggtaccggcggggccatggtaggccctcaggagagctcaggtctcaaatccagcctctgccctttgctgatgtgtgacctcgggcaagttacttcactttcctgagcctccgtttatttctctatgaaattaatcctctcataagtttgctacgcaggtaaagcactcatcatagtgtcgtgcatataacaaatgctccatatattatgggcattattatagtggtgatgttttgctaaacgatgctacaggtaggatgggcttcggaggacgaggggttaaatgctccttgctgcttggccactcacatcccctggaatttgctgccagagctggattccgtccagacacctactcttgcccactaagggcacttctgggagactatacagtttattcatttagcaaacacctctctgcatgaaccccaagctggcacttgtagggatacagccccaggcccctggcccttgaggagcccttgaacttgggggagagtcaagggaaagcagtcgggccagaagaatggacagcggttgagagaagacgactccttttttttttgagaaaggatctcactccgttgcccaggctgcagtgcattggcgctatcattgctcactacagcctggatctcctgggttcagggaatcctcccacctcaccttcaagtacttgagactataggtggttgctaccatgtccccaggctggtctcaaactcctggccccaagggatcctccctcctcagcctcccaaaatgctggaattacaggcatgagccacacctcactcagcccttggagaggaaaggatttttaaagggcggataggggaacaccaggcagagaggagagtgtggctgaaatgtaagatggtgtgtgtagagggttttgcatgcctgatggaagggctgagcaggttttacctggggaaatggggagccaaggatagtgtgtgagtaggggaggggttcagatctgagtatcagaaaatttttcttccttttttttttttttttttttggttctaacaacagaggagaattcttctagggcccaaaatgggggcaagattgccaaagacaagcttgcaatccctgagtttacagattgagaaagcccagagtggcgcagggaccaccccaaggacacgcagcgagcttgaactcaggcctcctcggcttcctgccaagaggcggagacttggctgcagccaggacaagctgccagccagctgtgtgccatctgcccagctcccgctgggggcgggaagaccaaccagccgcttcctgcagctgccaccagctgcgcccggccaccgcggggcaccctctgccggtcaataggagagagaactacagctcagctgccagctgaccgcgggagataatgccttgtgcgcacgcgcttgctcagaaggcgccgttcgccggctacctgttggtgtgtatgcagagcatccctgtgccccgcggatatagactggcgcgcctctgttgcgcaggcgcagaactacaacttcagggttttccccaacggcctcttttttgcacgttaggagaaactacatttcccataatcctttgttccagggctggagcggctctgggctccggaatcgcccgcagccggtactgcgggacccactgcggatatggctgtcttggctggatccctgttgggccccacgagtaggtcggcagcgttgctgggtggcaggtaagtcctcagggggacccttccccaaatcagggaataagggcggcttcggaggctggcgccactcttcactgcccgcgtgacctgccagtgccttgcgcattttgcagccaggctctgtctccgggagccgaggctcagagaggttgagcgccaaggtcacccagcgccccgtctgacctttctcgccgtccctctacccacgcaggtggctccagccccgggcctggctggggttcccagacgcctggggcctccccaccccgcagcaggcccggggcaaggctcgcgggaatgagtatcagccgagcaacatcaaacgcaagaacaagcacggctgggtccggcgcctgagcacgccggccggcgtgcaggtcatccttcgccgaatgctcaagggccgcaagtcgctgagccattgaggatcgcgacgcagtcggcgggaccctcatggaagcatcgccctcgcctcggaccttgcctggcgctatttttgcagggagctggggagcaggaacgcctcggacctgagtgctctccatattgtggggttgaagtctggatgggagcttgccaagtccctttttaggctttttaattaggaagcatttcgaacctgcgcaacagaccaaagaacagtacaaagaacatccgtgtacccagtaccctgactaccgactacctacaacccgtccctgccccatcctgagttcttttgaagctgatctcaggcatcggattatttcttctgtaaatatttcagaatgtatctctccaagatgagagctcattaaaagacaattacaaagcttatcacatccaaaagaattatcaataattttgaaatattattaaacgtgtaataaatgttcaaagttccacttgcctta

SEQ ID NO: 5688 - DNA, 124 bp, Homo sapiens
ctcccgagtagctgggattacaggcatgcgccaccacgcccggctaattttgtatttttagtagagatggggtttctccatgttggtcaggctggtctcgagctcccgacctcaggtgatccgc

SEQ ID NO: 5689 - DNA, 5097 bp, Homo sapiens
gtaattttttttttttttttttttttttttgagacggagtctcgctctgtcgcccaggccggactgcggactgcagtggcgcaatctcggctcactgcaagctccgcttcccgggttcacgccattctcctgcctcagcctcccgagtagctgggactacaggcgcccgccaccgcgcccggctaattttttgtatttttagtagagatggggtttcaccatgttggtcgggctggtctcaaattcctgacctcaagtgatccatccgcctcggcctcccaaagtgctgggattacaggcctgagccactgcgcctggcctggtttgtttttgtttttgagatggagtctcattctgttgcccaggttggagtacagtgatgcaatctcagctcactgcaacctctgcctcctgggttcaactgattctccttcctcagcctcccgagtagctgggagtacaggcatgcaccaccacacctggctaatttttgtattttttagtagacacagggtttcagcatgttgctcaggctggtcgagaactcctgacctcaagtgatccacccaccttggcttcccaaagtgcggggattacaggcatgagccactgggctggcctgttttgtttttgtttttgagacaaggtttcgctgtcgcctaggctggagtggtgcggtggcgtaatcatagctccctgcagccttgacttcctgggctcaagagatcctcccacctcagccttctgaatagctgggactacaggcatgtgccaccatgctcagctaatttttaaaaatttttttataaagacagggtctccttatgttgcccaggctggtcttgaactcctgggctcaagtgatcctctggccttaacctcccaaagtgctgggattataggcgtgagccgtgacacccggcctggtgagggggttcatgtcctccccctacccagaaggcaggtccttggaagccaagattcttcccctggggtccatggacacctgaaggggtgagggatgagtgcggcctctcaaataccgtgaaagtgtgagtttgagtgttgaggatggaacttattttgaagagagaatctggatccagaagtttcaccagactttttattttaattgtttaaaatttttgtagagatgggggtctcactatgttgcccaggctggtcttgaacttctgggctcaagtgatccttccaccttggccttccaaagtgttaagattatagatatgagccactgtgcccggccctcatcagattcttcaagccaccatgacccaaaagcggtaagaattactcatcagcaagtggtaggaaagcaatctgattaaacaaatgcttccggctgcccaggggaggtcactgtttcctactatcccttccctttcaggatgttctgccacctgcctctgggcatgacatatctgtcttccttatacaagatggaaggcctgagaagcccccaaagctgagctcctcattcctacaaaagcaggggtcaacaaactatgtacggcctgtgggctagtcatttgcttttttaaatacagtttacacttttggagatttgaaaaatgtttcctaaataaggtttttttttttttttttgagatggagtcctgctctgttgcccacgctggagcacagtggcgcgatctcggctcactgcaacctccgcctcccgggttcaagtgattctcctgtctcagcctcccgagtagctgggattacaggcatctgccattatgcccggctaatttttgtatttttagtagagacggggtttcaccgtgttagtcaggctggtcttgaactcccgacctcaggtgatctgcccaccttggcctcccaaagtgctgggattagaggcgtgagccaccgtgcctggccaaaaaatgtttcctaaataaagttttatcagaagttccaacagtgactgtatggcctgcaaacctaaaatattcgctatccgatcctttaaggaaatgtttgccagcccctgctgtaatgaggaaaggatacagacaggagtcaggcagacctgattgtgtcagggacttcctgtatgcctttgggcaggttgcttcacctctctgagcttcagcctccacattcctgaagttgtaaatgtgctgacctaatagcactgttatggggtcatgggaactattgtaggtgggtgttttttttgtttttttgtttttttctcgagacagagtcttgctctgtcactcaggctggagtgcaatggtgcgatctcggctcactgcaacccccacctcatgggttcgaatgattatcctgcctcagcctcccaagtagctgggattataggcacctgcaaccatacccagctactttttgtatttttattagagacggggtttcaccattttggccaggctggtcttgaactcctgaccttgtgatccgcctgcctcggcctccaaaagttctgggattacaggtgtgaaccactgtgcccagcaggtgggtgctcatttaattagaggaatcatttctcataagcatcaacttttgagtatgttatataaagaaatataaacaaataagagctgttacctctcagtctagattcctttcttttagatacttatgtaacttctttgttttcttttcttttttttttttttttactttttagttttttgtagagatgagatcttgcttatgttgcccaggttggtcttgaactcctcagctatagcagtcctcccacctcagcttcccaaagtgttgggattataggtgtaagccaccacacctggccacttatttatttttcttttttctttttttttttttttgagatggagtctcactctgtcacccaggctggagtgcagtggcacaatctcggctcactgcaagctccacctcctgggtgcacgccattctcctgcctcagcctcctgagtagctgggactacaggcgcctgccaccatgcctggctaatttttttttgtattttttagtagagacggggtttcaccgtgttagccaggatggtcttgatctcctgacctcctgatccgcccgcctcggcctcccaaattgctgggattacaggtgtgagccaccacgcctggcctttttttcttgtctaattgcataggctagaatctctaaaacagtggtgctcaacttgcctggctgttcaatcttgcctttcttcctggataaaggagagaatgaggccacttggtagtggtcaagccctggggaccaagccttccatggaggggttcttggtaagttttaggttgtattacctgccctttaagcaggagtgaattacagtaacccatgcctttgtaaatgcctagaatttacaggattccgatgagcgcttcctgaatgcacagtgttctccagggcagttgattttttaacttagtctaaggcagtggttctcagctgggggtaattctgcccaccagggcacgcttggcaactactgaagacatttttgactgtcatgatcaacactagattgtgtagttgcatccagtgggcagaagccagggatgctactaaacatcctatagcccctcacagaaaaaaaataacctggccaaacacgatagtgctgggattgaacaacactgcttttttttttttttttttttttttgggcagagtctcactctgttgctcaggctggagtgcagtggtgtgatcttggctcactgcaacctctgcctcccaggttcaagtgattctcctgcctcacacccccgagtagctgggattacaggcacacaccatcatgcctggttaattttttgtacttttagtagagatggggtttcaccatgttggccaaactggtgttgaactcctgacctcaagtgatctgcctgctttggcttcctaaagtgctaggattacaggcgtaagccactgcacctggcctgagcaacactgctttagaacaatgtgaaacaatatcagtgatgacggaaatccctgtctgattacatatgctaatgggagttttcagcctggtatagcggctcatgcctgttaccccaccacatcgggaggccaaggagggaggatggcttgagcccaggagttcaagaccagcctgggcaacataatgagaccccccccccattctctatataatttttttttgaacttgaaaattggcctggtgcgttggctcacgcctgtaatcccagcgctttgggaggccgaggagggcgaatcacgaggtcaggagatcgagaccatcctggctaacacggtgaaaccccgtctgtactaaaaagacaaaaaattagccaggcatggtagcgggtgcctgtagtcccagctactagggaggctgaggcaggagaatggcatgaacctgggaggtggagcttgcagtgagccaggatcacgccactgcactccagcctgggggacagagtgagactccatctcaaaaaaaaaaaaaaaaaaaaaaattaaggctgagcacaatgactcacacctgtagtcctagcactttgggaggctgaggtgcaaggatcacttgagcccagtagttaaagaacatcttgggcaacatagtgagatgccatctctatttaaaagaaaaaaaaattttaaaaatgtaaaaattaaattgaaaaatgggatttttttcaaggagaaaaattaggatttttgtttgctttgttttgttttaggagataaggttttgccatgttgtccaaactcatctccaatgatccatccacaaagtgctgggattacaaatgtgcaccaccgcgcgtggtggccccttttttttttttcatgacggagtctccttctgtcgcccaggctggagtgcagtggcacaatatgatcttggctcactgcaagctccgtctcccgtgctcatgccattctcctgcctcagcctcccgagtagctgggactataggtgcccaccaccacacccagctaattttttgtatttttagtagagacagggtttcaccgtgttagccaggatggtctcaatcttctgacctcgtgatccgcccgcctcagcctcccaaagtgctgggattacaggc

SEQ ID NO: 5690 - DNA, 11799 bp, Homo sapiens
actcggcgggggaggggtcgtgtacattgtcccaccaggcgcaatgtagccgggcggcgcagaggatttcttttttggtcttgagagcatagagtcccttttcatattcacgtgtactcttaagaaagcgtctgttctccaaactggctttccattctccccgtcctaaatggtgcgtggctgacaccgtagtgttttcaaaactggatatggccaggatgctatagcattgtcagtgtaagtcccttttgggtatttttatttaattgtgtagtgacttgacagaagtgtttcccagcttgacctaagtaatgaatttgcataggatttcagcatcagtatggaagtgatcagatgtcagtggctggtgccaccttgcagataaatggccactggtccacgtagttcgtctttactatacattttgattaagttctctaggaccagctgactggtaattataagtcacatgaaaccctgcagagatgagagcttacattgaacacttcttaacaagttttctattctttgtttcatctgttacaattaaactcaccttcgtctagggtaagaccattactttacgcaataacatactagcttaatttacggtatttatatgtatttatatatattgtatatacataatcatacatataattctataacatttagtttgactctaaagttggaaaatcaggaaaataacaggtgatgttgagtactgattgtttgccgggcctgtgccaaatggtgtgcatgctttatgtaacttaatctaaaaaaatttgaatacgtgagtttgatttcagtgtgtccaaatgtgaaacgtgtacattattgttattgttttgttttttttgagacggggttttgctctcgttcaggctggagtgcaatggcactgtcttggctcactgcaacctccgcctcccgggttcaagcgattctccttccttagcctcccaggtagctgggattacaggcgcccgccaccacgcccagctaagttttgtatttttagtagagacggagtttcaccatgttggctaggctggtctcgaactccagacctcaggtgttccgcccgcctcggcctcccaaagtgctgggattacaggcgtgagccaccgcgccgggcaaacgtgtgcattaaatgcttgtttatgcctttgtaaaataagagtgttggcaatataaaatgttacccatagagtaaattaatgtgtttttcaagttggaagatggctttaaaaattcatagaagtacaattagtccctttatttaggtgctgaatagtttccaaagccccgtgtctcttatttatcagagtttctattatataacattgtcacccagtgaacaggctatgctaggacattggaaaaaggtaaatattgagaaagccctaatggtcctttcttaaatggccccctctttccatatttaatttctaagtgacattcctaattaagggtaaacaaacataatgaaacaaggctaattttccaataccaaactaaaaaaataaaaaacagtggactggctattactttgttgatgagtctagcacagttttactgggcatttaaatgttaaggatgttatttacattgtagctagttgtgaaagatttgtgtgtctaagtttttagtttgcctttaaatgtcttgaacatatgcttagtattgagtccagtactttgtgcattaatagtaagttttttgattggatttaattgaacagttttggcttccttaattttattttgaagatagaatttaatgatttgtgtaggcataacagttacaattaacagtgattccgagatgagcgtagggtttaacttaacagttcacattttcttgcgagttgaaaggactggagagttggatgtgtgtcttctttgtgattaaaaaagcatgctggaacttagctatcagaagattctggtggtccatctttgggaagaggaaaagattaagaatgctttgctagtcagtatttacaagagggtttctttacttaaaggcattttctctttggggaggggaggagttgagagttgtcattaatggaaggatcttagaataaaaaagatgtatacatgttttcctttggagtgaatttgtgactggagatggggtttcactgtgttagccaggatggtctcgatctcctgacctcgttatctgccctcctcagcctcccaaagtgctgggattacaggtgtgagccaccgtgtctggcctatgtgctttttaaagatggaactgatttagaatgcagtatattacagtacatgaaaaaattttggaatttctgtatgtttttcactgttggaaagccatagtgagtgtaataacagcattggctcctgttcataaggcatttaaatgatgtgtttcctatgacaggaagacaagcgtttctcattccttcaaaatttggctctcagatggagtgccctttaagctccctgaatgcagggacttcttctgtttcactcattgtcttttttctggggcctagaacagaacctggcaaactgagagtgctatgtaaacctttgtagaatgagcactttccctggggaatcctctctccactttccactagtgaagatcccacctgcttttaggtgcagggccactccagcctgactttctctgcaatctgcagcccacaatgattctttgaacattaactgtgtataccacactctgtgacagtgaatcttttatagctttatattgatacatgagtgtttcatgtattttgtttcctcacccaaaatataagctcttcaaggctacaggatatcctatttttgagaattgccttggtatccagtataatatataatattatataatacctataatatataatgtaatatatgtaatatataatatatataatatacatgtatatatacagagtaggtttatatttacctattaaatgaatgttacataccgtggggaaacatcaaagatactcaaaatggtaggttatattttagttaggcaaacctagtgtacacatgtgaaacagtactagaatttggagctaaataagagttaatacttatgtcgtgcttaaaatgtgaacctcacaacaatcctttgaagtaggtacaattatttcctcatttttcagaggaagaaatggagacacagcaaagtaattaagtttgttgctcaagatcgtaccggaaatcataagtaggcagtctggctccagaggcggtgtggtttctctggggagctttactttatacttcgaagggacatctaagcactacttttgcagctgtaagagatgctcttttaaaaatttcaaagtagcgtaagagattgcagtgtctctaaactgcagaaggaatgctggattttctatatagaggacattgataatggaatggttaaggggacattatatattgaaatgactaaagatggtggagagaaactgaagtttgaatctcaaagctgaggattatgattttttatagatactgaattctagaacagtgattcaccaggacataggacaatgattgcttgttactaatttagtatcaaaaaacttatgccaaataaaataatattgaatgacactggatatcttactgcatttctttttttaaacacttaccagatttgaagccctagtggtagtaatttaccttaatgtgggtattactaaaggtttcctatacacttctgtccatttgctttatctttttgtggaatctttttttttttttttttttttgagacagggtctcactctgtcgcccgggttagagtacagtagtgtgatctcactgcagcctctgcctcaagcaatcctcccacctcagcctccagagtagctgggactacaggcacgcaccactgtgctcagctaatttttaaattttgtgtaaagatgaggtctcactatactgcccaggctggtcttgaactcctgggctcaaacaaccctcctcctgcctcagcctcccaaagtgctgggtacgtcagtgagccattgtgcctggcctttttgtagaatcttttttttttttttagacagactccggctctgttgcccaggccggagtgcagcagcgcgatcttgcctcactgcagcccctgcctcccggattcaagcaattcttctgcctcagcctcccgaatagttgtgattacaggtgcttgccactacgcccagctaatttttctatttttagtagaagacggggtttcaccatgttggccaggctggtctcgaactcctgacctcaggtgatccacccaccttggcctcctaaagtgctgtgattacaggtgtgaaccactgtgcccaacctttttgtagaatcttgattcactttttcaggttgtattgagcaatagagaatgctgttggggtcaggaggtctcttcaaaccaagtaatactcctttggtggaaaaaaatgtaaaattgtgtgattgatttggtgacacacctggaataaagtcagtttgaagctgtttagaattagatgagggcctataaatttcagcaagatgaagaacagtggtatttctctgaaagtcccagtatgtctcccttttgttgggagctgacagtatgattttgggggcatcgggcatcaacagtcactgaatctaaatggctccacagataggggagtgtatacatcaccacaccagctgtccaggaattaggaggaagtgcccttgaatgaagcctgggctgcaagcctggttagcagccagggaggacacacacacgttgcaggtacagtattctgtattacacagattgtttctactgggaaggatatcatatcatttatcttgggggtagcttcagaatttgagtcagtgatgaaatgacttgctgctttcgttatgctcccttaagaagaacatcatatatttcgggatggcctgcataaaagaaacttgtaataatgaatattgacctataccttgtgttctgtttaagtatctgaggaagtaatttggaaaacttgagttaaaatagtctatattgtagtttttatccaatttgcacgttagccctaatcttcatttcagactcttccctgaatgggaaacttttagggaaagagagaatgatacactgattaatttattttcagcctacgaagctaggataatttaatgaaatctctaccagtcccatgttatgaattttagggttggagagctggattctggacgtgatctattctttaactaggaatgtacagcagaatgacccagggtttatcctgaaagtagcagatgtcttcacttaactcctgagacgcaaatttggtagagctgctgccacaggccccggacatcagtattaaaccatccttaagtgattctggtgccttttctccagtaagaagaaccagccctgtattttatatttaagaaaacctgggcaaacaaatgacttgcctagatttggttcagtggtaccaagatttagtcaccagataatacagtttcagaatcctatggctggaagaagtttaccaagtcatcaattcagtagttcatcttacagcggagtgtaaaccatgcttttcaattatttgcggttcttttactgtataccctgtgatgcccttttaagtttttttgaaaatattgtatacttaaaactgaagtgaaacattaaaatttcttattagaattatttttcagtcttagctgaaatacaatattgtatgaaaatttgcactgcattattagtttttttttttaatctagttgattttcaacttttcttttttaaaggcatctccttggaaacaatgccatctttgaatgtgagagataaacctagtttcagcatgtctgcagcagagaccagtacatcaggcttattcccacaggaagcctcctaaagcctgtggcgcggcaaccatttccaggactaaataataatgtgtcagatgcctgtgagtggactgcctggccaaatgactcatgaagatattcacggaagaatagtcaaaaaccaaagaaaaggcatattctagaagcaccttcaattccatcgaggatttttgagcagctgaagaagaaagttctgaaaatatgagtgacaggactccagcacattttttttagttgtttcttacattatctttgttaacccatccgcttttgtgtataatattaagttattttccactactgcaatggctagtaatttacttaggctcagagttttactctgtatggacagagaaataggaggtaacaacagtgggagaacaaataggaacagttcactgggatgttggtccccagaaattggctttcattgaataattcctaaagggtgtcgtgtgctgaattgctttttcatagtgatgtgctgcttcttgttcatactcttatgactttaatttcacctttatctactcccagcctctgtatatgcctacgtttttaaaaataatttttggcactgaagatctgattaccatattttttcagtttaaaaattaaatcctcgcaaatagatctttggtatagttgcattctaccctaggttattttctaggatcaagaatagaacaatttctgttctttccagcattactctttactattcatatgttcttgttcagtgttttgttgttctcatattctaggtggaaatgaagggtaatctctatgttctattttcagttttctaggaaaccagaaaaacatgggtagtagaaatgtatagaaaatgtatgaggtctcttaaccattgtgttaaacttgcattaagcttcttttttagcaatatcgatgtcagtgttacctcttctttcctttttatttattttttttgagacagagtctcattctgtcgcccagactggttggagtgcgatgatgcgatcgcggctaactgcaaccgctgcctcccaggtacaagtaattctcgtgccttgggctcccgagtagctgggatttttagtagagaacaggtttcaccatattggccaggctggtcttgaactcgcaacctcaggtgatccacccacctcagcctccccaaagtgttgggattacaggcatgagccaccatacctggccccttttgttgttttgaggggcaggcagtaagaagcagggatttcttcaaatgctagtaagcacaaagagagggagaagtttttgtaagtaacgaacagggccgggcatggtggcgtgagaggccgaggtgggcagatcacgaggtcaggagttcgagaccagcctgaccaacatagtgaaacccccgtctccactagaaatacaaaaattagccgggcatggtggtgcacgcctgtaatccagctagtcaggaggctgaggcaggagaatcgcttgaacctgggaggtggaggttgcagggagctgagatcacgccactgcactccagcctgggcgacagagtaaactcccgtctcaaaaaaaaaaaaaaaaaaaaaagaacagttgatcattaaggccattaatgtgcatggacagtttgttgcccaggttggagtgtgatgacgacgcaatctcggtaaatataaacctactctgtaacctccacctcctgggctcaagcagttctcgtgcttcagcctcccgagtagctgggatcacaggcatgcgccactaagcccagctaatttttgtatttttagtagagacggggtttcaccatgttggccaggctggtcttgaactcctggcctcaagtgatgcgcctgcctgggcctcccaaagtgctgggattacaggtgtgagccactgcacctggcccaataggcacatttttttaataagtagtttgttgattagaacgaagagcacttgccgtaagtgcatgtcattgttttcagctgttatggctaagtcagttaacctcatcaacaattttttcttctgtaaattgaggacaatttttgcttttatgaatgaagtcttaaccagcaggaagaaatataaacaaaggaacatatttttaatttaatgaagcaaaattccatacatcattttgaaaatagtgtttctttccctgataggcctgttctgcatcattcttttagcttccttctgccctgtttatcacttggtcccacttttatatttttcctcttcggtccagaatttcttatttagtttcttgtattttgcctactccctcccttctccatgattcagcctagtctttccgtcctctgtggacttgggtgtgccttcctctgggccacctcgtcttttgctgctgttagccctcccgcctgcgcacctgccacttcaccctcgcctgtggtccacttacgttccactcagcccggtcagtcctgctttgttcttctccaccgccttggtctcccgtgtgtcttatctagctctggttccttctcgtctccacatttattttgttttcttcctgtgcttgttagtccttgtgcacttggtccttgagctctttttctattaataggtattactagatggatttgttgtctgcctttacatagaacacacatccttactgtgcatttcctgggtagccaggatgaatcaattattattaacttcccttcgaacattgagcttcctctgttttctgtttctaagaattagattagtattctagaagactaatactactttaaagacagtcaaaacagtcatacgctgccatttcagccctttatttaagagtttgtgacatttatcactcccttgaaagattaaagaacacccaaagcaagtttggggtggaggtggggaaggcaggaagagaaaggtaagtgctataaaaggactcattgttaatttctagaaattggactgagatctgaaagcataagccttaacattttttagataaacggtccctgaaaagaataaaaagtatcagtacttccgttaactagctttagtattgggtcatttgtagtttacattctcctttaagttttaagaccttcagtagttaacaaagcagacagagactggccaggcacagtggctcacacctgtaataccagcactttgggaggctgagttgggtggatcacaaggtcaggagattgaaaccatcctggccaacatggtgaaaccccgtctctactaaaaatacaaaaaaaaaaaaaaattagccaggcgtggtggcaggcacctgtagtcccagctactcgggaggctggggcaggagaatttcttgaacccgggaggccgaggttgcagtgagctgagatcgcgccactgcactccagcctgggtgacagcgagactctgtctcaaaaagaaaaaaaaaaaaaaaagcagagacttaatcttgtaaatactcattttatttttgagaggcttaatgtctccttaaatattaacctgtgtcattttgtaattatactgtaatagtgtcagaatgccattaacaaccaacccttttcgtttcttgtgtgggaaagctcataaattgtgtggtcttacccctctggaccctgtagttgtagcattgtgaaaatggagcttttggcaaaactttgtattatgctgttgactcacattgtctcatatttttcctttattcttctatattctatgaatatggtgctgtcctgtcatttaattattataatatatgtgaactgctggaggtagactgatgtgagtgcagtttttcaacttaaaaacccttatatatcacattcatggtgtttaagatataagaacagccctacaaagaggggttgattgtattgaagattctttctgctgagcctgccttaattgtgagggtggttgtttgggtatcttagagctaaaagaatggctaagagtccattaatggtcctgtaatattcaccatccctgagcagttagtaaagaatggccgcaaagccacaattaggctactaacaaggaacttatgtagatgtgctaggtccagcctgtgttctggaactatagagatgaataaggtatggtcctttctctctggaggctcacagttgaatagggaatattaatacgtgaatgatagcagtacagtgtggcagatgctaaaatatatgtgtgtagcagctattacaggagaactgattaatagggagagtctggctgggctcagtgactcacccctgtaatcccagcactttgggaggccgaggcgggcagatcacttgaggtcaggagttcgagaccagcctggccaacatggtaaaacctcatctctactaaaaaatacaaagaaaattagcaaggcgtggtggcgggcatctgtaatcccagctactggggaggctgaagcaggagaatcccttgaacccgggaggtggaggttgcagtgagctgagatcatgccactgcactccagcctgggtgacagagtaagactgtctcaaaaacaaaacccaaaatactaaccatatttatagttagtcacctcaccctttttttagttaaaagaagtttatttagcctgatcagtttaccagatgtcttttttagtgacttttgtgtcttccataaatccattctcaaaatttgcaacagttgagcatatttgaccaaaatgtgccacaggtttctgaagcctgttcaagaagaagcatgtcaacattattggagtaggtcttcgcaatgactacttttgggaagatttgagtaaaatttatggatacagaagttttggagtatgttagaatattactaagtcttgttagtagttgtaatccccacactgggctatatagatgtaataccaacctgagtatagctcctgaagaatatctggtttggagacttggacaaagtgaacttttttgcttttttaaaagttgctgtttaaattaacttcctgcatttctaatgtagaaaaaatatggcacagtgatttgaattttgtttatggtttattatcttcctaaattatcagctctttaaaatatgggtctctggcctgtataccatctgataaattaggttgggtaaatttttcacctgaaaaaattcattcttttgacccaggttgtttggcttggaaaaaaaaaatcacatactcattgcatgattaaacttgtccatcagattgtgattttgtgcgttatgaggattgtagctggggtaattttaaaatgttggtatttggatagaactgccagcccaggattttgataaagatcaaaatatatactgtatctaaagtttcttttttaaaagttatttcacttataatcaaaaggtttaaataagtttagtgtatattttatgattagtattattttgtatcgattcagagagaggaaaactgcattcccatagacagggagacttggtgcattaatatccaaagcttagtttaagctggtgatgattagaaaagtggctttcatttgtgttctctggaagattctcagtagtcctgtgggcatgtgaacaagagcatgtgtaatcttcataatgtatgtcttgttagcagaaatgtctgaggcattgctgagatgtaggatgagctgaggtactggttttgtctttcatggttccctattatgttttttgagaaactgagcttttcctgacagtgtttagtttttcttggctatttactatgctattaatagtaacagtttccattatggagcctcagtaggttcttgacatacattaacccattgctattatgtaattttctaataaaatgatgtgataaaacatattttctgtaatatactcatagaatatgtgattataagtaaataaatagatgttggggtagtcctccaga

SEQ ID NO: 5691 - DNA, 3783 bp, Homo sapiens
  SITE (273): n equals a,t,g, or c
  SITE (522): n equals a,t,g, or c
tgagttggatgaagagaagaaaatccggcttcggttgcaggtgcgtccctttgggttctgctgcccgtgagtcctaggctcagtggggcaggacattgtgagggcttttatttcaaaaataaatgattgtcacctctctgcagatctggatacatttcctgtgaccatcttcttagaatcgtatgggcttactacatatcgtttccccaggaagtcttggggaagggaaacattaggaaatgtgccccaaattgggtttctcatttgggaatnatctttcttttttttttttttgttgagacagagtcactctgcacccaggctggagtgcagtggcaaattctcgggctcactgccacctctgcctcctgggttcaagtgattctcctgcctcagcctcccaagtagctgggactacaggtgcctgccacacacctggctaattttttgttttttaaaaaaacgggtttcactggttagccagaaggctctcatctcctgaccctaaggaaccttcctgcntcagcctcccaaagtgctgggattacaggtgtgagccacggcacccagccgtggaatttatcttaaacatctctgcgaaaagcccctctcccacctccatttccaagaggcctcattatatgtggtcactatggctccaggggccacagctgtccatgttcgggggcatttgctcttgatttctcagtgatggccatttctgtcctgccagggcgttagagctctgtcccctgtagcctctgattcaacactgctgttaccaaatggcagagaatgcgtgggagttctgattgaccgaaggtagactttcagctttcatccagttggcgcccttgtggtgatggggacccatgctgcttaacaaaggataggtagctgcttgccatcattttgggggtgctgacagacacccccttgagccaaccacagctgccttccaacactgccagatggccccgcctgttaggaccgcctgctctaccctctggctaagaaactggaattattgctgcttttgacaaactttgcagcctggcagcctgagaatcaaaatgtgcaccatttcctagtgcctcgtgtctgtgtgcctgttctgtgttgatgtcacttctggcattgctgttgattgtctattcagatgtcatgtcacctttaaaattgtcagattgattgttttctttcagtcgaccgggttgataatctttcagcttctataaaaccagccgattcattatgactttgttccattcttatttttctctttctagatggaagtgaacgacataaagaaagctctacaatcaaaatgaatacttgatcaatgaaatgtcacattattcatcctgagtccgagactcaaattttctgccccagccaaaataatcttgtgccaaaagattaaaggtttgcctcaaaatgtccctgtttgaaagattagcacaaaagtcttgatagcacaacacaaattccatccaagaggagaatcttccccagggtttagtcctggggctggcactcgttgtgacttacacagagcaaaattgtgctaaaggcttttctactctgagatctcaatgcgaaatgaaaactcaggcagtttagtccatagtggtactattttgatgatattttccattaataaaatgtaatttcagattattcgtttacaagctttataattttatgattttttaatcgtgttttgtcacagacttccctagtgtttgtactacacgtagtcagaagcgagtgtccttttcttttgcttcaggctaagagctgcctcgctctttgtccccccattaggattctattacatatgcaattgtaggttcaacctgtccctttccctgccagcaaaccccaccaccctaagagaaattttagcttatatatgacggtatatttacaaaaagagaaagagaaaatctggtatttgcaatgatctgtgccttctttttaccaccctcttgattggagcttttgtgatgcagctaccatgattcaaaaaaattaaaaattaaaaaaaaaaaatctgccacttatccaagtccactagaggccactgtcttcaaagcttctctcaccctagccaaaggtcctaagaggagacagctgtgaagttgggcgtgctctgtggtaccagctgtgacttttctatttctcctagttttaggttgttcatgaaactagaaatgtcatcctgcttgatttttcatcagccaagttaaacccctgctttctgtcctttgcaccttttgcgtgaacagaatatgcattattaaagcaaaaataaataaaagtaaaatgcaaatgaaaacaagggagggaaagttgtattatttcctgcactgggttacccgtgtgtgttatcgtttaaactgtattcacataatgtcatttgccttgctcacttgtaaccccttcctcaggtccaagagaatgggaggagggtcatgttgaagtgtagccactggaactttcttgcatttatggagttgctttttctttcccaaggaaactgatgtttgcctgtccgctttatctttgtagtacatgaacagttcagccttagactatgtaactgttttctcatccttagctgaaaatgaggggcctactgtattgcgagactgttcaggggtaggggtggagggggtggtcccttaatggcccctgaagatgttggatgtgtttctcaaaagctgctttgtctctttcctgagtttaatagtgaaactactaaacattaatagatttgcacagccacaaagaatgagagttgataataccgaagaagtgatgcaaaaacaaaaaatcacattactgatcattgatagtattacaaataaatgtctcttcctttctcttcctcccttcctccccctgccttcctcttaacctatgtgctcatccttgctacttgaggctgttatttccctccgagtatttaaggagcccaaacaccttggtcttcctgggtgggggcataattaagggaagggagtgtataaggaaggaaacctcataccctccattcccatccctggatatattgccttttcagcagcctcgggttcagtgtgcttggggtcaggagtgccaggttcccaagagcagcgtaaaacatccctgtaccccttgacagttataagcatttctgcgttaaacttgaagattccagagattccccacgacctaatgatctaagaatgcagattggattctttgatgttcaaatttctcatttacttatgaaaatccctaattatatagttttatataatgtgtatacagagtaggattgttgatgaaattgagcggttggaacaccctcatggaacactggcaacatggaatgtagagagctgatgtcttccccctcatagaggccattggcttcctttgtataaggagagggagaagtgattctggaaggagaagttggtatgtctagcttcattgcggcccctcgggctacccagcaagaggattctgcatcaaggaactggacgagccgctacccaaactgccaccatctttactctttacaaaatggacccatcgagaatgttgaaaagcttggaagtatcacttttgaaaaaaaaaaaaattattttgcattcagcatggactcgaccaggcatctatggagattatttttttgcttcattttataaagttgtatttagaaaagtcttaagtattgtgctttgtaaagaagatgattaaaatgaaattttgtgagaatagttttgttca

SEQ ID NO: 5692 - DNA, 3791 bp, Homo sapiens
tgagttggatgaagagaagaaaatccggcttcggttgcaggtgcgtccctttgggttctgctgcccgtgagtcctaggctcagtggggcaggacattgtgagggcttttatttcaaaaataaatgattgtcacctctctgcagatctggatacatttcctgtgaccatcttcttagaatcgtatgggcttactacatatcgtttccccaggaagtcttggggaagggaaacattaggaaatgtgccccaaattgggtttctcatttggaatttatctttttttttttttttttctttttgagacggagtctcgctctgtgacccaggctggagtgcactggcgccatcttggctcactgcaacctccgcctcccgggttcaagcgattctcctgcctcagactcccgattagctgggactacaggcatgtgcaccacacctggctaattttttgtatttttagtagagacggggtttcactgtgttagccaggatggtctcgatctcctgacctcaggtgatcctcctgcctcagcctcccaaagtgctgggattacaggtgtgagccacggcacccagcctggaatttatcttaaacatctctgcgaaaagcccctctcccacctccatttccaagaggcctcattatatgtggtcactatggctccaggggccacagctgtccatgttcgggggcatttgctcttgatttctcagtgatggccatttctgtcctgccagggcgttagagctctgtcccctgtagcctctgattcaacactgctgttaccaaatggcagagaatgcgtgggagttctgattgaccgaaggtagactttcagctttcatccagttggcgcccttgtggtgatggggacccatgctgcttaacaaaggataggtagctgcttgccatcattttgggggtgctgacagacacccccttgagccaaccacagctgccttccaacactgccagatggccccgcctgttaggaccgcctgctctaccctctggctaagaaactggaattattgctgcttttgacaaactttgcagcctggcagcctgagaatcaaaatgtgcaccatttcctagtgcctcgtgtctgtgtgcctgttctgtgttgatgtcacttctggcattgctgttgattgtctattcagatgtcatgtcacctttaaaattgtcagattgattgttttctttcagtcgaccgggttgataatctttcagcttctataaaaccagccgattcattatgactttgttccattcttatttttctctttctagatggaagtgaacgacataaagaaagctctacaatcaaaatgaatacttgatcaatgaaatgtcacattattcatcctgagtccgagactcaaattttctgccccagccaaaataatcttgtgccaaaagattaaaggtttgcctcaaaatgtccctgtttgaaagattagcacaaaagtcttgatagcacaacacaaattccatccaagaggagaatcttccccagggtttagtcctggggctggcactcgttgtgacttacacagagcaaaattgtgctaaaggcttttctactctgagatctcaatgcgaaatgaaaactcaggcagtttagtccatagtggtactattttgatgatattttccattaataaaatgtaatttcagattattcgtttacaagctttataattttatgattttttaatcgtgttttgtcacagacttccctagtgtttgtactacacgtagtcagaagcgagtgtccttttcttttgcttcaggctaagagctgcctcgctctttgtccccccattaggattctattacatatgcaattgtaggttcaacctgtccctttccctgccagcaaaccccaccaccctaagagaaattttagcttatatatgacggtatatttacaaaaagagaaagagaaaatctggtatttgcaatgatctgtgccttctttttaccaccctcttgattggagcttttgtgatgcagctaccatgattcaaaaaaattaaaaattaaaaaaaaaaaatctgccacttatccaagtccactagaggccactgtcttcaaagcttctctcaccctagccaaaggtcctaagaggagacagctgtgaagttgggcgtgctctgtggtaccagctgtgacttttctatttctcctagttttaggttgttcatgaaactagaaatgtcatcctgcttgatttttcatcagccaagttaaacccctgctttctgtcctttgcaccttttgcgtgaacagaatatgcattattaaagcaaaaataaataaaagtaaaatgcaaatgaaaacaagggagggaaagttgtattatttcctgcactgggttacccgtgtgtgttatcgtttaaactgtattcacataatgtcatttgccttgctcacttgtaaccccttcctcaggtccaagagaatgggaggagggtcatgttgaagtgtagccactggaactttcttgcatttatggagttgctttttctttcccaaggaaactgatgtttgcctgtccgctttatctttgtagtacatgaacagttcagccttagactatgtaactgttttctcatccttagctgaaaatgaggggcctactgtattgcgagactgttcaggggtaggggtggagggggtggtcccttaatggcccctgaagatgttggatgtgtttctcaaaagctgctttgtctctttcctgagtttaatagtgaaactactaaacattaatagatttgcacagccacaaagaatgagagttgataataccgaagaagtgatgcaaaaacaaaaaatcacattactgatcattgatagtattacaaataaatgtctcttcctttctcttcctcccttcctccccctgccttcctcttaacctatgtgctcatccttgctacttgaggctgttatttccctccgagtatttaaggagcccaaacaccttggtcttcctgggtgggggcataattaagggaagggagtgtataaggaaggaaacctcataccctccattcccatccctggatatattgccttttcagcagcctcgggttcagtgtgcttggggtcaggagtgccaggttcccaagagcagcgtaaaacatccctgtaccccttgacagttataagcatttctgcgttaaacttgaagattccagagattccccacgacctaatgatctaagaatgcagattggattctttgatgttcaaatttctcatttacttatgaaaatccctaattatatagttttatataatgtgtatacagagtaggattgttgatgaaattgagcggttggaacaccctcatggaacactggcaacatggaatgtagagagctgatgtcttccccctcatagaggccattggcttcctttgtataaggagagggagaagtgattctggaaggagaagttggtatgtctagcttcattgcggcccctcgggctacccagcaagaggattctgcatcaaggaactggacgagccgctacccaaactgccaccatctttactctttacaaaatggacccatcgagaatgttgaaaagcttggaagtatcacttttgaaaaaaaaaaaaattattttgcattcagcatggactcgaccaggcatctatggagattatttttttgcttcattttataaagttgtatttagaaaagtcttaagtattgtgctttgtaaagaagatgattaaaatgaaattttgtgagaatagttttgttca

SEQ ID NO: 5693 - DNA, 149 bp, Homo sapiens
ccaccatgcccagctaatttttgtatttttagtagagatggggtttcaccatgttggccaggctggtctcgaactcctgacctcaggtaatccgcccgcctcgacctcccaaagtgctgggattacaggcgtgagccaccgcacccggc

SEQ ID NO: 5694 - DNA, 404 bp, Homo sapiens
taataaaaataaataaataaataaataaaataaaggaaatatatatggagtggtaaaaacatctgcaataaaaattacaagaagagccaggcttagtggttcatgtctgtaatcctagcactttgggaggccaaggcaggaggattgctagagcccaggagttcaagaccagcctgggcaacatagtgagacccccatctctacaaaaataattttaaaaattggcctggcatggtggtgtgcgcttgtagtcctagctactcaggaggctgaggcaggaggatcgcttgagtttgggaggttgaggctgcagtgacccatgatcgtgccactgcacttcagcctgaacaatagagcaagcccttgtctcaaaaagaaaattgtaataagtacatttaaagccc

SEQ ID NO: 5695 - DNA, 384 bp, Homo sapiens
ataaataaaataaaggaaatatatatggagtggtaaaaacatctgcaataaaaattacaagaagagccaggcttagtggttcatgtctgtaatcctagcactttgggaggccaaggcaggaggattgctagagcccaggagttcaagaccagcctgggcaacatagtgagacccccatctctacaaaaataattttaaaaattggcctggcatggtggtgtgcgcttgtagtcctagctactcaggaggctgaggcaggaggatcgcttgagtttgggaggttgaggctgcagtgacccatgatcgtgccactgcacttcagcctgaacaatagagcaagcccttgtctcaaaaagaaaattgtaataagtacatttaaagccc

SEQ ID NO: 5696 - DNA, 23461 bp, Homo sapiens
ttttctctcccaggaagtgctctctggcgtggtggtcatatcgagtaaggattcagtccaacaccagggagtgtctttgaccatggaaggaactgtaaacctccagctcagtgccaaaagtgtgggtgtgtttgaagctttttataattctgttaaggtaagaaagaatgcttagattgcaagtttttagttcaatattgaaatgttgggctgggcgcagtggctcagggccaggcgcagtggctcaggcctgtaatctcagtaatttgggaggccaaggcgggaggatcgcttgagcccaggagtttgagagtagcctgggcaacatagcaagaccccatctctataaataaactttaaaaattagccgggtgtggtggtgcgtgcctgtagtcccagctactcaggaggctgaggcaggaggatcccttgagcccaggaattcaaggctgcagtgagctatgatcacagcactctactccagcctcagcaacagagcaagataccatgtctcttaaaaaaagacatgtttatggtgggtttcacttgctgtgtgcctttattgttatctgttgttattttgcaagggatggtggtagttacacttctgatatttactaatcaacctgcgaaaatggagatactttgtttctaagtatatcctgttattgaaagtctgcttatatttattcctatttgataaataggattaggagaactataaatgtattaatttcagccattaaaaagatcacacctgggtgcagtggctcacgcctgtaatcccagcactttgggaggctgaggcagacagatcacctgaggtcaggagttcgagaccagcctggctaacatggtaaaaccccgtttctactaaaaacacaaaaaattagcggggtgtgatggcgtgtgccccagctacttgggaggctgaggcaggagaatcgcttgaacccaggaggcagaggttgcagtgagctgagatggcgccattgcactctagttgaggcaataagagcaaaactccatctccaaaaaaaaaaaaaaaagatcacagctcttctgagaagttgtgcctgtggcttatgttacatgccttccaaaatcaaaactgtcattttattagctgtgtctatgctactgttgatttgacactaaggtaagatgaaaatagagcaagtaactgttgtttttgtcatttagggtagagttttgtgttccagaatgtaaactctttctctattcttgtagttgccttttcctgaaggacatattaacgctttaagttttgcagggaaaagagtgaagacagagaaaggtgcattcacagtgttcagatttaggggcttcctatgttttctacaactttattttaatccattagtacttaagagattcacttcctaagtcatgggtcttctccgagccactgatgttaaactataaatgcttaaaaagcatgaatacgtgccttgaaggcaggttccaaatgttagtaccctcctgctcctccttggaggcccagctgaggaggtctgtgcaggccacagggctggaggaaaggcctgctctccctgagcggctgcagcaggaaggctccgaggaagctggtgggctgtcaggagcagaggcagcgctgcccagaagagcacggggctcggtgagggggagccgtgggttcacacgtcaaccctgttagccaggcagcctcactgtgctgggtctgcttcttgatcctgaagatcggggtcgttaaaacagttaaatgagatacctggggaggagagagggatgtatcagttcagttcccatgtgtctcaagcacctatgtgtctcatgttgtaaatgaatcattattgtgccagagtcttaaaaagcagagccaagtcactgttcatctccagacccagcgcagagctgccgaagacagcaggatggtggcctccagggggtcggggtgctgtgtccttcagaacgttattagtaattggaaaggacatttccaagtgtgtgctgatggactgaactgatttttgtttacagcctatccagattatcaacagcaccatagaaatggtgaagccggggaaatttcccagcggcaaaacagaaatcccttttgaatttcctctgcacttgaagggtaacaaagttctgtatgagacgtatcatggcgtgtttgtcaacattcaggtgagagcttcctagtcctacgcgactgacttcacaagttttcttctgacaaacggtgtggtctttctctcaacgttagtagacgggcccaagaatttaatactgtgtttattgctgagacctcgcatgtatattcgacgttaatttctcatttccctgataaatgcatttgatgtatggccgttatttctgatgggagcctcaaggcactcgtgctgtaacttcttttccctctgtttcttctgggctcttttcaggccacctcacattgtaagggatgcttttattgtctggtaacagatatgccctaacttctttctggcactagcattaacttgtctgttttatacttacaagtatctctttgtttaacacccaaaggctactactttgacataggctggtgttctttactgaacaaaccttgtcaatgaggggaagtggattatgacttcctgtctacctctgctggttaagggacgtctttgacagtctgctgttgttgtctcaggagcagtggagtccacgcggggtgagatagcctttcctttatgcagcagaaagaaagatacttttgtgatagcagcctcgcagcacttcccttgctggatgagacacaactcttcagtcttatatgcaagagggatgaaagtcaggaatttttttgatttattaagttttggtcaataatttggccttagtagatacattatcctgctgaaaataatagaacctttaaaataaaagccccccaaacccctgtgagtgtttaaagattcatctgtatgggagttttatgaattgcctaagagatctgtccagaggaaacacatgtagtatgatgtacatcttctgtgaagaaaagaagtgtttctagtcctttattgttagcaccaaaggctttggacagccccaaggaagcagcagtgatgactgagtagtacctggattcagaggaagctgcgtacgtagccatgcagataccaattgctggtatgtgggtgggagtcttctgatcagctttctaggttgggactgtttccaccctgaaagaaactgaatgaaaaatgcctttttggcaatactgaagatatcttgaacattgattttggaaattatttttattatctacccagaatcagtatcgacttgctttatccacacggcagttctttaatatggttgatttaaaaatacaagaatatgttcattagaaactggaataagatcacgttttcagtgatcatatttgttaactcctgcgttcatcaagacttaccaaaagaagatgaatttgtttaaagtcaaattggaaaccccatccttttccacatgttgccaagacagatgttcagatatacatagaaaacgtgtgtgctggccaggcacagtggctcacgcttgtcatccctgcactttgggaggccatggcaggaggattgcttgaacccaggagttcaagaccagcctgggcaacaacgcaagatctcatctctacaaaagaaaacaaaacaaaaagcttgtgtgcttctgttgctgcagagctgtgtgtacattggaggctacttaaaatatagtaggagagttaacaggtggtgggttccttagtaaagggaataattgcccctaccctcgtcttttcatcatcagattttaccatttgagggttaacctcagagtactacaatttggaattcagtacctccccaactatctcaccgatttctaacaatgaagagatttcttagcttaacctctgatttccatgactttatcacacttattgtcattcagcacttaatagtattttgccatctttgttcacctaaaaatttagatttttttctaaatcattttaaagttagtttcagagtcttgatacttcatctcaaaatacctcattgcgcatctccaaaaactaaggacgtttgtctctataattacagttaacatttgcacacctatcagaatttgtaaaaattctcaagtattgattaattcttgattcatatcaaaatttgtcgtcttttgagaaaataaatttaagagaaactaagattatgtttttttaaatctgtcatcatccatccatccattcattcattcatgccattatttggcaggtctttttcttacagttttatagtagagcaagtgccgcccagagacggcagtgacttcctgtggtcacacaggccagcctcagcctgcgggtccagaccagcactcctcggcccgcactgtttaccgcacttactctaaaggttaacataggcacatttctttggatagaaacttttgttgctaaaccctaatatcatctttcttaaattatgtgccaagaaatttttcattcataaattgaattgtgttgtaacaatctaaaacggtaaaaatcataaatcagaataaaggatttaaaagatagacgtgctgggtgcagcggcatgcacctgtaaacccagccacttgggaggctgaggtaggagaatcacttgagcccagaagttcaagtccagcctgggcaacatagcaatacctcatctcttaagaaaaaaattttttaattaaaaaaaaaaatatatatatatatatatatatatatatacacacacatatacacacatatatatgtatatgtatcaaatgccagtattatattcctgacttccagaggcttggctttcttgtcattttttagatgaagagcttgacattcttctcagtcatgttgcgttcatgtttgtctttgttactagatacttcatatgatcatcagagtcttccgtagttgccctttgtgcatctacttcttctttttacaataatttaaattgtaggcaagttttattaggtttgttctactcttgctttactcttgtagctgtgctagcaagcgtttatcctatcacataaaacatgtctgctgaaattgtatattcagcactcatttctagagatcctagtcatcccttttcaaagttaaaaattccttttataggaatctactttaaaactatggacagggctgggcaccgtggctcacgcctgtaatcccagcagtttgggaggcggaggtgggcagatcacctaaggtcaggagttcgagaccagcctggccaacatggtgaaaccccgtatctactaaaaatacaaaaattaggccaggcacggtggctcacacctgtaatcccagcactttggaaggccaaggcatgtggatcacctgaggtcaagaccagcctgactaacatggtgaaaccccatctctactaaaatacaaaaattagccgggcatggtggtggatgcctgtaatctcagctactcgggaggctgaggcaggagaattgcttgaacccaggaggcagagtttgcagtgagccgagatcacgccatcgcactccagcctgagcaacaagagtgaaactccatctcaaaaaaaaaaaaattagccagccatggtggcgcggcccctgtaattccagatactcaggaggctgaggcaagagaatcacttgaaaccaggaggtggaggttgcagtgaaccgagatcacgccaccgcacttcagcctgggtgacagagtgagactccgtattaaaaaacaaaaaaagaatatatatattgtatatatattctacataaagatccttgcagacaaggatgattcttttaaacaatgttttactctcccagtagtaccttaaatatatatagtaacttcttatttcatgcggacaggttgttcatacgaatattagcttcttggaagattcagttatgcatagagtccgagttatgaaaattatttttgacataattctgaagtttttcctggacgattaaaacaacaactaactttattaaacgtggattatgtgatttttttttaaagactggcattacaacagtggtcctgctgtagaattacatttttaaatagtctctcagctcacggacagggatttgaagcaacagtctccgttcaaagcctgctttaagctcaataccagctctgcagtggggctccccttgggggaatagagctcaccttgcagtaggcaccatggtagcaaccagctcagaaaactaacctagggacagcagagaaatggaatgcggctctgccacattaaaaaagcaagtgtgcaagtgcgatgctacattgttttccaacccactttttctttgaggtgcaggctacatctgtgtgttggcagatggagagagacctcagatgtctcgagaaataagattagccatgagttgacccttgtggaagttggttgatggatgtgtgggttactgcatattcagtaaactagaagttccctgaggaccaggtgtgaccttgagcttggctctggtgcccagggcagtgctatgcactcagagcaggtgcccagcgaggaagggttgtgacatgctgggtgctgtcccagggttgcagtcctcactgcatggattttctaatcccgcttacaaagtagctgctgttttccagcattgctttgtgccagccctgtgctgagtgcttgtcacacatgatctcattggagtctcgctgcaggtgggtcttaagagccccattctacagaagggaagcagaagctcagacaagttgtgttatctgtctgggctcgcacagtaaggcagacaacaacgggatctggcctggcgtctgctcctgagcgcactgccctttctgtctcgccagcctgctccctgctacaggtgggaccgtgcacctgtttgccagtgggtccaactgcaggccagctgtgcaaacagattgaagaataaccttaaagtggttcatttttaaaacagaaatgcctttattttgaacattaactatcctattatgtattatattatgtatgttaattttctataatgcactgattgtacaacatttccctaaaatatgttgactgacttgtctctttgaatataattccaagatgaaagcaaatcccactaaaatgaacttttttcctccaactctcccctttagtatacactgcgctgtgacatgaagcggtctctgttggccaaggacttgacaaagacctgtgaatttatcgttcactccgctgtaagcttcactcggggactctggtgcttaatgataggaatctcccatggggtctgagagtttaccctatttacaagctcaccatttagcctcttactgtttcacgggtgctggcagaagacacaagacttctgggtcagagacagtcggtggcatgcgcatcacgtgtgcatcattgtcctgggcccagagtcccccagctgaggccgcgggccagagggactccacgtcggcacatcaggcaggacctttcctccccctggctctctggatggtagactggccctttgcatcccagcccctggataaaaaatgccaggcaggctctcatgaagctcggctgtatctgtagattctgaaattatgtaacatggaggtgatcactgttactgctgttttggtaacgtttaaagtatgattcttcaggtgacagctctatagctcagaggccaatagcaacctgacctcctgggttcaatgctcagccccccagctccaccactgagctgagcaggccactgagctctctgccccgcttgcctcgtctgtgaagtgggaccatctgggaggtgtgaagagccctttggagggtcactgtgctgaggtttcaaataagtacttgccaataacactgttctgtttcttagatctgattttaaaattctgaatctgaaaggcacgttggagattaagacatctctcccctcattttacagatgaggaaactgagtttcagcaagatggggaaatttgacagaactgtgttcaggacccaggcttgcgcctcttagttccccgtccttcctgcatcgccaggctgccgttggtttatttttgaaagggaaaagctatttgacctgcagaactcttggccttcacctactgatttcggtttcacctctcgttttagcctcagaaggggaagtttactcccagtcccgtggacttcacgattacacctgaaaccttacagaacgtcaaagaggtaagacgtcctgcacaggcgaatgccgtgggtatcttcccagcagccagaccccacggactagctattgcccgggtggtcttcatttggaaatcacgtcatcagccggcagagatttctgattgtacccaaattactcagtattttccatttgatttcctttttaagctcagtaaagcagcttagaagaggactgcttttgaaaagttcctcagggagggtccatgtctattaatctcaccattttccctcagttttactgcatcatgggcccccaagaccccctgctgcccatgacacggccacgtcccttcatttctcatggttagccggggcctgcgcccggccccctggcctgttgtcatcctccatggatgtttagtttgcagtttcttccccagcattcccatcagacagaggccgggcagcaacgtgcttttcaaagattccgcagtgccctccgtggtggacgcctcacggccagggcaggtacagtgaggacacagacgcctgggcagtgccagcccagctcccccgcctcctgcatcaggacagggctgtctggctgtcagtggcagccgctggtggagcctcagctggtccctcgagctgcacggtgaacttgggcccgtccaaaactctgcctggccccggcctccctgatcttgccctctcatccactgccatgcatttctcctaaacagtggagtcctgtagttcttcctggatgtaacttttcatccttcctctaattctttattctgctgtctggaccacactgactaggatcaagtgaaggacaagctgggaggcctgggccctgggatgtcattggcctcatccctcagaggctggacatgtgtcgtggggagcctttcagacaggtgagggaggaaaggccactcctctgtctgttctgcacgtctcccttctccgggctctgagggcacgcgaccccagtgggccactcagactcccgtctcccacctctgtagcctgtcttcggaagcgctgacctcagcagtaatgtgattcatttctagacaccgtttcttcttcgggatagctgctgcttccatgacggacgcagtggcctttcatctccttttcctgtattgattctgtttctcaggggttggttctgtttgtcgagtgtgtgtgtctttttcttgcttttgttttccttaaatgtgtattgatcctcggttgtcagtttacatttacaaatgaggatctaatgtgtgtggtggtgttgtagaggctgtatccttagcccaggtgagaacctgttctcctggtcctcagcacctgctcatcagaggcgctctgccctgggtgtggcacgtggccggggtgtttgtaggcagcttgtctcctgagtccagaggctcgctgtctgcattgtggctgtgaatgacgtgggacacttgtcctaccttgccccgagtctgcttttccgggtgggagatcccctttgcaggaagctgtggtgccagtctgtggcagcttcccccatctggtgagctcacctgtgatacctgcctactgcccttcgcaggcccccgcccgatggcaggctgaccacacgccctgcgagcacacccgctctcaccgctccccctgccacctggaggacgggtgccccgaactcccgggagccggattgtctgtccactttctgccggacagaaacacttcactggggtggtccccacggggcgttccttgtggcttttctaggtataggtttatttgtaaacacgaagaacttttctttccacagaaccattcaggtttattgttggaaaataagaaaataacacataaagcaaataaaataaaattgcttattcacaaaatgccactggtggttttttgttttgctttttaagtagaaaagagatgtattgtagaaaatcttgtagatttttaagtagaaaagagatttattggaaggatataagacagctttacaggaactactaggctggagctcagactcaaaatagtataggtttattttatttgtatatgttaatatcatgtcagtgggaggagagggaaaatgattgtttagtcagtatcttgagctgaatgttgaaagctatcctttttcatcagtcgcctaaaagaattttaatgtgtactgctactgctttttgtttttctacacaaatagcttctcttagttatttttaaaactctgtcttggccaggcacagtagatcatgcctggaatcccaccactttgggaggccaaggcaggaggatcacttaaggtcaggagttcaagaccagcgtgggcaacatagaacctgtctctacaaaagaaaaatgtaaaaattagctgggtgtggtggcatgcgatcgtagtcccagctactagggaggcttaggcaaaaggattgcctgagcccaggaggtgaggctgcagtgagccatgtactccagcctgggcaacagagcaagaccctgtctctaaaaatgtttataataaaaacaaataaataaaagctccatcttgaatgcagacttcttcagaggtctgtacctttggggactgccaggtccagagtcccgggcttttcaggtccagagcttcactgcctgatcaggtggccaccagccacacatcaccattgaccctggacacatggctggaccaagtagctgagttggatgtgtaaatactgaccagatttcaaagactcaggatgaaaagaagaatgtaaaacatcattcatatttttgatattgattatatgtggaagtgataacacttttgatatattcgttaattttaccttcttttttaatgtggctaccagaaaattccaaattatatatgtggcttccactcgcagcttgcattatgtttctgttggacagtagtatgccaatatctgatcctttcagtaactgggatccagccagaggtaaagattcctagaaaaattgtctctgtctagaccaagcccattcaacccacagcccaccggccaggatggctttgaatgtgacccaacacaaattcataaaccttaaaacatgagattttgtttctgtgatttttttttagctcatcagctatcattagtgttaatatattttatgtgtgacccaagacaattcttcttcttccaacgtggcccagggaagccaaaagagtggacacccctgctctagaccatcatcagtccttcctggccagcgtcaggtgtgcagagtaaaggtttgtaggcttctcatcaagcgtcaaagaaactagttttcttcaaatttccatgaaataaaataaatgtcttgggttttaaaaattgtacaattgggaacatctttgaatgtttttttttttaagagacagcatctcattcttgtcacccagactggagtgcactggtgtaatcattgctcactggagcctcaagcaatcctcctgcctctgcctcccacgtaactgagactacaggtgtgcaccagcctgcccagctaatttttaaaacattttttagagatggggtcttgctgtgttacacaggctgttcttgaactcctggcctcaagtgatcctcctgcctttgcctcccaaagccctgggattacgggcctgagccactgtgcctggccaggacttttctttttaactgtgtgtgtgtcaggttgtcttgaacaccatggcgactccctcagactttttcatgtcttattccttggtaagaaggagctttctagctctgagactaggcaattaggatggttctctgaggcattctctgtacacagagtgtcagtcaggtgccatatgtagagagtcgttgaataattcagccggctaatgtccaagacgtcagtacttcgctcctttcttcccgttttgtgagacggtcccggtggactgtgtaaccactatccaacttcgcttccaggttttatttgcaccaaagtatggagcactttccccccttgcctgcattctgatgtatttgttttcattttgttttagagagctttgcttcccaaatttctccttcgaggacatctcaactcaacaaactgtgtcatcacgcagccactaacgggagagctggtggtggagagctcggaagccgccatcagaagcgtggagctgcagctggtgcgcgtggagacgtgcggtgagggccgtgccaccaggcctggcgcttgcctgtccccctcgactgccaccctcacgttccatggttaagaggatgctggggggctgggcacagtggcgcacccctgtaatcccagctactcaggaggctgaggtgggagggtggtttgaggctgcagtgagctgagatcgcaccattgcactccagcctgggcagcagagcagaccatgaccctgactctaaaaaacgagaggacgtcggggaagcaaaagtaagagcgtggctgtgccttagcagtagccgcgtgtctaaggaaagtgaggggaggggaccctggaggattcttggagcagactggtgggtggtgccggtgcggatgtggaccccgcagcctctgctggccctgaccgcgtgatgtggcctccctcccgcagggtgtgcagaaggctatgcccgcgacgccacggagattcagaacattcagatcgccgacggggatgtgtgcaggggcctctctgtccccatctacatggtcttccctaggctgttcacctgccctacactggagaccaccaacttcaaagtgggtaagtggcactcgcctcccagccctcatgggcccatgggaagggccgctcagcgccagggcctgctgtgggtcacagagctcagaacctgccgcccttcggtccctcagtgccagggcctgccacaggccatacagctcagagcctgctgcccttcggctgctcaacaaaaccttgttaaggagctgctgtgccgcacaggggacacacccacaggcagtcctggtgcttgtgggacttccactgtcacatggggaaacacacagacccacatcagtgtagacatgggcaggtgacgctgagctctgtgtagacatgggcaggtgacgctgagctccgtgtagacatgggcaggtgacgctgagctctgtgtagacatgggcaggtgacgctgagctccgtgaagaaaactcccgtgaacgagcaccacaggagtggggggtggtgtggatactgagaaagtggctctgtgtgaaggtccaggacccgtgaaaaccccagagtgagcgctcagaagcaggaaggccttgagccccgcggcctagatgcctctagtgagtttccatgaacctgtgtgttcatattttaaccatgggatctgaatcaggtcacagacacccttttatattctgcctttttcccttaacattgtatcatgaacatttccatgtttttaactcttcctataaatattgtaatgggacctccatcttaataagaatcatgttaattgggagatcactccacactacgaagaagtagaacagagagacccagtaggaagggaccgagccttctcagtagcaggggactgtgattcagagaggctcggggacctctaggttggaagtcaggagtgagcactgcatccacatcaagagcagcacctctgtgtgttcccctccaattccgtgcgagtgacctcaaatgcacggtcaggcccgagactggaactcactcggactctaagcagcgcctgggtatcatggcggctccagtgcagctgttttcctgctgtaaaggaaagcccccgccagctccctatcttgcctgctgggcatccctctctgtccactccagccacaccctccacccttctggggggcacaacaagaggggtggagaacccattgaagggagtggtggcaggaagtgcccagaggactctaatgtagtgacaataaagtgaggaaggacaggccggccactgctggtggccgactcttcttgtggctgatgtttgggcggaggtggacactcccacacggggatgttgtcctgcagaccccagccacaggtgggcactgactccaaggccccttccacagctgagctgccacagtgtggggctcagcacagggtgccctctgcccacacgatgcccttcccacccctcctcacactggggaaggagatggtgcttgtttgtcgtcaggtgcttcctcttcacacacatcccttttgttaggatcaacaaggctcacccatatcagctgaagagtcggtggagaaggaatcctgtttgctgaaaggtgatggatgaatagtatccaatggagcaacaatgaaattgttgcttctgaagactgtttctcacctggggattggggacatgggcccagacagctatgcgctggttcacagtctgctatttcattaagaaccgtaggaaatgtaaaaataaggcaaaggaatacaaatgaattgaaagggttctagaatatcctttttaggaaagcaaagggacagggaaagtgtagttggtgaagcctgatcactcatgttccaagatgagaggacaaaaattcacttagagaaagttgacagaggtagtcagacatcagcatagtcatctccactgaaagtttggctgaaaggtcagggtggcgctgaggggacagcaatgaaacccacccgcaccgggtgctccttcgccgttagagcttcctgcgactgcagtggtggcggcgtgtggtttcgctgcttggtaacagtgagcacaaacccaccctctcttctcttctcagaatttgaggttaacatcgtggtgctgcttcaccctgaccacctcatcacggagaacttcccgctgaagctctgcaggatatagcccggaggagggaagcatagagaacgggagtggccatctggaaatccagctggttatccaaatcctaaggggagctacagccagcggcatatacttgtttttgtgattattctgtatcagaaatgaaacagaccctcaaattaactttccttcctcatttcttgaggcttctgcttccaacaggcacctctaatcagaccttttctttgaaattcaacaagatttcttaatgctatttgccaagaccatttcacagaaaacattgactgtggctcttgccttatctgttcctttttaggtacagtaaaacaattgtgacagcagtttgagcttgctggagagtggcatcatggggacaaaaggaaacctctgacttgctaatggatgtagccagggactccccatagcaaagggtctgtggccagttgacatccaggatggctgcaagcgcacttgatggtcaggaagtttgcagatactcgccaaggcagagcgcaaagtgctagccactggaaatgcatgacttccctccacccctactctattctgtagttttttggttttgtttctgagacggagtctcagtctgtcacccaggctggagtgatctcagctcactgcaacctccacctcccaggttcaagcgactctcctgcctcagcctcccgagtagttgggattacaggtgactgccaccgtgcccggctaatgtttgtatttttagtagagacggggcttcaccatcttggccaggctggtcttgaactcctgacctcgtgacccacccgccttggcctcccaaagtgctgggattacaggtgtgagccaccacacccagcctctgtagttctttttacaacatttttcattataactttaaattttttaagcaactggaaaagtgttccttgctctcttggggggatttggctggtgccgaagtgtttctgaagtctcaagaactgccataaaatctcacgctgccatttccctgaacagatacatacatagagagagacagttttccaaactgtgtcacgcaggctgagtgcactggcaggatcacagctcacggcagcctcaacctccctggctcaagcgatccctcccctcagcctcctgagtagctgagactacaggtgagtgccaccacactcagctaattttcaaattttttgtagacagggtctccctatgttgcccaggctggtcttgaactcctagactcaagtgatcctcctgtcttggcctcccaaagtgctgagattacaggtgtgagccactgtgcccagcagtttcccagaatatatttaaatgcaaagttacatgaggggaaaacatgtatgtttgctcctgttgttactgggtaggttctgaacagcagaaacccatgtgcagggtgggctggtgaaggcccctctccgcaaggtggtagcaggaaaaggtccttgacttgatgaatttggtctgcctctgagccactggaggaagctgttttgagccagggttttttggcctaaagccagcatttcctcagtctccctttgtggttcgaaggatatggactattgcaatacatttcttccttcaaatcctgccactgttttgttggcccacaactaataggacctcaaaataagccatgctgctttgcacacacactagccttcttttgtacttttcattctggatgggcttggccaaaacaggctcaggccaaagacctcccaagctgtatgtacttccagtatcctgaaacagtgtttggtgacataatgccaagggtaaacaagcctgatttaggcactgctttatccaggggcttcacccatgaaattaataaaacttatctgagtcacttgaaacttggttcccagaaaacacatttctggtttataatctccttttatgctcacctgacattaattatctatccttgatgatgtgtttaaactgagtagcagaaaacagaggccacactttctgggaaattttaaaggaagaaaccatttttaatgagatgaaaatatttaacgaatttaaaaagctaatgacaattttgagaaaaggtttgggatgtatattgctatgtaatttaataaactgattttatggatataaatatgactgctttccttagagaataattattacctgaagcgcatccagacaacgtggctacctttatcatttcattcaaccctgagtggcccaaacaaaggcctcaggccggccacttccttccacttcttggtctgacctctccatgatctgttactaggcaaaactcagatgtttggctaccttgggctgcaactgtcccactcttgcccaggcttgctggagttggggttatccacagtcagaggttcagagttgtcaaattctccaattagagcaagagatgaggaaaggaaagggagacgaaagaaagaggctgtgcctcagaaataataacgccgcatatctacaactatctgatctttgacaaacctgagaaaaacaagcaatggggaaaggattccctatttaataaatggtgctgggaaaactggccaaccatatgtagaaagctgaaactggatcccttccttgcaccttatacaaaaatcagttcaagatggattaaagacttaaacgttagacctaaaaccataacctaggcattaccattcaggacataggcatgggcaaggacttcatgtctaaaacaccaaaaccaatggcaaccaaaggcaaaattgacaaatgggatctaattaaactaaagagcttctgcacagcaaaagaaactaccatcagagtgaacaggcaacctacaaaatgggagaaaattttcgcaacctactcatctgacaaagggctaatatccagaatctacaatgaactcaaacaaatttacaagaaaaaaacaaccccatcaacaagtgggtgaaggatatgaacagacacttctcaaaagaagacatttatgcagccaaaaaacacatgaaaaaatgctcatcatcactggccatcagagaaatgcaaatcaaaaccacaatgagataccatctcacaccagttagaatggcgatcattcaaaagtcaggaaacaacaggtgctggagaggatgtggagaaataagaacacttttacactgttggtaggactgtacactagttcaaccattgtggaagacagtgtggcgattcctcagggatctagaactagaaataccatttgacccagccatcccattactgggtatatacccaaaggactataaatcatgctgctataaagacacacgcacgtgtatgtttattgcggcattattcacaatagcaaagacttggaaccaacccaaatgtccaacaatgacagattggattaagaaaatgtggcacatatacaccatggaatactatgcagccataaaaaacgatgagttcatgtcctttgtagggacatggatgaaattggaaatcatcattctcagtaaactatcgcaagaacaaaaaaccaaacaccgcatattctcactcataggtgggaactgaacaatgagaacacatggacacaggaaggggaacatcacactctggggactgttgtggggtggggggagggggagggatagcattgggagatatacctaatgctagatgacgagttagtgggtgcagcgcaccagcatggcacatgtatacatatgtaactaacctgcacactgtgcacatgtaccctaaaacttaaagtataataataaaaaagaaaaattgcttcaaatgaacaacaaaaaaaaagaggctgtgaacaatgaatctaaaacaatattttcttttgggaaatgcccgttttggcaggaatacattttggctccgctgtgctgtgaattcggaggaaaagtagggagggccggaaagcccagggcttcatgcagagtagacatcaagaacccacctgctctggagtcttggtgggcaaggggaacgaaccttccagtccatttctaccgtcaccataattcctgtgtctgaatctgaatcaccttcttcaaaaactgggggctgaggttgcctccacatgctaacgctgattcagggcggcagcagatgctggtgttctcagttccttcctgcttccgcttcctgttcaggaacagggccgcattttcccatcctcttcggctgtaggcgtggtcacgtgaccaggagggcggggcgcgcctgcctagcatacgctggaggacggcgccctcaccctggcgggaggtggatccccagcgcggtgcagttacatcgcagacatgggctcgtctatacgctgctggacggccggggtctgggctccacagccggggggcaccaccctggagctggtgataggggagggaatcgccgctcgggcgcccgggcctcgcgcggagcctgcgtgcgcgggagttcacggggcaaatcctgcccatcctccgcgctcaggcgtggcttcaaaagcctcgggccgggtggtgcagccccagcataacctggcgccccggtggctgctggagtggttggctcagaatggaaggaaacggtggggtctgcgttactctgtggtgataaaaaagagaagcggcagcttagcgccaagaataaatgatgaccgccggaatccctgccgttaggcgcaggtcttggcatgagagctgcaacagggcggccagctgggcgccagggggcctgggccgcctgtccggtgcgggtccccgaatatcctgggctcttccgggaagtgccgctgcggtgaggccagagcctcccgctacggaggatgcgatgtgatgtgctgtgcgttgctctactcaacggagcgccattcccgtggtttcgccttgctgcagtttcagtagataccggctattgattttggtctgagactcgcagccatgtgaacattagtgttattctgggtcaggccgtcttctaagtgctgtatgttacctcgttatagcgaccctgtgaggagggaactgttagtagcattagcagtctaggaaaagaaatccattttgccaggcgcttgtccatccgtctgcgcacctccccaccgttccatcccaggcgagcagtctgtaacgtggtgcagttttgcctgcgctgcagcccattctttcacctcgcttcatttgggttttactttgccgtgtcattgacaagtttttctatgcatttgttcccatgtatgcatcacaggttattagctgcgtcaccacgtgttgagacgcgcgaagggctctgttacctcttcatggtttgaattgttacgtcaccctggcgttcttgaacaaagaattggacaaaacacacaaagcaaggaaagaaggaagcaacaaaagcagagatttgttgaaaatgaaagtacacccacaaggtgggagcagcccatgaggctgaagggcccggtgacacaattttctgggatttaaataccctgtagaggtttcccattggttacttggtgtacaccttgtgtaaatgaagtagtggaccataatcagtctgattggttgcaggagaggaccaaccagaggctgaagcgaagttataaagctataccctatgcaaacatctgattagttgcagaaagcaaccaatcagaggctgaagttacaaagttatactcccatgcaaatgaagtcttgacctgtgaacagcctcattggctgtgggaggggaccaatcaaaggtacttagagtttatctgccacgtggaaaaaggggggttgcagagggagtagcctctggtccttttgttacttggatgtggaaagttggggttttccttttgatttagttctaggaagtcagcgtgaattgggcttaggtttactgcctccagaccctattctcctgcctcagaatggtctcagttttgatcagctgagtcaaatgaaaatgaagtcctgagactaacgcaatcatttgcagctggatccagtttaggaaggaggcgagtgattaaaggaccagaaagtccgatctaattatattctaggactgatttcttctatgtagagtaaaaatactagggtatgttccagacccattcaaaggactgaaatgtcctttagtgaatgacctcacaataccttctgaggggtgtttattattcccatctcacaggtgagcaggctgaggcacagagaaactgacctgcctaagccacgtagctctgttgattcttggcctgatattcccccaacttactacaaccaacacagaattacagtagaccgccattgccctgccatgggtaagacctcattgatggggacacgatcagttcttcgtgaaccattactgttgaagccaccattcatcatttccagctggttttcaaaaaggtagaataaagttttatgcgaagaaatcagttttcattgtgagagctacccaagctaactcattttgggactccgaataagagtagatattaaaaacacaaagcagaacaactgcccgggaaaatgctctatgaaggtaaggtcttctttcgaatataaacagttctgcaacctaaaggctgtcaaaactagccactttggtagggagaaaaaaaaatcatacatgtgagtctaagaggtggaggtgagaataagcctcctgggtcagcatcttctccactatggccactgaaaattattcatatttgagactatcttaagtggctacagtggtcagagaatatgacattactaagaaacagaagggcacctaatttgtagaatcaaagcggatccagctatactcacacaaaatgcagtcaaattattagagtgtatcactcaaaagatgcagaaaggcagactgaggaattaaaactcagcaaggatctcctgtgctttactgtgcttttctatgaatgtcactggtaagatggaatcccttggatagaccccgctccaggccggcaggattctgactttgtagggcttttcatgtccaaccccagccagtctctttacagtcttgtgtataacatacaaaagacatatgctgtggaggttttaagtacttagaaaagtatgaaaacagaatttgtgcctatgtctgtatattgtcgcattctggggagtgccagcttgatcaggactaagggtcaggataataccaaaagtttatggtttactgtcatctgcatcaactgtcatttccccaaaagatgtttctggttccctttacaaacgtccagctgtggtaggaggctgagcatgaagacttagggacaaagcaactcaaacgaaaagcattatgagaggtagggtttggtcagcaaaggccccataaagcagggtgtggtcacttcctttctcagaggtcactgtcccccacctgggtcaaggactagaccttcaagaactagaccacaacctctgggtcttaagtgaaaggaaggagaccagcttttctgtctacagatgtatagcctctgatggggccacctggggaggctgggccaggagcccagatgtactgccgcatgatacaccaaaaaaggatgcacccaggcttagctgcagaaaggtgagagaaaggagcaaaaaactaaaatcttaaatattcatgtttgttttaaaacaattttcgacaccaatatgtattaagaaaacacaagttcaaagttgaattcaaaatcccctacatggctgggcgcagtggctcatgcctgtaatctcagcactttgggaggccgaggcaggcggatcaattgagtccaagagtttgagaccagcctggccaacatggcgaaaccctgtctctaacttaaaaaaagatagaaaaattagctgggcatggtagtacacacttgtaattccaggtacttgggaggctgaggcatgagaattgcttgaacccaggaggcagaggttgcagtgagctgagatcacgccacagcactccagcttgggtgacagagtgagactctgtctcaaaacaaacaaaaaagcaaaatcccatacataaaaaagatatgcttaagaagtgagtgtacttttaccacgattttcctttatatctggtagcaaatacatgttttttaatccatggaaactgcaaaaatcagttacatgcatagcaacaaaggaaatcacaattggctgggtgcggtggctcacgcctgtaatcccagcactttcggaggccgaggcgggcagatcacgaggtcaggagatcgagaccatcctggctaacacggtgaaactccgtctctactaaaaatacaaaaaattagccgggcgtggtggtgggcgcctgtagtcccagctactcaggaggctaagacaggagaatggcgtgaacccgggaggcggagcttgcagggag

SEQ ID NO: 5697 - DNA, 23461 bp, Homo sapiens; identical to SEQ ID NO: 5696

SEQ ID NO: 5698 - DNA, 455 bp, Homo sapiens
acccaggctggtctcaaactcctaggctcaagcaacctgtccaccttggcctctgaaagtgctgggactgcaggcatgagccaccacgcccagcctgagacgtgttgttctgtgtggattgtggattcagtctttctgttccgcttgatactatttcatcccctcaatttcctcttccactcgagcccctgtaacagattgagaccatccagttctatggtgacaggaagaaactgctctccaatagcgaatgcagttactatccgtaatctattactcagtaattatcttcagataaatgcacagatgatctgttgtgaagtctctcgatgatgtgtgaaccaagggaatggaggcgccgatgcctcctggtgtgagcaggaaccacagggacagggcagtccttctggaaagtggcatgctgctgcctcgtgggtggcaccaataacctccag

SEQ ID NO: 5699 - DNA, 455 bp, Homo sapiens; identical to SEQ ID NO: 5698

SEQ ID NO: 5700 - DNA, 2580 bp, Homo sapiens
cgatccgatccgatcccattccatccgttcctcgtctcctcccgtctgacccgttgcgcggccgtgtgttcgccacaccaggcatccaaagctgaggtcgctcctacggcgctgggcctcgctgttcgctttagagatgtttggcctcttccctcccaaacagcccatcttcaaaaccatggactcttggactggcacctggccacctgtccctctaccaagactccacttccgtctacccacttcttcctcagattcttggtaccccctgggttggagactgctcattttccttccaaattaatcccagaccccctaaaatattgacaaccttgacaaccccccaaccgaggagccagactttgttttggactaacttccatagccctatcatggaggcagtgtacctggtagtgaatgggttgggcctggtgctggacgtgctgaccttggtgttggacctcaacttcctgctggtgtcctccctcctggcttccctggcctggctcctggccttcgtctacaacctgccgcacacggtactgactagtcttctgcacttgggccgcggagtcttgctttcattgctggccttgatcgaagccgtggtccggttcacatgtgggggcttgcaggccttgtgtactctgctgtatagctgctgctctggcctagagagcctaaagctcctggggcacctgcctctcatggggcacttcggagcagggagatactgcaccggggcgtcctcaatgtgctctccagtgtccatgcttttctgccgccaggcctgtgacatctgtgccatttccatgagcctgttggcttatgtgatcaacagcctggtctacatctgcctcatcggcactcagaacctcttttccctggtgctgccctgtggatgcagtgaccgggcctctgtggaggatgacagacgtagtggctgccttcctagcccacatttccagcagtgctgtggccatggccatcctcctttggacaccctgccaactagccctggagctgctggcctcagctgcccgcctcctggccagctttgtgcttgtcaatctcactggcttggtgttgctagcttgtgtgctggcagtgacggtgactgtgttgcatccggacttcaccctgaggctggctacccaggcactcagccagctccatgcccggccatcctaccaccgtcttcgagaggatgtcatgcggctctctcgcctagcactgggctcagaggcctggcgccgagtctggagccgcagtctgcagctggcgagttggccaaaccggggaggggcacctggagctccccagggtgaccctatgagggtattctcagttaggacccggagacaggacactcttcctgaagcggggcgcagatcagaggcagaagaggaggaggccaggaccatcagagtgacacctgtcaggggccgagagaggctcaatgaggaggagcctccaggtgggcaagacccttggaaattgctgaaggagcaagaggagcggaagaagtgtgtcatctgccaggaccagagcaagacagtgttgctcctgccctgccggcatctgtgcctgtgccaggcctgcactgaaatcctgatgcgccaccccgtctaccaccgcaattgcccgctctgccgccggggcatcctgcagaccctcaatgtctacctctgaagcctccttccctgcctgcccacccctccatgctccacgcaggcactcacgctaggacagcattaacacctcatctccgggtcctggtctgaatcccctcctacccctgtggccatcctgccatacatccaggacattgagttggaagactatgatctgggtgggggcaggataacatggcttctctttacccagtgggtcccttcaatgctgagggtggtgagtatgtcactatgcaagggccctgagactatttgctgtgggctctcctccagcctgcccagggcccacccagatgcctctggggttactcctgtctgcttctggtttttctgttggagatctataggtccttttcctgcctccttcacatttcctccccagcttttgcggccacaacacatcagtgtcatttgggtgttttggcaactcaggggccttcggatgatcttaaacctttgtgttcagccagagcccctgtgccctggtaggcgttggggttagtatctctcgggtgccctcagagccacctctgcctgtgatcgtctgatgaggctccctcccaacctgatccaaaagccagtctcaggagtttacccctgggatgggggatgcatctgcacctgactttggggccacgtgccctgtggcaccccagctcactgggagtctcaggagggataaccggatttctgctctttcccctgtcactcccacatcacacagaaaaatggcattcctctctgtctctccctggcatggagagggcagactgtgcacatttcactagggtccaaatacagaagggcccagggcccaggggcttgcagcttcgtgaggggtctctggcccagtttccaatgaataaagttctcttgacagctctga

SEQ ID NO: 5701 - DNA, 2791 bp, Homo sapiens
acacaagatggcggcgcccagcggagtaggggctgcgcttggggtttgctgaagctggctgcctctcccactccccttttgggtgcaaagcgccgctagcgggaagacgggggccgggcggggacaggggcacctgcgtagctggactgagagcctgcgcccagcttacatcgaccccacccggccccggcccgacccgacgcgacccgatccgatccgatcccattccatccgttcctcgtctcctcccgtctgacccgttgcccggccgtggttcgccacaccaggcatccaaagctgaggtcgctcctacggcctgggctcgccttcgctttagagatgtttggcctcttccctcccaaacagcccatcttcaaaacctggactcttggactggcacctggccacctttccctctaccaagactccacttccgtcttacccacttcttcctcagattcttggtaccccctgggttggagactgctcattttccttccaaattaatcccagaccccctaaaatattgacaatcttgacaagcccacaatcgatgagccagactttgtttggactaacttccatagaccctatcatggaggcagatgtacctggtagtgaatgggttgggcctggctgctggacgtgctgaccttggtgttggacctcaacttcctgctggtgtcctgccctcctggcttccctggcctggctcctggccttcgtctacaacctgccgcacacggtactgactagtcttctgcacttgggccgcggagtcttgcttacattgctggccttgatcgaagccgtggtccggttcacatgtgggggcttgcaggccttgtgtactctgctgtatagctgctgctctggcctagagagcgctaaagctcctggggcacctggactctcatggggcactgcggacccggtagatactgtaccggggcgtcctcaatgtggtctccagtggccatgctatgctgcaccaggtctgtgacatctgtgccattgccatgatcctggtggcttatgtgatcaacagcctggtcaagatctgcgtcatcggcagtcataagctctttactcctggtgctggtcctgtgggatgcagtgaccgggcctctgtggaggatgacagacgtagtggctgccttcctagcccacatttccagcagtgctgtggccatggccatcctcctttggacaccctgccaactagccctggagctgctggcctcagctgcccgcctcctggccagctttgtgcttgtcaatctcactggcttggtgttgctagcttgtgtgctggcagtgacggtgactgtgttgcatccggacttcaccctgaggctggctacccaggcactcagccagctccatgcccggccatcctaccaccgtcttcgagaggatgtcatgcggctctctcgcctagcactgggctcagaggcctggcgccgagtctggagccgcagtctgcagctggcgagttggccaaaccggggaggggcacctggagctccccagggtgaccctatgagggtattctcagttaggacccggagacaggacactcttcctgaagcggggcgcagatcagaggcagaagaggaggaggccaggaccatcagagtgacacctgtcaggggccgagagaggctcaatgaggaggagcctccaggtggggcaagacccttggaaattgctgaaggagcaagaggagcggaagaagtgtgtcatctgccaggaccagagcaagacagtgttgctcctgccctgccggcatctgtgcctgtgccaggcctgcactgaaatcctgatgcgccaccccgtctaccaccgcaattgcccgctctgccgccggggcatcctgcagaccctcaatgtctacctctgaagcctccttccctgcctgcccacccctccatgctccacgcaggcactcacgctaggacagcattaacacctcatctccgggtcctggtctgaatcccctcctacccctgtggccatcctgccatacatccaggacattgagttggaagactatgatctgggtgggggcaggataacatggcttctctttacccagtgggtcccttcaatgctgagggtggtgagtatgtcactatgcaagggccctgagactatttgctgtgggctctcctccagcctgcccagggcccacccagatgcctctggggttactcctgtctgcttctggtttttctgttggagatctataggtccttttcctgcctccttcacatttcctccccagcttttgcggccacaacacatcagtgtcatttgggtgttttggcaactcaggggccttcggatgatcttaaacctttgtgttcagccagagcccctgtgccctggtaggcgttggggttagtatctctcgggtgccctcagagccacctctgcctgtgatcgtctgatgaggctccctcccaacctgatccaaaagccagtctcaggagtttacccctgggatgggggatgcatctgcacctgactttggggccacgtgccctgtggcaccccagctcactgggagtctcaggagggataaccggatttctgctctttcccctgtcactcccacatcacacagaaaaatggcattcctctctgtctctccctggcatggagagggcagactgtgcacatttcactagggtccaaatacagaagggcccagggcccaggggcttgcagcttcgtgaggggtctctggcccagtttccaatgaataaagttctcttgacagctctga

SEQ ID NO: 5702 - DNA, 947 bp, Homo sapiens
agtgattgtctgcctggccgctgagtagctaggattactggcacccgccacaaggcccagctaatttttgtatttttagtagagacagggtttgattatgttggacaggctggtctcaaactcctgacttcaagtgatccacccgcctcggcctcccaacgtgatgggactatagacatgagccatcatgcttggccttcttgattcttgaatacggggttttgaggtgaaagcatttcatgaaaacttaagttcatacacaagagcatcatgaatattctaaaagaggtatctgtgctttttttgtgaccacaaaatattacttcttatgaaatgtttacactaggtgaggaaaagttcattaattacctttaaaccgttccttattttttttaagattttaaattgtattttggcttttgcctccagtatcctttctggttgctctggtttgaattaagttcctattatgctgcagcacatatcaaccttccctaagtaaccatttcctggaatgtgaagcatcggtgccattagcagaccatatgcagaaatgtcgtgtacttgcatttcttttttgtgcactctataaggctggttgtgactcagatcagcttaactttttatattatgttatttcactaactgctacagtcaaaatgatcaaatctttgtacaatagaaaattatttaaattttatttttctactgacatttctaattctagtgtaaatgtttatcaataaaaaattactttcaattctgagttggaattatatttctttttggtggctaatgagtttaatcttttgtaataaaattgacttcagttttcattttttaaataacttaatatctagcatgtgtaactttttttatgttctacttcttactaatttatgataaaattcttgttcaaagttgtgattaaaccgtacttaacatgt

SEQ ID NO: 5703 - DNA, 3606 bp, Homo sapiens
ctttggtatactaatgacccttgagaaactatagaagtgcatctgaaactagagttagtggttattgattttttagcttaatgtgtttacctagtggtaactcttcagcccacttttacagtattgggtatcaactcccagaaagtgcctaaagtttaatgttcagatatgtacccactctcccctttacatttttattcaaaagaatttatatctttaaagagatttaaatatcaagagtttttttaaaacttaattttagctatttaaatttttattctactgcctaactttctttttcattaaaaggcctgaaaactgtgactctttgagagggaaagaatcgcagaaattaagtatttaatgtgatcctttccacctaaactgttttgtatggaatacaatcagtgtggtggtagtggtggtggttatctgcaaaatagtttctggtgattaaatctgactttttttttttttttcttttaaatgagacgtagcctcactgtgttgcccaggctggagtgcagtggtgcaatctcagctcactccaacctctgccacccgggttcaagcgattctcctgcctcagtttcctgagtagctgggattacaggcacctgccaccgtgcccggctaatttttgtatttttagtagagataggtttcaccatcttgcccaggctggtcttgaactcctgaccttgtgatccacccgcctcggcctcccaaagtgctgggattacaggcgtgagccaccgcgcctggccataaatctgacatctttaaaggaaagttttcattgtgagattaaggcttaacagcccatgaggtcatatacacatgaacgtatctattccatttaaagcaatacacactctggcttctgattaaaaatagccaggaggagagtctctgaatctactgtgattctggagtctgcccaatttggaaaaaaaaaaaaaagaaaaaagtcaggaggaccaatttgccagggaaactcatagaaaagaattacaaagagatcacaaaaactggacatattcttttgactaattagaccacttatggctgggcgcagtggctcacacctataatcccagcactttgggaggtcgatgtgggaggattgcttgagcccaagagttcaagactggcctgggcaacatagtgagaccttgtctctactacaaaataaaaaaaaattagctgggcgtggcctcagctacccaagaggctaaagtgggaggatcacttgtgcctgggaggttcaggctgctgtgagccgagaccacgccactgaactccagcttaggccacagggcaagaccctgtcttaaaataatattactaattttggtaattaacttatcaaaactatagtgacatatacacgggcagaaacttataagtagagttgtaatgcagccaaatattcttacaaattccctaacaagaagctcaaatctttctcacaggcaaattgtaaaaattctagttttttgtttaaagagctgtgattttcaaaagtatcccttcagtttaagaaatctggggaattggtaacttttcttatgggaaatgattgccatcatctctactgaaggatgcctcttactgaaaaatgtcttttgaaggagttcttgcctaaagcattctttggatgtaatttcatacactaaacatatagaccagtagttagtgggcccctcctcttaaacagtaacttttgaagtactgatacatgattaaaatgttagatatttttcactggagctaagacttaaaattagggcattttgaaaggtgtatttgtttctgtttcttgtttgatatattttggttatctactcttttaaaaaactaaacgtataaaaggtatcttcaaattactgagtgtttcatccatcccagtaggtgaagtattctccagtgaataaatctatatatatatatagattttaaatagcttgagcggtgtagcttgaaatgttttcagggaaagactatttgaatcataaggaatagctttgattttcttttttatgtctcaaatatagaattatttgggggtggtcactcagatggaagaatattggcaattgtgttgaacattttaccttatatagttttgagaatttttgccaaaaactgatttcttagaaatatcctcccccagctgtgctttggttttttggtttttttgttttgagacggagtcttgctctgtcgcccaggctggagtgcagtggcatgatctcggctcactgcaagctctgcctcccgggttcacgccattctcctgcctcagcctcccgagtagctgggactacggacgtccaccaccatgcccagctaattttttgtatttttagtagagacggggtttcaccgtgttagccaggatggtctcaatctcctgacccgcctccacctcccaaagtgctgggattacaggcatgagccaccacacccggcctctgctttgttttttaaaaaaaaagaaatgcaagagagggagggaggcagcctcctgaccataaaagctgatttcttgatttttttttcttttttttttgaaatggagtcttgctctgtctccaaggctggagtgcagtggcatggtctcagctcactgcagcctccgtttcctgggttcaagtgattgtcctgccttggccgctgagtagctaggattactggcacccgccacaaggcccagctaatttttgtatttttagtagagacagggtttgattatgttggacaggctggtctcaaactcctgacttcaagtgatccacccgcctcggcctcccaacgtgatgggactatagacatgagccatcgtgcttggccttcttgattcttgaatacggggttttgaggtgaaagcatttcatgaaaacttaagttcatacacaagagcatcatgaatattctaaaagaggtatctgtgctttttttgtgaccacaaaatattacttcttatgaaatgtttacactaggtgaggaaaagttcattaattacctttaaaccgttccttattttttttaagattttaaattgtattttggcttttgcctccagtatcctttctggttgctctggtttgaattaagttcctattatgctgcagcacatatcaaccttccctaagtaaccatttcctggaatgtgaagcatcggtgccattagcagaccatatgcagaaatgtcgtgtacttgcatttcttttttgtgcactctataaggctggttgtgactcagatcagcttaactttttatattatgttatttcactaactgctacagtcaaaatgatcaaatctttgtacaatagaaaattatttaaattttatttttctactgacatttctaattctagtgtaaatgtttatcaataaaaaattactttcaattctgagttggaattatatttctttttggtggctaatgagtttaatcttttgtaataaaattgacttcagttttcattttttaaataacttaatatctagcatgtgtaactttttttatgttctacttcttactaatttatgataaaattcttgttcaaagttgtgattaaaccgtacttaacatgt

SEQ ID NO: 5704 - DNA, 3607 bp, Homo sapiens
ctttggtatactaatgacccttgagaaactatagaagtgcatctgaaactagagttagtggttattgattttttagcttaatgtgtttacctagtggtaactcttcagcccacttttacagtattgggtatcaactcccagaaagtgcctaaagtttaatgttcagatatgtacccactctcccctttacatttttattcaaaagaattatatctttaaagagatttaaatatcaagagtttttttaaaacttaattttagctatttaaatttttattctactgcctaactttctttttcattaaaaggcctgaaaactgtgactctttgagagggaaagaatcgcagaaattaagtatttaatgtgatcctttccacctaaactgttttgtatggaatacaatcagtgtggtggtagtggtggtggttatctgcaaaatagtttctggtgattaaatctgacttttttttttttttttcttttaaatgagacggagcctcactgtgttgcccaggctggagtgcagtggtgcaatctcagctcactccaacctctgccacccgggttcaagcgattctcctgcctcagtttcctgagtagctgggattacaggcacctgccaccgtgcccggctaatttttgtatttttagtagagataggtttcaccatcttgcccaggctggtcttgaactcctgaccttgtgatccacccgcctcggcctcccaaagtgctgggattacaggcgtgagccaccgcgcctggccataaatctgacatctttaaaggaaagttttcattgtgagattaacggcttaacagcccatgaggtcatatacacatgaacgtatctattccatttaaagcaatacacactctggcttctgattaaaaatagccaggaggagagtctctgaatctactgtgattctggagtctgcccaatttggaaaaaaaaaaaaaagaaaaaagtcaggaggaccaatttgccagggaaactcatagaaaagaattacaaagagatcacaaaaactggacatattcttttgactaattagaccacttatggctgggcgcagtggctcacacctataatcccagcactttgggaggtcgatgtgggaggattgcttgagcccaagagttcaagactggcctgggcaacatagtgagaccttgtctctactacaaaataaaaaaaaattagctgggcgtggcctcagctacccaagaggctaaagtgggaggatcacttgtgcctgggaggttcaggctgctgtgagccgagaccacgccactgaactccagcttaggccacagggcaagaccctgtcttaaaataatattactaattttggtaattaacttatcaaaactatagtgacatatacacgggcagaaacttataagtagagttgtaatgcagccaaatattcttacaaattccctaacaagaagctcaaatctttctcacaggcaaattgtaaaaattctagttttttgtttaaagagctgtgattttcaaaagtatcccttcagtttaagaaatctggggaattggtaacttttcttatgggaaatgattgccatcatctctactgaaggatgcctcttactgaaaaatgtcttttgaaggagttcttgcctaaagcattctttggatgtaatttcatacactaaacatatagaccagtagttagtgggcccctcctcttaaacagtaacttttgaagtactgatacatgattaaaatgttagatatttttcactggagctaagacttaaaattagggcattttgaaaggtgtatttgtttctgtttcttgtttgatatattttggttatctactcttttaaaaaactaaacgtataaaaggtatcttcaaattactgagtgtttcatccatcccagtaggtgaagtattctccagtgaataaatctatatatatatatagattttaaatagcttgagcggtgtagcttgaaatgttttcagggaaagactatttgaatcataaggaatagctttgattttcttttttatgtctcaaatatagaattatttgggggtggtcactcagatggaagaatattggcaattgtgttgaacattttaccttatatagttttgagaatttttgccaaaaactgatttcttagaaatatcctcccccagctgtgctttggttttttggtttttttgttttgagacggagtcttgctctgtcgcccaggctggagtgcagtggcatgatctcggctcactgcaagctctgcctcccgggttcacgccattctcctgcctcagcctcccgagtagctgggactacggacgtccaccaccatgcccagctaattttttgtatttttagtagagacggggtttcaccgtgttagccaggatggtctcaatctcctgacccgcctccacctcccaaagtgctgggattacaggcatgagccaccacacccggcctctgctttgttttttaaaaaaaaagaaatgcaagagagggagggaggcagcctcctgaccataaaagctgatttcttgatttttttttcttttttttttgaaatggagtcttgctctgtctccaaggctggagtgcagtggcatggtctcagctcactgcagcctccgtttcctgggttcaagtgattgtcctgccttggccgctgagtagctaggattactggcacccgccacaaggcccagctaatttttgtatttttagtagagacagggtttgattatgttggacaggctggtctcaaactcctgacttcaagtgatccacccgcctcggcctcccaacgtgatgggactatagacatgagccatcatgcttggccttcttgattcttgaatacggggttttgaggtgaaagcatttcatgaaaacttaagttcatacacaagagcatcatgaatattctaaaagaggtatctgtgctttttttgtgaccacaaaatattacttcttatgaaatgtttacactaggtgaggaaaagttcattaattacctttaaaccgttccttattttttttaagattttaaattgtattttggcttttgcctccagtatcctttctggttgctctggtttgaattaagttcctattatgctgcagcacatatcaaccttccctaagtaaccatttcctggaatgtgaagcatcggtgccattagcagaccatatgcagaaatgtcgtgtacttgcatttcttttttgtgcactctataaggctggttgtgactcagatcagcttaactttttatattatgttatttcactaactgctacagtcaaaatgatcaaatctttgtacaatagaaaattatttaaattttatttttctactgacatttctaattctagtgtaaatgtttatcaataaaaaattactttcaattctgagttggaattatatttctttttggtggctaatgagtttaatcttttgtaataaaattgacttcagttttcattttttaaataacttaatatctagcatgtgtaactttttttatgttctacttcttactaatttatgataaaattcttgttcaaagttgtgattaaaccgtacttaacatgt

SEQ ID NO: 5705 - DNA, 125 bp, Homo sapiens
ctgtaatcccagctacttgggaggctgaggcaggagaatcgcttgaacccaggaagcagaggttgcagtgagccgagatcacgctattgcgctccagcctgggcaacaagagcgaaactccatct

SEQ ID NO: 5706 - DNA, 4971 bp, Homo sapiens
agagatgtggtatggtgtattcctgtgggcactggtgtcttctctcttctttcatgtccctgctggattactggccctcttcaccctcagacatcacaaatatggtaggttcatgtctgtaagcatcctgttgatgggcatcgtgggaccaattactgctggaatcttgacaagtatgttagacattaaaataccagtcaaaaatgtttaatatgactagtcaatttcaggacctattctagaaaacatatctgagtaggatgaaggaaagagtgccttttaactgcaagtccagacagggtctccctatgtcaccaaggccggagtgcagtggttgcaatattggctcactgcagcctccacctcttgggctcaagtaatcctcctccatcagcctcccaagaagcttggactacaggggtgtgccaccatggccccgctaattttttttgtattttttgtagagacagggtttcgtcatgttgcccgggtctcgaactcctgagctcaagcaatctgcccaccttggcctcccaaaatgctgggattacaggcgtgagccactgtgcctggcccagtttttttaatgtattgattttttttttccacccccaaggtcctattacttggctaacctctttgacttcttgagtcagatttcatctcagtggcttcagggaagtcatgttaaactttgtgagatatatctcgtgagagaggccaccagcaagaggaaaatttatctttttggaagctacttctcctctctgatcagctatcacttgagcattggccctgcaagatggttggtgaattacttccactcatgtgggtgtggttgctgtaaagatagaagacaaattttgatgacaagaattctttgccaggtgtagtggctcatgactgtaatcccagcactttgggaggcagaggtgggaggcttgctgaagcctaggaaattgagactagcctcagcaacatagcaagaccccatctctacaaataaaaataaaaaatttagctgagtgtggtggtgtgtacctgtggttccaactacgtgggaggctgaaatgggaggattgctggagccaggaggtccaggctgggctgcagtgagtcgtgatcacaccacagcactccagcctgggccacagagcaagacccgggggaaaaaaaaagaattcttgcttagaaaagtacccgattagtgctctagttatttttttccccttaggactttctgaataagaattggagtaacatgatgttatgaattattttcaggcttgtttttggggcgtttggtttgttatggcttttgcttatgggataagaaacagttacagaaatgagaacaataagtttaaatcatttcaaagctcatgcataaatataaatgtgtattttatataaactgaaaattctaagtaattaaaatgtaaaatcctccattttctcatccctaaataatagccacagtttacatcttggtgtgtattcctttttttaggtatagatgtaaacataaatacatttttataatatagaaatgtaatattcctactgatttgtaactttttttcactgtgaattgaaaccttagcatcaagcagaaatcgccctctatgtctttgacttgaggtgttttttttttttttttgagagaaagtggcctagtttctctgtgttctaactgtatcacctactgctgctttggagaccctctgccccaggatgactggctgctagggcctgtcttagtttgttcctcagtaaaataggggtaatactacccaacctcatacccttgcatgattgagctaatgtgtatatgatgtaatacctgacacatagtaattgtcgaataaatgttgtattcatttctgtctttaaggctctatgaatagtctgttccctttccatttgctgctctcttggatatactttttcctttcttcgcttcattatcccaatcccactttagggcccagttcaagttccttaagcttctttctatccaacccagtctttcttgtgtacctaaattttggaggggcccaatgaaacatgtctttcagatgttagtaacaaaatgtacgcattgccagtggagctgggcattttaaatcactaaatgttcaaggcagccaacctttggttaatattgttctttcttcttgttaaaatatgttaatataccttcacatcacatttgtgaaatgtgccaggcatggtggcttatgcctgtaatcccagcactttgggaagccagcttgggaggattgcttaagtccaagagttcaaaaccagccttggcaacatagtgagaccctgtctctacaaaaaataaataaataaaatagccaggtgtggtggcgtgtgcctgtagtcccagctgctcgggaggatcacttgagcccaggaggttgaggctgcagggagccatgatcatgccaccgcattccagcctaggtgaaagagtgagacactgtctcaaaaaaaaaaaaaattgtaaacgtgattgagacactgtatgttattttgcattattgcaaatctgtttctgtcttgtgtccccagctagattccaagtaccttgagaatagcgatcataccttataaaacacagaagtgttctgcagatgaaaattggagtgaatgaacacactatgacaaaggagaattttgttggagcattttgtggggagggtcatctgggaaatctggatctattcttttctttttaaaatttttattatttatttatttatttttatttgagaacagggtcttgttctgtcacccaggctggagtgcagtggcatagtcacagctcactgcagccttgacctccctagctcaagtgatccccctacctcagccacccaagcaactaggattacaggcacgttcactacacccagctaatttttgtattttttgtaaagacaaggtttggtcatgttacccaggatggtctcaaactcctgggctcaagcgatcctcctgcctcggccttccaaaatgatgggattataggcttgagccactgtacttggccggttctttttttttttgagacaggatcttgttctgttgcccaggcttgagtgcagtgtcgcgatgtgagctcacaacaacctccacctcctgggttcaagcagctctcctgcctcagcctcccgagtagtagggattacaggcacgtgccaccacacttggctgattttttgtatttttagtagagatggggtttcaccatgttgcccaggctggtctcaaactcctgagctcagatgatccacccatctcggcctcccaaagtgctgggattacaggcgtgagccaccgtgcccggccggatctattcttttcaaacgaatgaaatgttaactttcttggtacacttccttggtataatgctgaactcgtatagtaactcaaatgggtatctgcatagatacaggggttttcgttttgtttttccaatttgcaggaaattatagtgactagcgtaataaaaacaatcaatgacttgggagacaaaggaatccctgagtatctctcctctcatgccctgtgaatgaataacaactttatggcttagagtcctcctgtcttcccttttcacccctctagtccctcctccgtccatttcttgaagggaactatgagtgtgatagaaggtggagtggggattccctgtggcctgaaacatttcttgcttagtctaactcaaaagatcctttttcatttgttaccaaaaatgtattaggtccctgttgaaggctaggcatggggtaactggtaggggaatacagatatttttgagttcataatctggtcatgtgggaattgctatctttgtgattttgattatttcttccagattattttattcaataaatctaggagactctgggttttaaggagtcagcatctaaaagtgatcttgcaagccatgcaatgaatactcaaagtgtagagtagtccacagaaagaatagggaaaacctaacatttctgtaagatttaaatttcagtataaaatctggaacattctactcgcagtagtattttaaatgttgtattttcgtgagtttgttaaccttcgttttttgtttttgtttaacattcttgcattttaaatcaggtgcagctattgctggagtttaccgagcagcagggaaggaaatgataccatttgaagccctcacactgggcactggacagacattttgcgtcttggtggtctcctttttacggattttagctactctatagcatacatccttatgctgagatgttgaacttaaactttatggaatcctccaaaagaatacattatggagtgtagtgttttcttagttcttcaaagggaagcaacttggatgaacaggaacatgaaggacaacacatctcagccttttcttcattttgaagctcctagaattgaagacttatgtggactcctattgttctcaaccaaaacaagtcttttggctttcttttttgtagatatttaatttaagcagttttcatgtgtacctttacgcaagccaagtcaacagtgtctctggggtggcatcctttgcactgaaatttacagtattctgtgagatgtcgcatattttgaagaaaccgtggaagatactggtttatttcaaatgagcagagtatgttgtattaaaatcttatctaatcttgattaaaatttggcaaactcttttctttgctacatcttagtgacaataaatgccaaataggttttggttgagtatagttttgaaaacaaatttggtgaaataaagcaggaaaaaaaatttaagtataactcaagtagtggctttggttccactgtttataaataaaaagtagataacaatgaataatgtgacattttctggacaactgtcttgacttctgattaagatattttaagagatgtgaatttgttattttgtatgtttta

SEQ ID NO: 5707 - DNA, 4967 bp, Homo sapiens
agagatgtggtatggtgtattcctgtgggcactggtgtcttctctcttctttcatgtccctgctggattactggccctcttcaccctcagacatcacaaatatggtaggttcatgtctgtaagcatcctgttgatgggcatcgtgggaccaattactgctggaatcttgacaagtatgttagacattaaaataccagtcaaaaatgtttaatatgactagtcaatttcaggacctattctagaaaacatatctgagtaggatgaaggaaagagtgccttttaactgcaagtccagacagggtctccctatgtcaccaaggccggagtgcagtggttgcaatattggctcactgcagcctccacctcttgggctcaagtaatcctcctccatcagcctcccaagaagcttggactacaggggtgtgccaccatgccccgctaattttttttgtattttttgtagagacagggtttcgtcatgttgcccgggtctcgaactcctgagctcaagcaatctgcccaccttggcctcccaaaatgctgggattacaggcgtgagccactgtgcctggcccagtttttttaatgtattgattttttttttccacccccaaggtcctattacttggctaacctctttgacttcttgagtcagatttcatctcagtggcttcagggaagtcatgttaaactttgtgagatatatctcgtgagagaggccaccagcaagaggaaaatttatctttttggaagctacttctcctctctgatcagctatcacttgagcattggccctgcaagatggttggtgaattacttccactcatgtgggtgtggttgctgtaaagatagaagacaaattttgatgacaagaattctttgccaggtgtagtggctcatgactgtaatcccagcactttgggaggcagaggtgggaggcttgctgaagcctaggaaattgagactagcctcagcaacatagcaagaccccatctctacaaataaaaataaaaaatttagctgagtgtggtggtgtgtacctgtggttccaactacgtgggaggctgaaatgggaggattgctggagccaggaggtccaggctgggctgcagtgagtcgtgatcacaccacagcactccagcctgggccacagagcaagacccgggggaaaaaaaaagaattcttgcttagaaaagtacccgattagtgctctagttatttttttccccttaggactttctgaataagaattggagtaacatgatgttatgaattattttcaggcttgtttttggggcgtttggtttgttatggcttttgcttatgggataagaaacagttacagaaatgagaacaataagtttaaatcatttcaaagctcatgcataaatataaatgtgtattttatataaactgaaaattctaagtaattaaaatgtaaaatcctccattttctcatccctaaataatagccacagtttacatcttggtgtgtatttctttttttaggtatagatgtaaacataaatacatttttataatatagaaatgtaatattcctactgatttgtaactttttttcactgtgaattgaaaccttagcatcaagcagaaatcgccctctatgtctttgacttgaggtgttttttttttttttttttgagagaaagtggcctagtttctctgtgttctaactgtatcacctactgctgctttggagaccctctgccccaggatgactggctgctagggcctgtcttagtttgttcctcagtaaaataggggtaatactacccaacctcatacccttgcatgattgagctaatgtgtatatgatgtaatacctgacacatagtaattgtcgaataaatgttgtattcatttctgtctttaaggctctatgaatagtctgttccctttccatttgctgctctcttggatatactttttcctttcttcgcttcattatcccaatcccactttagggcccagttcaagttccttaagcttctttctatccaacccagtctttcttgtgtacctaaattttggaggggcccaatgaaacatgtctttcagatgttagtaacaaaatgtacgcattgccagtggagctgggcattttaaatcactaaatgttcaaggcagccaacctttggttaatattgttctttcttcttgttaaaatatgttaatataccttcacatcacatttgtgaaatgtgccaggcatggtggcttatgcctgtaatcccagcactttgggaagccagcttgggaggattgcttaagtccaagagttcaaaaccagccttggcaacatagtgagaccctgtctctacaaaaaataaataaataaaatagccaggtgtggtggcgtgtgcctgtagtcccagctgctcgggaggatcacttgagcccaggaggttgaggctgcagggagccatgatcatgccaccgcattccagcctaggtgaaagagtgagacactgtctcaaaaaaaaaaaaaattgtaaacgtgattgagacactgtatgttattttgcattattgcaaatctgtttctgtcttgtgtccccagctagattccaagtaccttgagaatagcgatcataccttataaaacacagaagtgttctgcagatgaaaattggagtgaatgaacacactatgacaaaggagaattttgttggagcattttgtggggagggtcatctgggaaatctggatctattcttttctttttaaaatttttattatttatttatttatttttatttgagaacagggtcttgttctgtcacccaggctggagtgcagtggcatagtcacagctcactgcagccttgacctccctagctcaagtgatccccctacctcagccacccaagcaactaggattacaggcacgttcactacacccagctaatttttgtattttttgtaaagacaaggtttggtcatgttacccaggatggtctcaaactcctgggctcaagcgatcctcctgcctcggccttccaaaatgatgggattataggcttgagccactgtacttggccggttctttttttttttgagacaggatcttgttctgttgcccaggcttgagtgcagtgtcgcgatgtgagctcacaacaacctccacctcctgggttcaagcagctctcctgcctcagcctcccgagtagtagggattacaggcacgtgccaccacacttggctgattttttgtatttttagtagagatggggtttcaccatgttgcccaggctggtctcaaactcctgagctcagatgatccacccatctcggcctcccaaagtgctgggattacaggcgtgagccaccgtgcccggccggatctattcttttcaaacgaatgaaatgttaactttcttggtacacttccttggtataatgctgaactcgtatagtaactcaaatgggtatctgcatagatacaggggttttcgttttgtttttccaatttgcaggaaattatagtgactagcgtaataaaaacaatcaatgacttgggagacaaaggaatccctgagtatctctcctctcatgccctgtgaatgaataacaactttatggcttagagtcctcctgtcttcccttttcacccctctagtccctcctccgtccatttcttgaagggaactatgagtgtgatagaaggtggagtggggattccctgtggcctgaaacatttcttgcttagtctaactcaaaagatcctttttcatttgttaccaaaaatgtattaggtccctgttgaaggctaggcatggggtaactggtaggggaatacagatatttttgagttcataatctggtcatgtgggaattgctatctttgtgattttgattatttcttccagattattttattcaataaatctaggagactctgggttttaaggagtcagcatctaaaagtgatcttgcaagccatgcaatgaatactcaaagtgtagagtagtccacagaaagaatagggaaaacctaacatttctgtaagatttaaatttcagtataaaatctggaacattctactcgcagtagtattttaaatgttgtattttcgtgagtttgttaaccttcgttttttgtttttgtttaacattcttgcattttaaatcaggtgcagctattgctggagtttaccgagcagcagggaaggaaatgataccatttgaagccctcacactgggcactggacagacattttgcgtcttggtggtctcctttttacggattttagctactctatagcatacatccttatgctgagatgttgaacttaaactttatggaatcctccaaaagaatacattatggagtgtagtgttttcttagttcttcaaagggaagcaacttggatgaacaggaacatgaaggacaacacatctcagccttttcttcattttgaagctcctagaattgaagacttatgtggactcctattgttctcaaccaaaacaagtcttttggctttcttttttgtagattttgatttaagcagttttcatgtgtacctttacccaagccaagtcaacagtgtctctggggtggcatcctttgcactgaaatttacagtattctgtgagatgtcgcatattttgaagaaaccgtggaagatactggtttatttcaaatgagcagagtatgttgtattaaaatcttatctaatcttgattaaaatttggcaaactcttttctttgctacatcttagtgacaataaatgccaaataggttttggttgagtatagttttgaaaacaaatttggtgaaataaagcaggaaaaaaaatttaagtataactcaagtagtggctttggttccactgttataaataaaaagtagataacaatgaataatgtgacattttctggacaactgtcttgacttctgattaagatattttaagagatgtgaatttgttattttgatgttt

SEQ ID NO: 5708 - DNA, 2154 bp, Homo sapiens
catgcctatcactgtccccgaaggccttccagtgggatgaaatgtggagatggaaggcagtgacactgatgatcctgaccctgtctaggtccaggctaatgtgtgcgtttgtgtcttggtttttaacaaagaagtttaaaaggtaaaaagaaagttaaaaaatttaaagtagaaaacagcttacagaataaaaatatacagaaaatatttttgtacagcagtacaatgtgcttgtgttttaaactgttattacaaaagggtcaaaaagctgtaaaaaaattttttaagttcatgaagtaaataatttacagtaagctaggtttaatttattattgaaagaaaaaagcgtatgaataaatttagtgtagcttaagcataccgtgtttatttttatttttcataatgtctgctcagtaacaagtgtacagtgtttataaagtctacagtagtgtacactcatatcctagggcttcacattcattcaccactcattcactcactcacccagagcaacttccaggcccacaagctccattcatgctaagttccctagataggtctatcattttttatcttttataacatatttttactttaccttttctatatttacatatgtttagatacaaaaatatttaccattgtgttccaattgcctgcagtatttagtacagtaacatactgtgtaggtttgtagcctgtagcctaggagcaacaagctataccatatagcctaggtgtgtagtaggctatgccatctacatttgtgttaagtacactctatgatgttcacatgacaaggaaatttcctactgacaatgtatttctactgttaagtgatacataactatatgtatattagtttgtattgttcagtaatggagagattgtgttagactctaggggccagggatcaagtaactgtactagggtccccaacacttaggtgccatggcaataaataaatgaagagctaaccaaatgcctgcattctggacagctctgtttaaaaggtatttcatggagtttttcatttaatcaatagaaatccaatcactaggccaggcatggtacctcacgcctgtaatcccagcactttgggaggtggaagcgggtggatcatttgaggtcaggagtttgagaccagcctggtcaacatggtaaaaccccacctctactaaaatacaaaaattagccgggtgtggtagcacatgcctgtaatcccaggtacttgggagcctgaggcaggagaatcgcttgaacccaggaggcggaggttacggtgagtggagatcgcaccactgcactccagcctgggcgacaagagcgaaactctgtctcaaaaaaaataaaaataaaaaaagaaaaaaaaaaagaaatccaatcaataaaagcagagaatagtttccattcagtaagtggtaaacaacaactaatgcatttggcactttctctttcacagcttctatctaaagccaatctcatgaggcaccaactttcataccaggcactatcacttctctgcttcctatatctccctcctctcccagagacagaatgtttcagaaagtagatttgctgcctaagattcatgtcattgaagctgcagtagaagagtcatttaatatatgaaatataaggcaagacttttcaaaaaaaattctctctcagaaaatacaagtcactttatattcaaatacttacaaagtacctcttgctgtaggaagttttgcaatttccttattttgaatacaaagtaccagctggggatgacacaataccctaaaacaacctcagttaaggctgctttggctaatggtaatcagtgaaacaagataaattaaacacaaatttagtaattatccctggagatataaactcacacttccatgtgtaaactgccattgtaaggccagctttttattttgtttattcattttttactttttttagagatggagtctcaccctgttgcccaggctgtctcgaatttgtgggctcaagctatccacccacttggccttccaaagtgccaggattacaggcatcagtcaccatgcctggccagtagaccaacgttttaaagatcattttagctgggcgcggtggctcatgcctgtactttgggagtccaaggtgggcggatagctcgag

SEQ ID NO: 5709 - DNA, 702 bp, Homo sapiens
ctttttttttttttttttgagacagagttttgctcttgtcatgcaggctggagtgcaatagcatgatctcagctcactgcaacctccacctctcaggttcaagcgattctcctgcctcagcctcctgagtagctgggactacaggtgcctgccaccaggcctggctaatttttgtatttttagtagagatagggtttgaccaagttggccaggctggtctcaacctcaggagattcgcgtgcctcagcctcccaaagtgcagagattacagatatgagccattgcacccagccccaggctaggtgtttctgtgtacagaatgttttcaagtttgctggtcaggctttatacatacatacatacatacatacgtacatatacatacatacacttatatgcacacatgtatatatataaaatatatacatatataatatacacatatatctttaaaatatataatataaactaagtatgtatcaacttataaactatacacacatatatgatataaactaatatagtaatgtgccacataaggatgttttggtcaagaacgtaccccatattccacggcagtcccgttaagactatgatggagctgaaaaatccctacagcctagtaacacagctttcatgatgttgtagcacaaagcattactcacatgcctgtggtgatgctggtgtaaataaacctactgc

SEQ ID NO: 5710 - DNA, 11864 bp, Homo sapiens
aggacgtgagcctgcacttcgtgctctggggctgcctgcacgtgtaccagcgcatgatcgacaaggcggaggacgtgtgcctgttcgtagcgcagcccggggaactggtggggcagctggcggtgctcactggcgaacctctcatcttcacactgcgagcccaacgcgactgcaccttcctgcggatctccaagtccgacttctatgagtatgacagcccgaagttggagtgtgggtggcactcggaggaccccaacccgtgggagtggccagaaccccatccctcaacctcactcctggaagagcagaagggagcccccagatctggcctcccagcgccggtgtaggacggttttgaggccttcctctttcatcccaagtctgttcctgcaggatcatgcgcgcacagcccagtgtggtgctgagtgcggcgcacacggtggcagccaggatgtcgcccttcgtgcgccagatggacttcgccatcgactggactgcagtggaggcgggacgcgcgctgtacaggtgcagctcccaccgcgctgctcaggcccggcctaggggtggggacctgggggtggtcagaccttgctgacctccacgcccactcaggcagggcgaccgctccgactgcacttacatcgtgctcaatgggcggctgcgtagcgtgatccagcgaggcagtggcaagaaggagctggtgggcgagtacggccgcggcgacctcatcggcgtggtgagcgcgacccccacccactgacctctggccttttccaggccagtccctcgacaacgcacacacatcatcccgggtaatccagggagtggtgaatgcagctcccgacctctgaggtcacccagtccactccccgcccagacctcatttcgttggaaaaggggattccgcctgtcgtggatccctgtcctctccctctccccagagctctaatgggtagcgagcgaggcttgcttccctacacccccattgcaggggagccctagatggggcagtacagccccctttccacccatcttcggcctcctcattccccacccaagcagccccaatcatgcacgcggccccccaggtggaggcactgacccggcagccgcgagccacgacggtgcacgcggtgcgcgacacggagctggccaagcttcccgagggcaccttgggtcacatcaaacgccggtacccgcaggtgcggcctgttgtgggcggggcagagaggcggaggcgggactccgggggggtgggggccgggcctagtgtgtgggcggggcttacagaggggcggggtcgagggaggggccgaagcgagagagtgagggcgggggctctcgggggtgggacccaggtaacgggcacccaggagccccggcataggagggagaggtgggacctggacagccgcttcccaggtctcactgaaatgccggcctccaacgcccccaggtcgtgacccgccttatccacctactgagccagaaaattctagggaatttgcagcagctgcaaggacccttcccaggtgagagccggccggcccagagcatgctgggagatgtagtccggcgtccagagcatgctgggagggaagccttctttcctgagggatgctgggaaatggagttccgcgaagaaatcgtgcccctgagggtttcaaaccctaagtaggaccgaggtgcagagcattctggggaatggagttcgtgttcctgagcatactgggaaacgaagtcctcgacccctggcgtgctagttaatgggctcgaaagtaaatcagtggtgctggggagggagtcttaggcggtggacttggcgtagtctgcccgggagtcagggcttgctggggaagtccacggcctggacgttgagagaaagggagtcctagatcagaatatgatggcagggccgtcatggtggctcatgcctgtaatctcagcactttgggaggctgaggcaggaggatcgcttgagcccaggagattgagtttgaaaccagcctgggcaacatagtaggacccccgtctctacaaaaatttcaaacattagctgggcttggtgacacatgcctgtagtctcagccactcaggaggctgaggcgggaggattgattgcttgagcccggaggtcgaggctgcagtgagccgtgatcgtgccactgtactccagccgggacgacagagctagaacctgtttcagaaaaaataaaacagcaaacaaacaaaactccccataccatgatggaaaatagtctgtggatttttgtttaggactctgggcacctcgccttctgaagttacagcttgctgggagatgtagccccctgtttcagcctgtggcttcagtgagctagaacagaatggggcgtgcggtggggttggaggcctgctgaaatgagggcctgagtttctacattgtggtggccagattctgggccagcccagcaacctagataccccttttccctccaggggctctacccaattggccctgagccctagatcccccaaggcgggggcagggcggtagtggcagaaaagacatcattaagaaattacagaggcctggggcggtggctcacgcctgtaatctcagcactttgtgaggctgaggcaggtgaatcacttgaagtcaggggttcgagaccagcctggccaacgtggtgaaactcatctctactaaaagtacaaaaattagtcgggtgtggtggtgggtgcctgtaatcccagctacttggacggctgaggcaggagaatcgcttgaaccggggaggcagaggttgcagtgagccgagcctacgccattgcactccagcctgggcaaccagagcaaaactccatctcaaaaaaaaaaaaaaagaaaaaaaaaaagaaaagaaaaggaaagaaattacagatagagaatacaatatctagaagacaaaagagggtcatgatggcttgtggctgacagagggagggaggaagggagggagaaagaggcttttctaaggacagtgagctgagacttgacaactaagatggggccagacatgaaagagaaaccaggggtgctgcacaggaggctggtggttttgaagcactgaggaggaaagcgatcaaggggagaggtggtgggggttggggggtaagtcacataggggctaggggctgtggacaggcacttgagcttatttagattgttattgttagattggggaggaaggattccaccagtaaggaggcaacaagaggtctaggcaagatatgggagttgacagctggtctaggctgttactggagaaactgggaagcaacagctgggtcaaagtagcttttcttttcttgtctttgtcttttcttttattttctttttaagacagggtctcgctctgtagcccaggctggagtgcagtggcacgatctcggctcactgcaacctctgcctcccgggttcaagtgattctcctgcctcagcctcccaagtagctgggattacaggtgtatgccaccatgcctggctaattgttgtgtatttttagtagagcagtgtttctccatgttggctaggctaaaaatagctttatttctgcctcgttttatgttcaggtcccccattagacagaggaaccaaggccagaatgaggcaggggcactggccaattgatctcccaagcacagtgaatctgaatggttgtagagttgtgtaatggatcccactgaggtgatcagggcccaaagcggagggtagatggccaggttttaacaaaagagggaatagtagttgaggctgagggtccaggaccagagccatggctttctgtatggtagagtcaagactttgggcaactgggggctgcagtctgggagcacaggagcaggaatttcagataaggaggaagaggaagaagaggaggaggagggttcatctctctggacacaggttcgcaccacaaatctcatccattgggttcttagcaggctctgggttgggtgtgcccccacactcggaactcaccaacccagccagcaacctggcaactgtggcaatcctgcctgtgtgtgctgaggtccccatggtggccttcacgctggagctgcagcacgccctgcaggccatcggtcagtggggtgagggtcatgggtgggggctggcggtgggtgggacattagtgagtgagagatgttagggtaggtcatttggggggtggaggggaacagggccacaggggcggggtaatgggtattcttttctgagttaggccccagccctgtggaccatggttcccagcctcccttccccacctacccctaggtccgacgctactccttaacagtgacatcatccgggcacgcctgggggcctccgcactggataggtgtgtgttgcagaagggagtggggagggtggtgggtggggctggagcctcaaattctttcagacctgagctcaagttctcggcttccaaccacggagcctgcgtcttacccataggtcaatggggagattcgcagtggtgtgaatctgcccaccggagcacggacttccatggtggggctttgggtgtctaagttcctcccagcaacggagctatgtggtctcggggagcacactgaccccaggccaaccccaggatgacgctgcccccttcccaccctagcatccaagagttccggctgtcagggtggctggcccagcaggaggatgcacaccgtatcgtactctaccagacggacgcctcgctgacgccctggaccgtgcgctgcctgcgacaggccgactgcatcctcattgtgggcctgggggaccaggagcctaccctcggccaggtcggaagcccgtgccccctgatctcacccacctcggcccccgtcctttgccctcccgtgcctgcaccaggccacgtgcaccctcgccataggggtaggcgatcagggacccaggtgtggccaggtggtggtggggcggctggtgacctcagccgtccgtattccgcagctggagcagatgctggagaacacggctgtgcgcgcccttaagcagctagtcctgctccaccgagaggagggcgcgggccccacgcgcaccgtggagtggctaaatatgcgcagctggtgctcggggcacctgcacctgcgctgtccgcgccgcctcttttcgcgccgcagccctgccaagctggtgaggagcgggccggcccccaccttctaggggcgtggctggtgggcgaggcttgggagactggggcggggcctgggagggctgaggacaggctcgaaggtcagggtacccctgggggatccgccggaccccgccctcatgctcctgggtcgcgactatctcccccatcccagcatgagctctacgagaaggttttctccaggcgcgcggaccggcacagcgacttctcccgcttggcgagggtgctcacggggaacaccattgcccttgtgctaggcgggggcggggccaggtgagggcggggcttgctctctgggggcggggcctggatgtccgagggtggagcttcctgggagaaaccgtgggggcggggcctgggtgttcgagggtggagcttcccctccgggagagaccccgtgggtaggggcgggtcctttgttccttagcagtgcgggaggtgggaggaggtaggggcaggggagttcctgcaggtggggcctagcgggtcactggggcccattttcccggcaggggctgctcgcacatcggagtactaaaggcattagaggaggcgggggtccccgtggacctggtgggcggcacgtccattggctctttcatcggagcgttgtacgcggaggagcgcagcgccagccgcacgaagcagcgggcccgggagtgggccaaggtgtgtgttgcgaggagggattgctgcaccccaggagtgccataaaacccgtggttccaacctaacctgatcccatgggggagcctccggggtcagggtgacccttcctgattaaatctatgatccccagctgtccggacttttatagataagcttctaggactctgggtaaccactttgggacctcctgtctactgaccctaacccataacccccaacgagagcacccagggcccttggtgaccaccttgtggatggccttgggtgaccacatcatccctaagtgttcctttttttttttttttttttttttttgagactgagtcttgctctgtcacccaggctggagtgcagtggcacaatctcggctcactgcaacctccacctcccaggttcaagtgatttatccgcctcagcctcatgagtagctgggattacaggcacgccccaccagcccggcaaatttttttgtattttagtagagatggggtttcaccatgttggctaggctgcttttgaactcctggcctcaagtgatctgcccgccttggcctccaaagtgctgggattaccagtgtgagccgctgcacctggcccctaagtgctgcttgctcaccccctattgatgaaccttatctgtgaccccatgtaactcctatttgaccctgtctggccccttgtccctagagcatgacttcggtgctggaacctgtgttggacctcacgtacccagtcacctccatgttcactgggtctgcctttaaccgcagcatccatcgggtcttccaggataagcagattgaggtaggcccacctcatcccctgccctgcctacccctccccggaggagccccctgctcctcccccacctcgatccctgtccccgcaggacctgtggctgccttacttcaacgtgaccacagatatcaccgcctcagccatgcgagtccacaaagatggtgggtgtccccgcccagcctgcagcaaccgctgacgtcacgtggggttggggggatgcttccgggagggccgctgagcttctgggacgttgttaacacgagtgaccgtccaccctggcccgatcaccgaccactaaccgccacccactaatgccccggagaccccaggtacgtccgtccttgggggaggggagcagggagactcgtcggacgccttacccccctcacgccatccccgcaggctgtgtgtggcgttacgtccgggccagcgcctcctactgcccctacctgcccccactgtgcgaccccaaggacgggcacctgctggtggacgggtgctacgttaacaacgtcccaggtcagcgagcccgtcaggccggctgggcctccggcgtgtctgagcgtgtctgtgcgtgtttgtgtctgtgtgtcccaccgcgcaggctccctgtggcggtacgtgcgcgccagcatgacgctgtcgggctacctgcccccgctgtgcgaccccaaggacgggcacctactcatggatggcggctacatcaacaatctgccaggcaagtggccgcccgcaccacccgcacacgcaagcacctcccgcaccacacacacacacacgcgtgggcacacacagacaggctcgatgacgggacacatgcccaagctgcccatgcaggggtgcagacacacatgcgcacacatacgatcacttgcacaaaatgatacatgaatgtgcctgtggacagcgacatgtgcagttgagatctacattctggccaggcgcggtggctcagcctggaatcccagcactttgggaggcctgaggtgggtggatcacctgaggtcaggagtttgagacccgcctggccaacatggtgaaaccccgtctctactaaaaatacaaaaaattaaccgggctggtggggtgcgcctgtaatcccagctactcaggaggctgaggcagataaatcacttgaacctgggaggtggaggttgcagtgagctgagatcatgctactgcactccagcctgggtgacagagcaagactcagtctccaaaaaaaaaaaaaaaaaaaagaaagaaatctacatctacctgctggcgtgctgtgttaagcacaagtggatgtacatacaagagggacaggtgcacacgtccacacacacatcaggggacatgcaggtggaatgcaacactcgtgtgcacaccagctatatacgcaaatgctttctctcaggggcaggtagggcttacacacacgtgtacacacaggcacatgtgcacagatgaacacgtgtgtcagtgaaatagggcatttgccaacgcatgccagtctgtcccgtttgtcctgcacgttccctcaaacacgcagggatgtgcacacacgtagataggatgtggcacctctgaccgagttaagtcatgcctaccacctttatgggtgcaggtgagaagcgggcaggtacacaacttaaaatctcacaccccagaagtgtgcatatatgaacagacatgtacaccaactgcacacatgctcacaatcttgtaggccaggggtgggcaaactatggcccacaggctgagtcctgccctctgtttgattgtataaataaagctttattgagctgggcacagtggctcatgcctgtaatcccagcactttgggaggctgaggcgggtggatcacttgaggtcaggaattcgaggccagcctggccaacatggtgaaacccggtttctactaaaaatacaaaaattagctgggcgtggtggtgtatgcctctaatcccagctactcgagaggctgaggcaagagagttgcttgaacccgggaggtggaggttgcatcgagcccagatcgcgccattgcactccagcctgggcgacagagtgagactctgtctcagaaaataaaacaaaacctcccaacacctgacccccctcctcaacttcagttgcatcatttgcacgcctgtgcatgacagcatggtgtttgcatgtgtgggtattctctctctcttttttttttgcgtgatcatttgcatgatggcatctgtgggactgggttgaacatctctgccccgggcccccaaggggagcagcccgctgacccccctggccccacagcggacatcgcccgcagcatgggtgccaaaacggtcatcgccattgacgtggggagccaggatgagacggacctcagcacctacggggacagcctgtccggctggtggctgctgtggaagcggctgaatccctgggctgacaaggtaaaggttccagacatggctgaaatccagtcccgcctggcctacgtgtcctgtgtgcggcagctagaggttgtcaagtccagctcctactgcgagtacctgcgcccgcccatcgactgcttcaagaccatggactttgggaagttcgaccagatctatgtgagtgggcaggagtggcatggtgcctgcataggtggtctggctaagctttgctacttaaagcccagagtggtatgagggggaggaatccaggaggaatccaggaatcccatctggaatctctggaaaacagatcagtgatcaattggtgatgtctgcaggggatgtagtaggggtgtggctgtgcatgtgctgtgtaagaactttctccttataggccagctgcacccctggaagcactgtatagtgatttctactgccatttctgcattggtgggaatgagaatagtgatgaagcagaaatgtctgccacagttccaggagagggaggtagcagtgcgtgtgttatgtgctactgaccctgaaaaatgtgccatagcccaagccaattgaaattgatcagggggccaggcatggtggctcatgcttgtaatcccagcaccttgggaagctgaggtgggaggattgcttgaaaccaggagttcaagaccagcctgtgcaacatagcaaaaccccatctctacaaagattaaaaataaaaaattagctgggtgtggttgtgcatgcctgtcaccccagctacttagggggctgaggtgggaggaccgctcgagcccaggagtttgaagctgcagtgagctatgattgcgtcactgcactccagcctgggtgacagagcaaaactctgtctctaagaaaaagaaagggccaggcatggtggctcatgcatttaatcccagcattttgggaggccgaggtgggcagatcacttgaagtcaggagttcaagaccagcctggtcaacatggtgaaacctcatctctactaaatatacaaaaattagctgggtgtggtggcacatgcctatagtcccagctacttgagaggctgcagcaggagaaatcgcttgaacctaggaggcagtggttgcagtgagccaagattgtgccactgcactccagcctgggtgacagagtgagactctgtctcaaaaaataatattaattttaaaaattaaagataaaaataataaaaatttttttaaaaagaaagaaattgatcagtagctgcagcccagaagccctgagtctgagaagagatgtgtgatgtcccttgtgggctcactgggatagcatgccatgagaaattcaagatgtttgctgtgggcttggggatggcgacatccacagatgtactgcctgtttgcagacttcaaaataagctcacacatcaccaccttgtgttatttgctacccagcaccctgcatggggctgtgtgggaaagaacatggagagattgattggtaatgtctgtcaagggcaggacaggggatgtgtaggcgagtgtgctatgtgcagctgactctgaaataggtttagtctcaaatgcaactcccccagagaatcaggcttttgaggggccagagaatgggcagacagagtggggacaagcaaagcagggttgcagacatggacccagcccctcatttcccacaggatgtgggctaccagtacgggaaggcggtgtttggaggctggagccgtggcaacgtcattgagaaaatgctcacagaccggcggtctacagaccttaatgagagccgccgtgcagacgtaagcctgtgatgcccccagggccactctgactccactgattacagaacccaagcccccttaaagtctccccgaaacctcagatgaccccacatgtccctgggttttgctgagctctcagacctctgctgacttcagagagttcccaccctaggatctcctctgagcccccaatgcaccactgggccccccaggggccccaagactctgtgggccccccctaagagcctcaccagtgtcaccccacaggtgcttgccttcccaagctctggcttcactgacttggcagagattgtgtcccggattgagccccccacgagctatgtctctgatggctgtgctgacggtgaggggcccaggggaccccccaagagggaggggagtggctggagatggcaggccagccccaatcccctcacctgtgccctgctccccgattccaggagaggagtcagattgtctgacagagtatgaggaggacgccggacccgactgctcgagggatgaaggggggtcccccgagggcgcaagccccagcactgcctccgagatggtgagagtgggtggcccagggtcccctcacatcccccagagggtcatgagtacagtgtcaggcaggggagccgggggcgtatttgagatcctgtgtgtgctgggtgctggctgacatgtgacgcatcagtgtcccgtgctgggtgacgtgtgtgtgaccttccctcgcaggaggaggagaagtcgattctccggcaacgacgctgtctgccccaggagccgcccggctcagccacagatgcctgaggacctcgacaggggtcaccccctccctcccacccctggactgggctgggggtggccccgtgggggtagctcactccccctcctgctgctatgcctgtgacccccgcggcccacacactggactgacctgccctgagcggggatgcagtgttgcactgatgacttgaccagcccctcccccaataaactcgcctcttggaaatggc

SEQ ID NO: 5711 - DNA, 11845 bp, Homo sapiens
  SITE (2972): n equals a,t,g, or c
aggacgtgagcctgcacttcgtgctctggggctgcctgcacgtgtaccagcgcatgatcgacaaggcggaggacgtgtgcctgttcgtagcgcagcccggggaactggtggggcagctggcggtgctcactggcgaacctctcatcttcacactgcgagcccaacgcgactgcaccttcctgcggatctccaagtccgacttctatgagtatgacagcccgaagttggagtgtgggtggcactcggaggaccccaacccgtgggagtggccagaaccccatccctcaacctcactcctggaagagcagaagggagcccccagatctggcctcccagcgccggtgtaggacggttttgaggccttcctctttcatcccaagtctgttcctgcaggatcatgcgcgcacagcccagtgtggtgctgagtgcggcgcacacggtggcagccaggatgtcgcccttcgtgcgccagatggacttcgccatcgactggactgcagtggaggcgggacgcgcgctgtacaggtgcagctcccaccgcgctgctcaggcccggcctaggggtggggacctgggggtggtcagaccttgctgacctccacgcccactcaggcagggcgaccgctccgactgcacttacatcgtgctcaatgggcggctgcgtagcgtgatccagcgaggcagtggcaagaaggagctggtgggcgagtacggccgcggcgacctcatcggcgtggtgagcgcgacccccacccactgacctctggccttttccaggccagtccctcgacaactcacacacatcatcccgggtaatccagggagtggtgaatgcagctcccgacctctgaggtcacccagtccactccccgcccagacctcatttcgttggaaaaaggggattccgcctgtcgtggatccctgtcctctccctctccccagagctctaatgggtagcgagcgaggcttgcttccctacacccccattgcaggggagccctagatggggcagtacagccccctttccacccatcttcggcctcctcattccccacccaagcagccccaatcatgcacgcggccccccaggtggaggcactgacccggcagccgcgagccacgacggtgcacgcggtgcgcgacacggagctggccaagcttcccgagggcaccttgggtcacatcaaacgccggtacccgcaggtgcggcctgttgtgggcggggcagagaggcggaggcgggactccgggggggtgggggccgggcctagtgtgtgggcggggcttacagaggggcggggtcgagggaggggccgaagcgagagagtgagggcgggggctctcgggggtgggacccaggtaacgggcacccaggagccccggcataggagggagaggtgggacctggacagccgcttcccaggtctcactgaaatgccggcctccaacgcccccaggtcgtgacccgccttatccacctactgagccagaaaattctagggaatttgcagcagctgcaaggacccttcccaggtgagagccggccggcccagagcgtgctgggagatgtagtccggcgtccagagcatgctgggagggaagccttctttcctgagggatgctgggaaatggagttccgcgaagaaatcgtgcccctgagggtttcaaaccctaagtaggacccaggtgcagagcattctggggaatggagttcgtgttcctgagcatgctgggaaacgaagtcctcgacccctggcgtgctagttaatgggctcgaaagtaaatcagtggtgccggggagggagtcttaggcggtggacttggcgtagtctgcccgggagtcagggcttgctggggaagtccacggcctggacgttgagagaaagggagtcctagatcagaatatgatggcagggccgtcatggtggctcatgcctgtaatctcagcactttgggaggctgaggcaggaggatcgcttgagcccaggagattgagtttgaaaccagcctgggcaacatagtaggacccccgtctctacaaaaatttcaaacattagctgggcttggtgacacatgcctgtagtctcagccactcaggaggctgaggcgggaggattgattgcttgagcccggaggtcgaggctgcagtgagccgtgatcgtgccactgtactccagccgggatgacagagctagaacctgtttcagaaaaaataaaacagcaaacaaacaaaactccccataccatgatggaaaatagtctgtggattgttgtttaggactctgggcacctcgccttctgaagttacagcttgctgggagatgtagccccctgtttcagcctgtggcttcagtgagctagaacagaatggggcgtgcggtggggttggaggcctgctgaaatgagggcctgagtttctacattgtggtggccagattctgggccagcccagcaacctagataccccttttccctccaggggttctacccaattggccctgagccctagatcccccaaggcgggggcagggcggtagtggcagaaaagacatcattaagaaattacagaggcctggggcggtggctcacgcctgtaatctcagcactttgtgaggctgaggcaggtgaatcacttgaggtcaggggttcgagaccagcctggccaacgtggtgaaactcatctctactaaaagtacaaaaattagtcgggtgtggtggtgggtgcctgtaatcccagctacttggacggctgaggcaggagaatcgcttgaaccggggaggcagaggttgcagtgagccgagcctacgccattgcactccagcctgggcaaccagagcaaaactccatctcaaaaaaaaaaaaagaaagaaaaaaaaaagaaaagaaaaggaaagaaattacagatagagaatacaatatctagaagacaaaagagggtcatcttgccgtgtggctgaaagagggagggagnaagggagggagaaagaggcttttctaaggacagtgagctgagacttgacaactaagatggggccagacatgaaagagaaaccaggggtgctgcacaggaggctggtggttttgaagcactgaggaggaaagcgatcaaggggagaggtgatgggggttggggggtaagtcacataggggctaggggctgtggacaggcacttgagcttatttagattgttattgttagattggggaggaaggattccaccagtaaggaggcaacaagaggtctaggcaagatatgggagttgacagctggtctaggctgttagtggagaaactgggaagcaacagctgggtcaaaagtagcttttcttttcttgtctttgtcttttcttttattttctttttaagacagggtctcgctctgtagcccaggctggagtgcagtggcacgatctcggctcactgcaacctctgcctcccaggttcaagtgattctcctgcctcagcctcccaagtagctgggattacaggtgtatgccaccatgcctggctaattgttgtgtatttttagtagagcagtgtttctccatgttggctaggctaaaaatagctttatttctgcctcgttttatgttcagttcccccattagacagaggaaccaaggccagaatgaggcaggggcactggccaattgatctcccaagcacagtgaatctgaatggttgtagagttgtgtaatggatcccactgaggtgatcagggcccaaagtggagggtagatggccaggttttaacaaaagagggaatagtagttgaggctgagggtccaggaccagagccatggctttctgtatggtagagtcaagactttgggcaactgggggctgcagtctgggagcacaggagcaagaatttcagataaggaggaagaggaagaagaggaggaggagggttcatctctctggacacaggttcgcaccacaaatctcatccattgggttcttagcaggctctgggttgggtgtgcccccacactcggaactcaccaacccagccagcaacctggcaactgtggcaatcctgcctgtgtgtgctgaggtccccatggtggccttcacgctggagctgcagcacgccctgcaggccatcggtcagtggggtgagggtcatgggtgggggctggcggtgggtgggacattagtgagtgagagatgttagggtaggtcatttggggggtggaggggaacagggccacaggggcggggtaatgggtattcttttctgagttaggccccagccctgtggaccatggttcccagcctcccttccccacctacccctaggtccgacgctactccttaacagtgacatcatccgggcacgcctgggggcctccgcactggataggtgtgtgttgcagaagggagtggggagggtggtgggtggggctggagcctcaaattctttcagacctgagttcaagttctcggcttccaaccacggagcctgcgtcttacccataggtcaatggggagattcgcagtggtgtgaatctgcccaccggagcacggacttccatggtggggctttgggtgtctaagttcctcccagcaacggagctatgtggtctcggggagcacactgaccccaggccaaccccaggatgacgctgcccccttcccaccctagcatccaagagttccggctgtcagggtggctggcccagcaggaggatgcacaccgtatcgtactctaccagacggacgcctcactgacgccctggaccgtgcgctgcctgcgacaggccgactgcatcctcattgtgggcctgggggaccaggagcctaccctcggccaggtcggaagcccgtgccccctgatctcacccacctcggcccccgtcctttgccctcccgtgcctgcaccaggccacgtgcaccctcgccataggggtaggcgatcagggacccaggtgtggccaggtggtggtggggcggctggtgacctccgccgtccgtattccgcagctggagcagatgctggagaacacggctgtgcgcgcccttaagcagctagtcctgctccaccgagaggagggcgcgggcccacgcgcaccgtggagtggctaaatatgcgcagctggtgctcggggcactgcacctgcgctgtccgcgccgcctcttttcgcgccgcagccctgccaagctggtgaggagcgggccggcccccaccttctaggggcgtggctggtgggcgaggcttgggagactggggcggggcctgggagggctgaggacaggctcgaaggtcagggtacccctgggatccgccggaccccgccctcatgctcctgggtcgcggctatctcccccatcccagcatgagctctacgagaaggttttctccaggcgcgcggaccggcacagcgacttctcccgcttggcgagggtgctcacggggaacaccattgcccttgtgctaggcgggggcggggcaaggtgagggcggggcttgctctctgggggcggggcctggatgtccgagggtggagcttcctgggagaaaccgtgggggcggggcctgggtgttcgagggtggagcttcccctccgggagagaccccgtgggtaggggcgggtcctttgttccttagcagtgcgggaggtgggaggaggtaggggcaggggagttcctgcaggtggggcctagcgggtcactggggcccattttcccggcaggggctgctcgcacatcggagtactaaaggcattagaggaggcgggggtccccgtggacctggtgggcggcacgtccattggctctttcatcggagcgttgtacgcggaggagcgcagcgccagccgcacgaagcagcgggcccgggagtgggccaaggtgtgtgttgcgaggagggattgctgcaccccaggagtgccataaaacccgtggttccaacctaacctgatcccatgggggagcctccggggtcagggtgacccttcctgattaaatctatgatccccagctgtccggacttttatagataagcttctaggactctgggtaaccactttgggacctcctgtctactgaccctaacccataacccccaacgagagcacccagggcccttggtgaccaccttgtggatggccttgggtgaccacatcatccctaagtgttcctttttttttttttttttttttttgagactgagtcttgctctgtcacccaggctggagtgcagtggcacaatctcggctcactgcaacctccacctcccaggttcaagtgatttatccgcctcagcctcatgagtagctgggattacaggcacgccccaccagcccggcaaatttttttgtattttagtagagatggggtttcaccatgttggctaggctgcttttgaactcctggcctcaagtgatctgcccgccttggcctccaaagtgctgggattaccagtgtgagctgctgcacctggcccctaagtgctgcttgctcaccccctattgatgaaccttatctgtgaccccatgtaactcctatttgaccctgtctggccccttgtccctagagcatgacttcggtgctggaacctgtgttggacctcacgtacccagtcacctccatgttcactgggtctgcctttaaccgcagcatccatcgggtcttccaggataagcagattgaggtaggcccacctcatcccctgccctgcctacccctccccggaggagccccctgctcctcccccacctcgatccctgtccccgcaggacctgtggctgccttacttcaacgtgaccacagatatcaccgcctcagccatgcgagtccacaaagatggtgggtgtccccgcccagcctgcagcaaccgctgacgccacgtggggttggggggatgcttccgggagggccgctgagcttctgggacgttgttaacacgagtgaccgtccaccctggcccgatcaccgaccactaaccgccacccactaatgccccggagaccccaggtacgtccgtccttgggggaggggagcagggagactcgtcggacgccttacccccctcacgccatccccgcaggctgtgtgtggcgttacgtccgggccagcgcctcctactgcccctacctgcccccactgtgcgaccccaaggacgggcacctgctggtggacgggtgctacgttaacaacgtcccaggtcagcgagcccgtcgggccggctgggcctccggcgtgtctgagcgtgtctgtgcgtgtttgtgtctgtgtgtcccaccgcgcaggctccctgtggcggtacgtgcgcgccagcatgacgctgtcgggctacctgcccccgctgtgcgaccccaaggacgggcacctactcatggatggcggctacatcaacaatctgccaggcaagtggccgcccgcaccacccgcacacgcaagcacctcccgcaccacacacacgcacacgcgtgggcacacacagacaggctcgatgacgggacacatgcccaagctgcccatgcaggggtgcagacacacatgcgcacacatacgatcacttgcacaaaatgatacatgaatgtgcctgtggacagcgacatgtgcagttgagatctacattctggccaggcgcggtggctcagcctggaatcccagcactttgggaggcctgaggtgggtggatcacctgaggtcaggagtttgagacccgcctggccaacatggtgaaaccccgtctctactaaaaatacaaaaaattaaccaggctggtggggtgtgcctgtaatcccagctactcaggaggctgaggcagataaatcacttgaacctgggagttggaggttgcagtgagctgagatcatgctactgcactccagcctgggcgacagagcaagactcagtctcaaaaaaaaaaaaaagaaagaagaaatctacatctacctgctgcgtgctgtgtttagcacaagtgatgtacgtacaagaggacaggtgcacacgtccacacacacatcaggggacatgcaggtgaatgcaacactcgtgtgcacaccagctatatatgcacatgctttctctcaggggcaggtagggcttacacacacgtgtacacacaggcacatgtgcacagatgaacacgtgtgtcagtgaaatagggcatttgccaacgcatgccagtctgtcccgtttgtcctgcacgttccctcaaacacgcagggatgtgcacacacgtagataggatgcggcacctctgaccgagttaagtcatgcctaccacctttatgggtgcaggtgagaagcgggcaggtacacaacttaaaatctcacaccccagaagtgtgcatatatgaacagacatgtacgccaactgcacacatgctcacaatcttgtaggccaggggtgggcaaactatggcccacaggctgagtcctgccctctgtttgattgtataaataaagctttattgagctgggcacagtggctcatgcctgtaatcccagcactttgggaggctgaggcgggtggatcacttgaggtcaggaattcgaggccagcctggccaacatggtgaaacccggtttctactaaaaatacaaaaattagctgggcgtggtggtgtatgcctctaatcccagctacttgagaggctgaggcaagagagttgcttgaacccgggaggtggaggttgcatcgagcccagatcgtgccattgcactccagcctgggcgacagagtgagactctgtctcagaaaataaaacaaaacctcccaacacctgacccccctcctcaacttcagttgcatcatttgcacgtctgtgcatgacagcatggtgtttgcatgtgtgggtattctctctttttttttgcgtgatcatttgcatgatggcatctgtgggactgggttgaacatctctgccccgggcccccgaggggagcagcccgctgacccccctggccccacagcggacatcgcccgcagcatgggtgccaaaacggtcatcgccattgacgtggggagccaggatgagacggacctcagcacctacggggacagcctgtccggctggtggctgctgtggaagcggctgaatccctgggctgacaaggtaaaggttccagacatggctgaaatccagtcccgcctggcctacgtgtcctgtgtgcggcagctagaggttgtcaagtccagctcctactgcgagtacctgcgcccgcccatcgactgcttcaagaccatggactttgggaagttcgaccagatctatgtgagtgggcaggagtggcatggtgcctgcataggtggtccagctaagctttgctacttaaagcccagagtggtatgagggggaggaatccaggaggaatccaggaatcccatctggaatctctggaaaacagatcagtgatcaattggtgatgtctgcaggggatgtagtaggggtgtggctgtgcatgtgctgtgtaagaactttctccttataggccagctgcacccctggaagcactgtatagtgatttctactgccatttctgcattggtgggaatgagaatagtgatgaagtagaaatgtctgccacagttccaggagagggaggtagcagtgtgtgtgttatgtgccactgaccctgaaaaatgtgccatagcccaagccaattgaaattgatcagggggccaggcatggtggctcatgcctgtaatcccagcaccttgggaagctgaggtgggaggattgcttgaaaccaggagttcaagaccagcctgtgcaacatagcaaaaccccatctctacaaagattaaaaataaaaaattagctgggtgtggttgtgcatgcctgtcaccccagctacttagggggctgaggtgggaggaccgctcgagcccaggagtttgaagctgcagtgagctatgattgcgtcactgcactccagcctgggtgacagagcaaaactctgtctctaagaaaaagaaagggccaggcatggtggctcatgcatttaatcccagcattttgggaggccgaggtgggcagatcacttgaagtcaggagttcaagaccagcctggtcaacatggtgaaacctcatctctactaaatatacaaaaattagctgggtgtggtggcacatgcctatagtcccagctacttgagaggctgcagcaggagaaatcgcttgaacctaggaggcagtggttgcagtgagccaagattgtgccactgcactccagcctgggtgacagagtgagactctgtctcaaaaaataatattaattttaaaaattaaagataaaaatattaaaaatttttttaaaaagaaagaaattgatcagtagctgcagcccagaagccctgagtctgagaagagatgtgtgatgtcccttgtgggctcactgggatagcatgccatgagaaattcaagatgtttgctgtgggcttggggatggcgacatccacagatgtactgcctgtttgcagacttcaaaataagctcacacatcaccaccttgtgttatttgctacccagcaccctgcatggggctgtgtgggaaagaacatggagagattgattggtaatgtctgtcaagggcaggacaggggatgtgtaggcgagtgtgctatgtgcagctgactctgaaataggtttagtctcaaatgcaactcccccagagaatcaggcttttgaggggccagagaatgggcagacagagtggggacaagcaaagcagggttgcagacatggacccagcccctcatttcccacaggatgtgggctaccagtacgggaaggcggtgtttggaggctggagccgtggcaacgtcattgagaaaatgctcacagaccggcggtctacagaccttaatgagagccgccgtgcagacgtaagcctgtgatgcccccaggggcactctgactccactgattacagaacccaagcccccttaaagtctccccgaaacctcagatgaccccacatgtccctgggttttgctgagctctcagacctctgctgacttcagagagttcccaccctaggatctcctctgagcccccaatgcaccactgggccccccaggggccccaagactctgtgggccccccctaagagcctcaccagtgtcaccccacaggtgcttgccttcccaagctctggcttcactgacttggcagagattgtgtcccggattgagccccccacgagctatgtctctgatggctgtgctgacggtgaggggcccaggggacccccaagagggaggggagtggctggagatggcaggccagccccaatcccctcatctgtgccctgctccccgattccaggagaggagtcagattgtctgacagagtatgaggaggacgccggacccgactgctcgagggatgaaggggggtcccccgagggcgcaagccccagcactgcctccgagatggtgagagtgggtggcccagggtcccctcacatcccccagagggtcatgagtacagtgtcaggcaggggagccgggggcgtatttgagatcctgtgtgtgctgggtgctggctgacatgtgacgcatcagtgtcccgtgctgggtgacgtgtgtgtgaccttccctcgcaggaggaggagaagtcgattctccggcaacgacgcttgtctgccccaggagccgcccggtcagccacagatgcctgaggacctcgacaggggtcacccctccctcccacccctggactgggctgggggtggccccgtggggtagctcactccccctcctgctgctatgcctgtgacccccgcggcccacacactggactgacctgccctgagcggggatgcagtgttgcactgatgacttgaccagcccctcccccaataaactcgcctcttggaaatggc

SEQ ID NO: 5712 - DNA, 715 bp, Homo sapiens
atgtaaaaaaatttttctttttcttttttttttttttgagacggagtctcgctcagtcgcccaggctggagtgcagtggcgcgatctcggctcactgcaagctcctcctcccgggttcacgccattctcctgcctcagactcccaagtagctgggactacaggcgcccggcaccacgcccggctaattttttgtacttttagtagagacgtggtttcaccgtgttagccaggatggtctcgatctcctgacctcgtgatccgcctgcctcaggcctcccaaagtgttgggattacaggcatgagccatcgcgcccggctaaaaaaaatttttatatttatttatatttatatatagatggtgcttatatccaaagtctttattctctccttcatgtttctttcttttctttttttttttctgagacagagtctcgctctgtcgcccacgctggagtgcagtggcgcgatctcggctcattgcaagctccgcctcccgggttcacgccattctcctgcctcagcctcccaagtagctgggactacaggcgcccgccaccacacccggctaattttttgtattttcagtagagacggggtttcaccgtattagccaggatggtctcgatctcctgacctcttgatccgcctgcctcggcctcccaaagttctgggattacaggcgtgagccaccgtgcctggccttcttcttcttct

SEQ ID NO: 5713 - DNA, 266 bp, Homo sapiens
tgcgacctccatctcccgggttcaagcgattctcctgcctcagcctcctgagtagctgggattacaggcgcccgccaccacacccagctaaattttgtgggggggttttttggttttgttttgttttttgttttaatttttgagacagtgtctctctctgtcacctaggctggagtgcagtgatgcgatctcagcttattgcagcctccagctcttggattcaagtgattctcatgcctcagccttccaagtagctggggccacag

SEQ ID NO: 5714 - DNA, 311 bp, Homo sapiens
catgtttcttttttttcttttttttttttgagacggagtctcgctctgtcgcccacgctggagtgcagtggcgcgatcttggctcattgcaagctccgcctcccggtttcacgccattctcctgcctcagcctcccaagtagctgggactacaggcgcccgccaccacacccggctaattttttgtattttcagtagagacggggtttcactgtattagccaggatggtctcgatctcctgacctcttgatccgcctgcctcggcctcccaaagttctgggattacaggcgtgagccaccgcgcctggcct

SEQ ID NO: 5715 - DNA, 266 bp, Homo sapiens; identical to SEQ ID NO: 5713

SEQ ID NO: 5716 - DNA, 2162 bp, Homo sapiens
ccgctcccaggtccccatcatcctccagtggaataaaagctctaagaagtttgtcccccatggtgacatccccaacatggaggacgtactggctgtgaagagcttccgaatgcaaaataccctctacctttcccttacccgcttcatcggggactcccgggtcatgaggtggaacagtaagcagtttgtggagatccaagctcttccatcccggggggccatgaccctgcagcccttttcttttaaagataatcactacctggccctggggagtgactatacattctctcagatataccagtgggataaagagaagcagctattcaaaaagtttaaggagatttatgtgcaggcgcctcgttcattcacagctgtctccaccgacaggagagatttcttttttgcatccagtttcaaagggaaaacaaagatttttgaacatataattgttgacttaagtttgtgaaggtgtggtgggtgaaactaagagaaatgtagcattagctctcacaaaagaggaccaagaaaaatcaacaaacaaatcaaagccaggctcagagctctgaaattaaaaagcactgaaatagttagatgttttcaaacttttagaactcacattttaatcagggattgcatttattggctaactgcatgacatgcccattctaccatttaaaaaaaaatcttaaagcctgtaatttctgagaaaagagtacagcatttactcttatcatctagaaatgtaatatgcttccccccctctttttgatgaggaagaagaaaattggataagatgggacagcacttataatgaaataaaaaaaactttgagcccctctcattccactttagcaatctttttggtaagaactcttaaagccaaaagtctgctgaaaagatttgctgattattagtttaaaaatcttgtaacactcagcagtgctattttgagtcatcccagtttcctgaaagtaatgcccagtcttcctgaatcctccttaatagcagaaccttggtgattttgttggctcatatgaatgcttgtcatggatatgttaacaatttagtgtttgacattgcttcctctgccacaaagacaatactctggtgacacatgtctagacccagcacaggctgtaggcccaggagcgactcaaaggagtttttccctctttcttacggttcaaaggtgaccctggtggtggccagagcagtaatgcttgtttgatgctcttcatggctcatctgcttctcggaacccacccgttgagtttgtgggtaaccagcaggcaggccaaagactggtgcttttcatttcatcctttagagggatgaaacagttatttccgtctgatgagcattcggtagaatttttgaagtgagattttatgaagtcaaaggggactttacacagatctcgacctgctttgaaacctagaggtggccctttgatttgtgcgtgtccttgccctctggacaacttaatatttcaagtaatcgaataccaacttccctgccagcccacctgccttctgccccgcttgtgtaacagtcctgttttgttgagttgctgctattgcactgccagtgcagcccacaccaaatcacaacccaagatactcagataggaagactccttcctctcccagtactttaccaaaggaacccccccgcccaggacccacatggggccacgtgttggcagtggaatcagcctgtgcaggctggggatctcaggctgatcagtaggggccagctttggagccagccaagctgaatcccacactccaggtctgtgctcaagagaccagatggtgtatttccaaatgggcctctctggtatgggcaataggcaagctcctggggtctggttatgtggaagattcttagtggatgttccgcctggttagctggttctcttcagagaatataaagtgaatgcctttaggggtagctctgaaagagaaacccaacaacttcattcctagccatgaaagtagcacgatcatattgtactgtattgttattgtaaaatgattatttgccatgtcatgagtaggtagatgttttgccacaaatatgaatgtgtttgttgtttcctgactttaagcaatgaagattgagacaataaatagcactcagagaatgaagcattgatgtta

SEQ ID NO: 5717 - DNA, 277 bp, Homo sapiens
tggcttataagcaacagaaatttatttctcatagttctgggcctgggaagtccaagatcaagacattggcagatttggtatgtggcaagaacccactgcatagctggccacctctttgctgtgtctatgtggtgaaagggcagagggagttggaaggcactaatcccattcctgaggactctgctcccatgacctaatcacctcccaaaggccccaccaccaaataccatcacattggagatgaggtttcatcatatgcatttggagagagcacaaa

SEQ ID NO: 5718 - DNA, 369 bp, Homo sapiens
ttttatacaagactaaagcctgtagtctacagagcgcctgtgctgtggaaggagatatttgttctggccaacttactaaaggagcatagatgttcttggcacggggtggtgatatctttgcttcattaatcttactgctccatcccaagaatccctgaagttttaaacaacttctgcaagaagcattcttccagtagtaatgtaaaacaaaaaaccaaccaagcaacagcaaaaatgcaaagcagagaaatatgtggaccgtccccagtggagatcagcttgaaggagggggtggatctttcttctactttccctcccatcacccactgggtggtcgtctgctcagcttatttcttctttatgaacttt

SEQ ID NO: 5719 - DNA, 2162 bp, Homo sapiens; identical to SEQ ID NO: 5716

SEQ ID NO: 5720 - DNA, 277 bp, Homo sapiens; identical to SEQ ID NO: 5717

SEQ ID NO: 5721 - DNA, 369 bp, Homo sapiens; identical to SEQ ID NO: 5718

SEQ ID NO: 5722 - DNA, 19286 bp, Homo sapiens
gccgcgccgcgccgcttgccgccgggctagcactgacgtgtctctcggcggagctgctgtgcagtggaacgcgctgggccgcgggcagcgtcgcctcacgcggagcagagctgagctgaagcgggacccggagcccgagcagccgccgccatggcaagtgagtcctgtagggaagccctattgaggccgggacggaacagatcccccttccccacacccgtgcggtcgggcgcccgccggccaaccctgaccggccccctgcagaacgcggcccgtgcccccggcccttctcgagtatccccacgcgtccggggtgcggccggctcccctggcccctgctctcactcgtcgtgggcagaaggcgtccctgggtagcgcggaaggttacttctctgtgtcccaactcttcctgttttgtttctcccatcaaagtcaaatttctggaagtcatcaagcccttctgtgtcatcctgccggaaattcagaagccagagaggaaggtaagtaccccaaatcgccaacaaagaaggtttcaggaaactgtctggactctggaagtttacagtatgattaaaaatggcttcagcacggcaatggaaactctcccttctcttcccttggagtgtagttgtgctctgttattccggagagctgtcgaaaggtgacctggttgtgtggaaatttccactgaaatcactgtgctttatttggagcatctttggtggatgttgctccgagaacaaagcctccggttgccctgtcccaaaaatggatccgggccatgaatgaataaggcctcagttaggatagcagattgagttaccctccctttttcacctccaacgggagcagatcacgggttggttttttttcccaggagatgccctttgtatccagctgctaaagggaagggctgtcactttagtatttacaaatgattttgtaccttttatgtaggctgtcacaatagggggaataaaggctattcttttgtgaagtctgctgcttttcacagacggtgtattaaaacaaggaaagattaaatttagagctgtgctgaatcagaaattgtgtggagtgagtgttgccagtgtaactacagctgtcaacgaaaaaaagtttcattaggttcctaggttagagagtggggaataaaatgtttgtgtcctcacattatttttcaaactgttgttaaagcattcacatggacacttgggtgcttggaatccactttcatttttttacgtaaaatagtttcatataaatgcccatgtgctgcttttaatggacgaatttgtaaagctttaccccctcaattccagtgtagcgaaggggcatggctctggaggcaggcaagcctaggtcccaccctttacatagcaccttaatagctatgtgaccttggccttgtaactcagtgtggtagacggaacaagggaaatacgtgcaaggtatagcagtggctcaggaagggattaactctgggagacatgatgtcttatggtggttttgaaggagaaatagaagtctccttgaagggacggaaaggaattccaaataaaaggagtatatagtttgcaaaggcattggtgacaagagtgtagcatgtttggatgggaggttattagatgtagttgctattgatagaacataattgtaggtggggaacattaggagatgaataacaagggccagacatgagaatgtcactttggaagaaaaggagaggactagagttggtttagaggcttttcacatcagaggatgaactgtggtactgagcaagaatggatttaggggctactaagaagcagaggagacaggacttggataaagagcttttggggttttgatgttaaatttgattgtaaccaggagagaggacttggtgattagaaagggagttttgaaaaaattgtctgctctttgtttcccatcaagattcatttcagacaggttactctgaaatggcgttgccttctcttggccactttctaatttcttagtgtggtgggatggtaggtgggaagaggaccattctcaagagaagaagagtcctgtgaatgcccccagctttggatggagtatctgaacactgattcacccactgttgtgtggccgtatgactgtgtcctactttgcctgcatgtatagttagaggactgtgactccagttctggccagagggccaggaatgctgactcagtgcctgcctagaagtgtttttaaagaacacagttttgtcacttaatactgtcagtctctcacaaggtatttcaacctcagaatcttccgtctgtacaataattaatgtttgttaagccctctaaagccattaatgtagtgtaggcagcaggtattagtgaagacactcagtttcagaggcagaaaacctggaagagttcccactctactctttagtgacagaggttttgggtgggaggttttctaatgatacttaatacttaatagtcatctttacagtgattcttgtcacctatgcaacctatgtacctgagaagatgtgaaaatccttaaacaaatgttactagtaggttaaacatgcaactctcctgcccttccccaatatggtttattacactgttttacccttaattcatagaaaatacactattgagcaattccaaattacttgactctagaataacaaggttttgtgactgaaactcaaatgaaaagtggttgctcgtgtgttttacaagtcatgttctattgtgacattctttgttcttgagtcttaactgttaatgctaatggttaaaagcacagtttgggactcaaactcactttagcattggggtttggtacaaattatttagctcttctaaggctcagttgtaaaataaaggtaatgctctgtggtgtgaggtgagctggggtgatgcctgtaggtccttgcattgtgctctgtgcagaggaagttacgcagtacatggtacttatgtttggtacatggtttggcttctctgctgaacagagaaaagagtctggttggagtccatttttagagaaaggggtctgattggagtccatttttattaatttgcttttcaaagtaactccctgcttcaattcattctctcctactctagattcagtttaaggagaaagtgctgtggaccgctatcaccctctttatcttcttagtgtgctgccaggtaagctcaggcttgtatttcgtattggggagggggataagagtggctggaaacaggagtgctgactgttttgctctttgcctgttcccagattcccctgtttgggatcatgtcttcagattcagctgaccctttctattggatgagagtgattctagcctctaacagaggtaggactctggctctgtcttttctctgtagagtgtaggcttacctagcttcacttagttaaattaataggctttggctttatatggaacttagagagtgacttggaaaatagagtgaagaatgttaaagtgctgtgttgaatagccttattaaatgctgagttcagcaccaaggcataccatcatatttggaattgtatttgaatgcagtacaaaacctgtaatgagaagataagtctatgctatagagagaataaaaaacatggaaaaactagaatactttttgaatacctgaaatgatgacatttccattgataacattcttcagaatatgtaatttgtttttcagctgtatctttttcatatctataggttacatatagtgtcaaaaaatatgtaacagtgttttatatcctctaaccagttacttatgggactggggaggattctgaatgtgtaggttgatactgcatttgattaactcatttaaaaaatatagttcaattaaattccaaatcagttggaagtgtagctcattttaacataatgggaagtagaggcttattcacaactagatacaattgtacaggctccttttccagactctggaaattatttgaatgttatcctttttttattaactgatgaagagacgaacatttcttatctctaaaaccagaatgaatctgtttatggtgaatttaaatgcagcagtctgtttagacaccatgtgacttcctaaacagaataagctgttgcctggcaggctgaacagaatgaattgaattatatactaatcgttgatattttggggttctaaattaaacacagctaggaaactgaaacacattggttttatataaggggtacccagtcaaattttgcgtattcatttttaaaataacgtactacgtttccaagctgatattgactgttttgcttccccgtttcctcaaggcacattgatggagctagggatctctcctattgtcacgtctggccttataatgcaactcttggctggcgccaagataattgaagttggtgacaccccaaaagaccgagctctcttcaacggagcccaaaagtgtaagaaagattgtgaataatctgatgtctatagttggaaaatttgaatttgctataagattttggtatcagtttttctttttttatttattttttatttttttttttttttttgagatggagtcttactctgttgcccaggctggagtgcagtgacgcagtcttggctcactgcaacctccacctcccaggttcaagcaattctgcctcagcttcccgagtagctgggattacaggcacgtgccaccacacccagctaatttttgtatttttagtggagacgggatttcactacataggccatgctggtcttgaactcctgatcttgtgatccacccgcctcggcctcccaaagtgctgggattataggcgtgagccaccatgcccagcccaaacagtattttcttttgtgctgcaacctccttggcctgccaaccctgcaggagctccatgccctgtgttagcgtgagagagcacttctggtagagcagaggtggtgggtgctggggatgggctgggcaaggcaggggagagtgtctggagtgcccctgaggccatgtaatggaggagaaggatcagagcttggaggtcttagcacccttggccaccatttcattattgcttaaaaggaagtaatggctacttcagagctgtcataaggattaaataatcactgtcacaatgcctggcacatagtagttatttggcaagtgttttataaaagaatttaactgactggggggcggtggctcacgcctgtaacccccagcactttgggaggctgaggcgggcggatcatctgaggtcaggagtttgagaccaacctggccaacatggtgaaaccccatctctactaaaaaaatacaaaaattagccaggcgtggtgacaaggtgccttaatcccagctacttgagaggcagaggcaggagaattgtttgaacccaggaggcagaggttgcagtgagccgagataaagccattgcactcaaacatgggggacagagcaagacttctctcaaaaaaaaaaaagaatttaactgaagaaaaggtgatcctgtcagtccagctgtataatttaccagctctgtgatctggggaaaagttagatgatagctcttatgtttcactttcttcatctgtaaaaatggggataataatggtatttgcctcatatctaataagtgttactagtaacaattactagtcatcaaaattagccatatttagcctctgtttgctgaaaaacattaattaggaaatgatatttacagtctcctatccagtcatcttttcgcctacaccagcatgttttacaggtcttaaattagtatggtggataattgaatgagaaatacgtctatttttttttttttttttttttttttgagacggagtctcactctgtcgcccaggctggagtgcagtggcgtgatcttggttcactgcaagctccgcttcctgggttcaagccattctcctgcctcagcctcccaagtagctgggactacaggtgcccgccaccacgcccagctaattttttgtatttttagtaaagacggggtttcactgtgttagtcaggatggtctcagtctcgatctcctgacttcgtgatccgcccgcctcaggctcccaaagtgctgggattacaggcgtgagccacagcgcccagccaagaaatacatctatttaaacttgtcagttttagataaaaattaggattctaaaatacacacatgtggctgggagcggtggctcatacttgtatcccagcactttgggaggccaaggcaggatgattgcttgaggccaggagttcgtgactagcctgggtaacacagtgagagagaccccatctctacaaaacaacaacaacaaattagccaagtgtggtgatgcacctgtagttctagctactagggaggctgaggtgggaggatcacttaagcccaggagtttgaggctgctagtgcaccactgcactcctgcccgggcaacagagcctgtctcttaaaacaaaacaaaaaacactaagaaaacaaaaaaagtacaagcacaaattggctgttttctctttggtcttcacaatgttttgaatgttttcctgcattaagaactaattgttgtggagcactttttaaaaagtcaaatagggactgtatttgatggccactttggagtaaaattaattttacatgacagattaaataggaaagctgaaactgaaggtcagactgtacttagaggacccatctagtactgtggaacttgtcaaatgtgtccattcccttgtgcctaacagtgaaatagagtgagttgtaagaaatgaagacaccctacaaaaaggaaagcttttgccaggcgtggctcatgtctgtaatccccgcactttgggaggctgaggtgggtggatcacgaggtcaggagttggagaccatcctggctaacacagtgaaaccctgtctacactaaaaatacaaaaaattagctggctgtggtggcacgtgcctgtaatcctagctactccagaggctgaggcaggaaaatcgcttgaacctgggaggtggaggttgcagtgagccaagatcatgccaccgtactccagcctgggcgacagagactccgtctcaaaaaaaaaaaaaaggaaagcttctattagaccaaaatagcttggtacctaagggaatgggaagagcagccaaatcaatggtacgtggggttttccttttaaaagcacattaaataaaaacttgagaagggatcactttaccccagagctaataattctgtcctctggacccagacctggatggtgagcctagagaggtggcccaaatctgtagttcagctcttgagccatcgagaccccaagtgcctgacattgagtttgggtgctgcaggtgtgacatctccagattgtgtctccggatgctgtcaggagtaggttctactccctgattttctttgaatagaacaaattttccaagtttcacttttactcctcccatgactaaaaagcaagtgaatctaggaaaaggtaaaactaaagaagaagtgtgcttttgttaaaaggcttttgattcatcatgtactttgctgatgtgatggtttagcgcgttctcagccgagccccttggaggtagtatcactgctcttcatctttgttctcccccgtgcctggcgttgaattggtgtttcttaattgtttcttttgttctgtgtagtgacccacttggaaaacacttctttctttcaattctagtatttggcatgatcattactatcggccagtctatcgtgtatgtgatgaccgggatgtatggggacccttctgaaatgggtgctggaatttgcctgctaatcaccattcaggtaattattatgctaacatctccctttgagtagcccctcacacttacctacaattctcacataacgaatctcaagcacacctaaaaggaactcctactgaaaggaagcagaagcctaagactctgggttagccctctgaattcagcagagaaaggctttactgaccgctctctggggctgaggatgtgatctcattccgtcttcagcgtttatatcagagaacccaattactgaaggacggaaccatgtccgtggggagcagtaacacatagtcttgtatttttgaatttttacagctctttgttgctggcttaattgtcctacttttggatgaactcctgcaaaaaggatatggccttggctctggtatttctctcttcattgcaactaacatctgtgaaaccatcgtatggaaggcattcagccccactactgtcaacactggccgaggtaagggccctgtgctcccctggtggcgacagctttcagcaaaaacaattgagcaatgcaaagcagaagacaaaaatccccccattccacagaaaaataatgtcagttttaggtttatctcttctggtgtttgggtccatctgcaaagttttaaaaacacaaataggcttgtaattatgatgatacctaacttgcacttttcatataaaaatatctcctggacgtttggcacgtcagaatacacaatcctgcctcacttttcttagcacagtataagcttatattgcaacgataaagcaacgttaagtcatttccaggtttttttatcgttaacattgaaaccatgactgtcctcatatgttcatctttgtatattttggcagctgctctcagtgaataagtttctaaaaatgaaattcctaaaccaaagcacttggtcatgcaaggggcagctttctgaaaaaggcctgaacttggagcttagcacctgcgttcaaatcctggctgttcctgttagtcatacatacgtggctttgggcagattcctgcaccactgaatcttggttaccaggatgcagtgagaagcaacatgaaattacatgatgcctggctcctggtagatgtgtatcaaacattggcatgctgtgctacatccaccaagtgccgtggaaatcttgtaacagcatgtttttaataaaaagttcaaaacatacaagggaagccttagagagtgtgacttattagggaaaggaaataaacattttttggcactaaatatcttcttcactgaggagcattccaggagaaataatcatgcatatttgagagttttcttttaattgaatgttggaaacagagtccttggcctccagagaccatattatctcattaatgagatggaaaactggtccccaaacaagtgaaggctgcatgtgcctaacaggttacaaaggagagtggagcttgagatagggagccatagagaagagtgggcaagatcacatttgatgcttccttgagtactttgtataaatttaggaaatccaaggtaaattgggagaagcaggtccagaaggcaaagtttgacaggatgtgaaaaggcaagagggggatggcattgtaggagttcaggtatttgtcaagaccatcatggtgactggcttttggggagtgcctgagtgggaaggaagtaaagtcagaggggagcccctggtggcttagcagcccagtagtagccgccagaggctcatgttccattctgcagcagggcattgagtaatgggagccagagtttggaagaagtgatttgctctgcactgaaaggcagagagagcagctaggtgcgtgcagcagtaatccagccccaattaagccatcctacaggagagcactgtgtgagggcatttggaggaagcaagttgagagaggggaccagagaggcactttcaaggtgggggaaaactaagaagcaaaggtggatttgtctggccttgaagtcagtgtgtctacatgtcagttgctcgtgtttgggacctggctgacacgagatgcattcaggaagggctgtgccccatggcctgcatgtgggcagtgagtggtgctagagggagagcctagggaggggcagggagagccacacagagggcacagctgggacggcagctttgcagctgtgcctggagatgttgcagcttggcttgggacaggggaggctgttgaatgagattctacaggcagagacagtaatcactgctgcttccctgggcagcaggaacaatgcagaactgggaattagtcccaaatttgaaaccgtggggaaacaggccagccttgtcacacaggaccaaaaggtggaaaggatgggaattgacgaaagaccgccacagggtgagatgaggacatgatggccagttaggatatggtgtctctttcacagaagccacagcagaggaggtcagtggtcatattggttagatggtctgcctgacatgtcatctcggaatggtccaggaagatgtagcaggtggtcctagctatcacgtgttagaaacttgggaacagtgcttttgagttctttagtttcaccttttcctagattcacttgctttttagtcatgggaggagtaaaagtgaaagttggaagatttgttctatgaaaggaaaatcagggagcagaacctactcctgacagcatccagagacacaatctggagatgtcacacctgcagcaccgaaactcaatgtcaggcacttggggtctggatggctcctgagctgaactacagatttgggccacctctctaggctcaccatccagatctgggtccagaggacagaattattacctttgggttaaagtgatcccttctcaagtttttatttaatgtgcttttaaaaggcaaaccccacataccatcagtttggttactcttcccattccctcagctaccaagttattttggttgaatagaagctttcctttttgtagggtgtcttcatttcttacatctcactctatttcactgttaggcacaagggaatggacacatttgacaagttccacagtactagatgggtcctctaagtacagtctgaccttcagtttcagctttcctatttaatctgtcatgtaaaattaattgtactccaaagtggccatcaaatacagtccctatttgactttttgttgttgttgagacggagtcttgctctgtcacccaggctggagtgcattggcgccatctcggctcactgcaacctccgcctcccgggttcaagcagttctctgcctcagcctcctgagtatgggattacaggcgcccgccaccatgttcggctaatttttttgtattattagtagagacagggtttcaccatcttggccaggctggtcttgaactcctgaccttgtgatccgcccgcgtcagtctcccaaagtgctgggattacaggcgtgagccaccacgcccgactcctatttgacttttttaaaagtgctcctcagagtactgataccatgaccccacactgcccacagagaccctgtctctggaagtaatgccagcttcctgccagtagaagcagcgtgagttgccaggcttccattatgggatggttatgctgtcctggaacggcagaggttatcacttgtttctttttttcgctttttagttttttaacgtaagtaaatttcttgctgatgtctaaaacttaggccttaataatgcaccacactccccgccttcctctcacttgttactctgttgtctggttcttagattgggtccctttcctatatccctcagtccctcagtaagctcactccacccctaggcctgcctccctcaggagcatctcctggcagggtgtcatttggatgggaccacatggtggacgcaagcatatcctctgtacttgtatccttggtgtgagaagcagagagctggagcctccccactcaccagccaagggcagcctgcacttcatagctgttgaatgggtacttgtacttctcaagattgtccaggaaagtagatttgccagctctgagccccctcttcagtggatgacccctttcagctagagttcagcagagtctgcttttatttttataaattatcatcgttccacacctctggtggccactgactcatgtgcctaagaaatgagaccaattaattttaaaaagtggaatagtggttgggtgctgtggctcacacctgtaatcccaacactttgggagggtgaggcgggaggattgcttgaggtcaggagttcgagaccagactgggtaacatagtgagacccccaactgtacaaaaataaaaaataaaaaattagccaggcgtggtagcatgcctatagtcccagctattcggaagtctgagataggatcacttgagcccaggaggagaaggttgaggctgcagtgagctgcaaccacaccactgcactctagcctaggcagccgagagagagggaccctgtctaaaaaaaatcaaaaacaaaccagaatagcccgtttctgtagtttgaattctctacagaagagaagggagggatgagaataatacatgctgtatccctgtggctatgggcaccatgagtctaataacttaagtttgttttcctctttttatttgtctgctaagaaggctagaagcaaattgagttgcctgttcgttccttcatatatgtctcctcctctgccaacaggaatggaatttgaaggtgctatcatcgcacttttccatctgctggccacacgcacagacaaggtccgagcccttcgggaggcgttctaccgccagaatcttcccaacctcatgaatctcatcgccaccatctttgtctttgcagtggtcatctatttccaggtgtgtccagatccaaccccagggagtttccatggtctggatttaagtttcagaatgccttgtgtgcagtcccccactctgtggggtgcactgtcatcatattgtgttgaaacgatgagatggtatttgaaggcagcaggtttccagatgagctggacaagcatgttcattgagtcatgggacctgccattaacgaaacaaaattaaggcagttctaacgtaagtgaaatcatgttcttctgggttgggcctatcgacaggtaagatacatttttaagttcttagttcaagagaagcaaaaagtactctagctctgaaacctcattgctctcttatagaaagtttgtatgatatttataggtaacttctgcatctcggaaacggcctatcttcttaagctgtcttacctttaaaagtattccatctcttaaacttgcttctgagtaagagacctgaactgctattgttttcctgtaattggattgatctttgtattttttgatggtccactttgtattttggtgtttatttaaaagaagggacagagatgaaaggcagtttgatgtttgtgaaaggtatttatacgagctacatgcttttcccattccttctgctgagactaagccacattcttgcttaataaaaagctatctctttaggggctttgccagaatttgcagtcagatcattaagaattttttttttttttttttttttgagacggagtcttgctctgttgcccaggctggagtgcagtggcgcgatctcgactcgactcactgcaacctccgcctcccaggttcaagcgattctcctgcctcagcctcccgagtagatgggattacaggtgcctgtcaccacgcccggctaatttttttttatttttagtatagacagggtttcaccgtgttagccaggatggtctcgatctcctgacctcgtgatccgcccgcctccacattacaaagcgctgggattacaggcgtgagccaccgcacccggccttaagtatttaatttttaaatcctctgtattccgagccctgttctaggtactgggagctcataaaaataaaccctttctagtctccaggggtttcagagggagaagttgtattcctagaaaagtttagcttttctgtttatgattaaaaacactgtaaggaactattataaggtgtgaggccactgctgtagtggccctgcctcagagccagtgtaaaagcttaggaaacatcaccagctagagagaagcgcccttgggatttgggtgtgtggcctccaggcttttctccatattccacacagatgtggatgtaatgtgataggctctgtcttttggaaaaaaaaaaagtgggggtggggatcattccaccgtgcttgcttccatgttttgttttgtgtgagacagggtctcgttgtgttgcttaggctggaatgcagtggcatgatctcggctcactgcagcctagacctcccaggctcaagtgattgtcccacctcagcctcctgagtagctgggactacaggcgcgcaccaccacacccggccagttttgtttattttttgtagagacggagtctgactgtgttgcccaggctggtatcgaacttctgggctcaagcaattctcccacctcggcctcccaaagtgctgggattacaggtgtaagtcaccacgcctagccttcagtgtatttttaaaccagcttttctgggccccttctggatgtgccaagtgcaggagtgcagtggtgggtaaggagtgggcacaagctctcggaactgggagccccagaaccagcacacaggatttcctcccttgtggcccactggacagtccccggccgggctgtgtttctgtgcagcaggctgaaatgaggcagtgaaggggatttggttctgtttggcttctcagggcttccgagtggacctgccaatcaagtcggcccgctaccgtggccagtacaacacctatcccatcaagctcttctatacgtccaacatccccatcatcctgcagtctgccctggtgtccaacctttatgtcatctcccaaatgctctcagctcgcttcagtggcaacttgctggtcagcctgctgggcacctggtcggtaagtaggctctttgaagatgagctagcaatgcagctaagttgcagtggtttctatcagtgtcttgctcatgaacagatatttcatccaaagatattttccattgtgccttttacaaattcagcacattaaattatcttttcagtaaaaaaattgtactgtgggcaccgagtaaaattgcattctttcatctgctcagaactatttttgccttgatgctaaagtaaaatgaaggagcactcacatgcgtttggtttcttcttccccaggacacgtcttctgggggcccagcacgtgcttatccagttggtggcctttgctattacctgtcccctccagaatcttttggctccgtgttagaagacccggtccatgcagttgtatacatagtgttcatgctgggctcctgtgcattcttctccaaaacgtggattgaggtctcaggttcctctgccaaagatgtaagtagaagcaaaactttctggaagggtgatgaaagtgtgactggtataaggggtgtggacttgtcacctcatcataaataatggtctgtgacgtgtgcagatagatcgtcgtcctttagggggcagttcagaagctttaagggctgacagatggagtccagcagtagatcagctgtgggtatgagaatctgaatccacactgtaaagttagactttttcatatgacttccttgcggcagttttaaagttctctgtatgaatattgtcagtgctcgaagaggcgatctgtaactgttcagtaccacttggaatgcctatttccccttcagcctccaattccaacttctcccctgtgggcaccctgcaggttgcaaagcagctgaaggagcagcagatggtgatgagaggccaccgagagacctccatggtccatgaactcaaccggtgagtggtggccccaggtccccaacctcccgtctgtggacatgtgttgtttctttccatgcagggcatcctgataggccctagcacttactgggtcactaaatcttatccttgggttacaggacagaattaaatgttatatatttataaacttgctaagtgctggacactggagacgtaaaaataaacacttacagcccctttcctccagagggagccactgggtaaggagatggaagcatgtggccaggcggataggagacagtgcagtaagggtcctgagagcaacagctgtgactggcagcgggaccctcaccctggctcatgccggtggggtgctgaagagagcgccctggaggagggtcactctgagctcagagcaggcaggtcctggcatctgagcgcattttggggcctgtggtggcattaaggctagagaggctggcagtggctgggcacggaaggggttgatgtgcatctgaagcagggcagaagggatggagcctgcagtctcttaggaaggtcagtgctaatacatgaaaccacgctagagagggagagggggaggccacatacctgccaggctgtggtgagagtttgggccagaggtgatggtgccagatacagctgtacccttggagatggagcagttaggtaaggaagggcaaagtccaggtgaccttagatgctgccacagcactcttcagtctgcacagtcctcagtacaactactcatctcttccatcgtcactcagaagcagccacagacagacaacagacaaatgagcatggccgtgttcctacaaagctggctacaaagtcagctgcagaccaggttgtcctatgggccttacctaaaggaagcaaccacaggaaaagccagaattgcaaacttcagatcattttctaatccctagcagggatggtaggcaatttagttcattctcttaatattaagctgctggatttacagcactgtgcagtagaagtagaattcaagtcacatgtagtttttaaaatttctagaagtcacattaaaaaagtaaaaagaaacaggtgaaattaaatttaatatatttaacctagtatatccaaagtatcatttcaacattataattaatgttaagaaaaaccatgatgaaatattttacatccttgtcttcaaatctccaaaatcttatgtgacatctcagtttggtctagtcacagtcccctggccacgtgtggccagtgtggccactgcctggacagcagcgccttggcctagagcgctagcatgttagtagatgactttctaggagacagcagaggggcctttgaggcattaggtcccaaagtctcaggtgagcctgttggccgcctggctcacggggagctctgtgggtgtccaggagctgactgtgtcccctcccccaggtacatccccacagccgcggcctttggtgggctgtgcatcggggccctctcggtcctggctgacttcctaggcgccattgggtctggaaccgggatcctgctcgcagtcacaatcatctaccagtactttgagatcttcgttaaggagcaaagcgaggttggcagcatgggggccctgctcttctgagcccgtctcccggacaggttgaggaagctgctccagaagcgcctcggaaggggagctctcatcatggcgcgtgctgctgcggcatatggacttttaataatgtttttgaatttcgtattctttcattccactgtgtaaagtgctagacattttccaatttaaaattttgctttttatcctggcactggcaaaaagaactgtgaaagtgaaattttattcagccgactgccagagaagtgggaatggtataggattgtccccaagtgtccatgtaacttttgttttaacctttgcaccttctcagtgctgtatgcggctgcagccgtctcacctgtttccccacaaagggaatttctcactctggttggaagcacaaacactgaaatgtctacgtttcattttggcagtagggtgtgaagctgggagcagatcatgtatttcccggagacgtgggaccttgctggcatgtctccttcacaatcaggcgtgggaatatctggcttaggactgtttctctctaagacaccattgttttcccttattttaaaagtgatttttttaaggacagaacttcttccaaaagagagggatggctttcccagaagacactcctggccatctgtggatttgtctgtgcacctattggctcttctagctgactcttctggttgggcttagagtctgcctgtttctgctagctccgtgtttagtccacttgggtcatcagctctgccaagctgagcctggccaagctaggtggacagacccttgcagtgatgtccgtttgtccagattctgccagtcatcactggacacgtctcctcgcagctgccctagcaaggggagacattgtggtagctatcagacatggacagaaactgacttagtgctcacaagcccctacaccttctgggctgaagatcacccagctgtgttcagaattttcttactgtgcttaggactgcacgcaagtgagcagacaccaccgacttcctttctgcgtcaccagtgtcgtcagcagagagaggacagcacaggctcaaggttggtagtgaagtcaggttcggggtgcatgggctgtggtggtgttgatcagttgctccagtgtttgaaataagaagactcatgtttatgtctggaataagttctgtttgtgctgacaggtggcctaggtcctggagatgagcaccctctctctggcctttagggagtcccctcttaggacaggcactgcccagcagcaagggcagcagagttgggtgctaagatcctgaggagctcgaggtttcgagctggctttagacattggtgggaccaaggatgttttgcaggatgccctgatcctaagaagggggcctgggggtgcgtgcagcctgtcggggagaccccactctgacagtgggcacacggcagcctgcaaagcacagggccaccgccacagcccggcagaggggcacactctggagaccttgctggcagtgctagccaggaaacagagtgaccaagggacaagaagggacttgcctaaagccacccagcaactcagcagcagaaccaagatgggccccaggctcctccatatggcccagggcttaccaccctatcacacgtggccttgtctagacccagtcctgagcaggggagaggctcttgagacctgatgccctcctacccacatggttctcccactgccctgtctgctctgctgctacagaggggcagggcctcccccagcccacgcttaggaatgcttggcctctggcaggcaggcagctgtacccaagctggtgggcagggggctggaaggcaccaggcctcaggaggagccccatagtcccgcctgcagcctgtaaccatcggctgggccctgcaaggcccacactcacgccctgtgggtgatggtcacggtgggtgggtgggggctgaccccagcttccaggggactgtcactgtggacgccaaaatggcataactgagataaggtgaataagtgacaaataaagccagttttttacaaggtacttga

SEQ ID NO: 5723 - DNA, 744 bp, Homo sapiens
ggctgctggtcctgcctgcaggtacttctgctagggacgtagctggggcaaggaatgaggagtctagggaaacaggccccacccccggagcttccccttgctgcccttggctcaggggcagcacccgcttcaactggcactccgctccatccatggtgctgctttaccactgcctccctggacctgctgatgccctaccccataccccgcccccagcctgctcctgctgaagccaggccagcatgaagtcctcaggaaggctgggatgagcctcccatctcatttctgaggggtctgagccccatggcctggggaagagcaacggattcctgatgagggccaggggatgggcatgtggcactgtccgagagtcagcaaaagccccaacctgagcttcagcacctaccaatgcctggttctggagagccaggtgtgcccctaagtggtagtgcccacctcactcccctgccccaatcccttctagggccacattacccactcctttccactcagcaaacattattgagcctcatggggaaatggaacagaaggtgcctctcctcttaaaagctcatgccccagcagtaagggttctgcagtgtctgtcaaacctgtgggccttgttccctctgctgtctgcctgacaagctcctgttcatccttcaaagcacagctcaataaggctagaaacatctaaatgcccatcggagggggctgaataaattacagcagctcctccctgtg

SEQ ID NO: 5724 - DNA, 435 bp, Homo sapiens
tttgcccacaacagtctcctcaacctgttccctcattccttctcgccagaatctatcaaggctcggcacaaaggtactctcccaggaggccttcctgaattcttctgtgaggcagactacttcccgagctgccccggcccttctccggccaagtctctccagaaactcatcccattcgttctcagatggaaggggacccacacccacgacaagcctccgggtttgcttaatgactcagacagcgagggtgctcggtaagccccaccagcccgcgccctactcagcaggtaatgacggagacctactaggtgacgggcgccgcggtagacgctgggataaggtccctgctccagggagcttacggtctattcactaacgtcaaagagcagtgagtgctgttacgtgtatgggagccaccagggtctccgcctgcct

SEQ ID NO: 5725 - DNA, 6997 bp, Homo sapiens
aaaatattttaattttttccctcttgggctacaaaagcccttaactttatattgtttccatgagagaataagttctcaggtacgtcctagctttcaaaatgttgtgatgaactactgttctatacaatagcatcgataaatctcaaagactgatactgagtgaaagaagccacagagaagaatatattcaactatggttccatgtatatgaaggttaggaatagaaaaaaactaatcttagatgatagaaatcagaatattgggtaacttgaagagagcagtactggcaggaaaggggcacaagggagccttcttgggagtattatgttctatatcctgatctggtagtttgacaatatatactaaaaatatatcaggcttacacttaagctttatgtacttttctgtatgtaaggtatcactttaaaaatatttttaatatataaaaatgggcctacccttttaaaatactgtattctgatttttttttctttttctttttctttttattttttgagatggagtctcactccgtcgcccaggctggagtgctgtggcgggatcttgactcactgcaacctctgcctcccgagttcaagcgattctcctgcctcagcctcccgagtagctgggattacagacgtgcaacaccacacccagctagttttagtaattttagtagagacagggttttggcatgttggccaggctggtctcgaactcctgacctcaggtgatccacccgcctcggcctcccaaagtgctgggattacaggcctcagccacgacacccggcccttctgattttcaaagtaatatttagtgttgggaaaaagcagaattatactaagaataaaattaaatcaaccataattttaccacctaagggttgctactgttagtattttgttgtatctcctttggggtttttcggtgtttttagaggagttgggaggagtcttactctcttggtctgttgcacaggctggagtgcagtggagtgatcatagcccactgcagccttgaactcctgggctcaagtgatcctcttgcctcagcctcctgagtagctgggactacaggcttgagccactgtgtccagctaatattttaaattttttatacagatgggggtcttgctgtgttgcccaacgtggttttagctcctggcctcaagtgatcctctcaccttggcctctgaaagtgctgggattacaggcgtgaggcactgtgctcagccatctatatccatttttaacatgaattagataactacattttgctccactccttttcacttaatcagttgaggttgcctttttaaaactatgatacagtaataaaattggtctaaaaaggcagataacagaaaagggcagttttatttctgtgacgttacatatacctaacactggtttcatacaacttgctccacaatgccttttaagtactaaacatattcagaggtcagggctagaagataacaaaatctatttaagagttagagctgagaagatttcagaagctttataaaggcatgccaggaaatgtctacaatatttcacagcttggaggaagcaggcaaaaagaaaatcaaaacaaagcttccaaatctttactttgcacggaggggaaacctatctcctgtgattgtagttgtattttgttgtataaattgacataagaatattcctgttgaatcgtgattttatccatggcagtgttttttcatgagttattttccttgtgtgtttgttgcagacccctgtaaaagagcccaacagtgaaaatgtagatatcagcagtggaggaggcgtgacaggctggaagagcaaatgctgctgagcattctcctgttccatcagttgccatccactaccccgttttctcttcttgctgcaaaataaaccactctgtccatttttaactctaaacagatatttttgtttctcatcttaactatccaagccacctattttatttgttctttcatctgtgactgcttgctgactttatcataattttcttcaaacaaaaaaatgtatagaaaaatcatgtctgtgagttcatttttaaatgtacttgctcagctcaactgcatttcagttgtattatagtccagttcttatcaacattaaaacctatagcaatcatttcaaatctattctgcaaattgtataagaataaagttagaattaacaattttattttgtacaacagtggaattttctgtcatggataatgtgcttgagtccctataatctatagacatgtgatagcaaaagaaacaaacaaaagccaggaaaacactcattttcgccttgaatatgtaaatgggattaattttgtcctgtgccttatgtggaaaggaacttctttggttttccttttttgttctggtggaagcatgtgcaggagacatatcatccaaacataaaccattaaaatgtttgtggtttgcttggctgtaattttcaaagtagttaattgaggacaaagggtaatgcagaagtgatagctttggtttgctgagtcttgttttaagtggccttgatatttaaaactattcctgccaccatttcttctccttggccacttcttccttgcgtctccctgcatgctgctttatttgcttctccctccccaaccacctcatggtatatttaagagtgaaagggacaaactagtaggtttgtcaagtttaatataaagcactgatgtaacttgctaggtaaacggaaagataagttctaactgcctactatccaatgtcagttaattggtgtcttcccccctcatttgctctcttccctaaaatgtgtcccagatgccttcatttgctgttttacttctatgttctgcttttcctcctctctttgttcccttcctgtctatccattgagtttatgaaatggaagagttaactgcatgcactagtgtttggagggtgttgtggtttgtctttctaattaggtgtatagcctattcactttcctagaataaatctcttaacctaaatttgagtagtctgcattttggcaactcctctagcagcttggtagcctagtacaggttgtttttttaaaaaaggaaaagcaggaaggaggagtgaattttattaacatgtttgccaaatgtattgagatttggcctctgaagaacactttttcagtgttaagtttctttaccttaagattcagaaatactttagaatattattaattttaagtcctgtctttacatccttttggaaaacttgtattaccatgggtttggaaaaaggacaacgaaaggcttttcatgtaaagataagatctttagctatctctaaccctgtccttttttcactgcattttttctagttttgcttcattgcttatcattaggatagggtaagtgaagtttgctatgctgctagcatcctaagatgatacctttgttgaaagaattgtgaatagcatgattcatttctagcagaggctgagtttaggacagcagcttccattgagaagtctttctgtgtcgtgaatagcattttaatgacctcttggctcacataagcaaacaacatagggacgtatctgctatgaaaatccacaaatttttcagatagtgccctaaaaacaattttatatgcctcactggttgttattcttaggttattcccacacttgactttatcattgtttactactagtaaaaagcagcattgccaaataatccctaattttccactaaaaatataatgaaatgatgttaagctttttgaaaagtttaggttaaacctactgttgttagattaatgtatttgttgcttccctttatctggaatgtggcattagcttttttattttaaccctctttaattcttattcaattccatgacttaaggttggagagctaaacactgggatttttggataacagactgacagttttgcataattataatcggcattgtacatagaaaggatatggctaccttttgttaaatctgcactttctaaatatcaaaaaagggaaatgaagtataaatcaatttttgtataatctgtttgaaacatgagttttatttgcttaatattagggctttgccccttttctgtaagtctcttgggatcctgtgtagaagctgttctcattaaacaccaaacagttaagtccattctctggtactagctacaaattcggtttcatattctacttaacaatttaaataaactgaaatatttctagatggtctacttctgttcatataaaaacaaaacttgatttccagctgtgtggtttggttttcatttatttatggaattggaagattacttctgaaaaaaatgtggaatcgcaaactcaaagagttgacaaaaatgggaaatcactgtcaacctatggaaaactggaaaggcaatttcaagaactgtctttgctgagaaactacattaaaaaatagaattatctctgggatcctaaagcggaatcatccttgtgccaaaataggagatgccacgatcctaatcacacctggcttacactagttggatgtgcctaaggccactacagctgaggtcacctgattcctcagggggaccaagctgggctcctcatactggagggtaaatccttgttttagcagcagctggcctcttactaagaaacaaagtattggccaggtgcggtggctcatgcctgtaatcccagcactttgggaggtcaaggcggacggatcacgaagtcaggagatggagaccatcctggctaacgtggtaaaaccccgtctctattaaaaatacaaaaaaattagccgggcgtggtggcgggcgcctgtagtcccagctactcgggaggctgaggcaggagaatggcgtgaacccgggaggaggaggaggaggctgcagtgagccgagatagcgccactgcactccagcctgggcgacagagcaagactccgtctcaaaaaaaaaaaaaaaaaaaaaaaagtattggctgggcgctgtggctcacgcctgtaatcccagcactttgggaggccgaggcgggtggatcacctgaggtcaggagttcaagaccagcctggccaacatgatgaaaccccgtctctactaaaaatactaaaagccgggcgtggtggcgcatacctgtaatcccagctacttgggaggctgaggcaggagaatcacttgaacccaggaggcagaggttgcagtgagccgagatcgcaccacagcactccagcctgggctatagagcaagactccttctcaaaaaaaaaaaaacaaaaaacagtatttcctgcttttgttatacatagcaacagccttgtctttatgtgtagggaaaagaaatgtttgatcctatattcaggctttattagtcaataataaagataaatatttgttgacaagattgtctctgctgaaagtatatgtagagtttttctcagatgcagtgattttaagaatcacatggagtgtttttaatgttctattccttccccccaacatacttgttttgttgggacctacaattctgcctttgctgggtgcagtggctcacgcctataatcccaacactttggaaggccaaggcgggtggatcacctgaggtcaggacttcgagaccagcctggccaacatggtgaaaccctgtctctactaaaaatacaaaaattagccgggcatggtgacacatgcctgtaatcccaactacttgggaggctgaggcaggagaatcgcttgaatccgggaggcagaggttgcagtgagccgaaatcatgccactgcactccagcctgggtgacagaacaagactctgtctcaaaaaaaaaaaaaaaaaaaaaaaaaacaaacaagattggtgtagggaaataggatatggtctccccccttaaatcgatggtctagtttagaaaacaaaagtaattcatcaagttaagcatatacaagagccaaataattgtaatctggattttaattgctgtattaatatatcaagttcagttggtgagaatgggattgcttttggggggaggagggacattaattggttcttcgaaatgtcgattcactggctagggcagatggggaggtcattgtaagaagagaccacagagactagacaatgacaggccctggggagtcatggtaaactcgagagtggcgagagcagtgtgtttgtggaaagcaagtttagatggatttgaataggagaaacaagggttctagaggtcacatgggaagtcgtgttaatcagggtttcaataagaccgggctaaaatggcagagggaaatgcagggttgaaggcaaaggtagtgtgtgaatgggggcgcggtgtatttctggtgagcctgctaggtgcttttttggcactgctctaggtactttgggttaggtcttcaacgtccttgtgaattagtacccaagaagaaacggcctcagattaagtcatttgcttaaggttgcacagccagttggtgctggagtcggattttgaaaccaggccaacaccactgtccctcctgtgttcacttcaccttatcacagttctcaggagggcctggggtaatgaacaggtggcagagacagcaggaagagtctggagtggttgtgtgaccatttagcccaaccttggcaccttctaacaaagagtaataccctcgaagtatacttcatttactactgtttctgctttatattacccctcagcatctcgcgcagaagaaagcaaagggaagcaatggggcatctgattggtctgggagctccagatagccagcaggtacttgaaggctgcaagccagcttgagagcagtggctggaactggaaggggtgtgcacactaccaatagcaagtgagcaagagagacccacaataaactgaaggttattacagtactacagtaggctctaagaaagtcccttctcccactttaagaaacagggctttttttttttttcttttttacttttaaaggaaacaattcatttgctagaaaaacct

SEQ ID NO: 5726 - DNA, 425 bp, Homo sapiens
tgttgtattgggctgtgtgcaggctgcaggttggacaaacttggtctagagttttccccaagtaagcaggcccaaatactaggtagcaattttttttcatacacatccatacacttagatgtggtgaagttgtgagttaaaacagcaaatgtaaacttccttcacattagaattaacttaaaatgaaagcaatttaaaacatcttttaatttaattatttggctacatgattcattctcttgcttcaaacattttaaaaggagaaaaaaaaaggatacagaaatttcccaccttgttccctttaattccctcaatgttaccaattcctcatttcccccttactccccaggtaactgatgtaattaatttatcagttattactctgagtaaatatgaatatatatttttgtcccaccccaccccca

SEQ ID NO: 5727 - DNA, 2098 bp, Homo sapiens
gtcaaggctcctgagacctttgataacataaccattagcagagaggctcagggtgaggtccctgcctcggactcaaagaccgaatgcacggccttgtaggggacgccccagattgtcagggatggggggatggtccttgagttttgcatgctctcctccctcccacttctgcaccctttcaccacctcgaggagatttgctccccattagcgaatgaaattgatgcagtcctacctaactcgattccctttggcttggtggtaggcctgcagggcacttttattccaacccctggtcactcagtaatcttttactccaggaaggcacaggatggtacctaaagagaattagagaatgaacctggcgggacggatgtctaatcctgcgcctagctgggttggtcagtagaacctattttcagactcaaaaaccatcttcagaaagaaaaggcccagggaaggaatgtatgagaggctctcccagatgaggaagtgtactctctatgactatcaagctcaggcctctccctttttttaaaccaaagtctggcaaccaagagcagcagctccatggcctccttgccccagatcagcctgggtcaggggacatagtgtcattgtttggaaactgcagaccacaaggtgtgggtctatcccacttcctagtgctccccacattccccatcagggcttcctcacgtggacaggtgtgctagtccaggcagttcacttgcagtttccttgtcctcatgcttcggggatgggagccacgcctgaactagagttcaggctggatacatgtgctcacctgctgctcttgtcttcctaagagacagagagtggggcagatggaggagaagaaagtgaggaatgagtagcatagcattctgccaaaagggccccagattcttaatttagcaaactaagaagcccaattcaaaagcattgtggctaaagtctaacgctcctctcttggtcagataacaaaagccctccctgttggatcttttgaaataaaacgtgcaagttatccaggctcgtagcctgcatgctgccaccttgaatcccagggagtatctgcacctggaatagctctccacccctctctgcctccttactttctgtgcaagatgacttcctgggttaacttccttctttccatccacccacccactggaatctctttccaaacatttttccattttcccacagatgggctttgattagctgtcctctctccatgcctgcaaagctccagatttttggggaaagctgtacccaactggactgcccagtgaactgggatcattaagtacagtcgagcacacgtgtgtgcatgggtcaaaggggtgtgttccttctcatcctagatgccttctctgtgccttccacagcctcctgcctgattacaccactgcccccgccccaccctcagccatcccaattcttcctggccagtgcgctccagccttatctaggaaaggaggagtgggtgtagccgtgcagcaagattggggcctcccccatcccagcttctccaccatcccagcaagtcaggatatcagacagtcctcccctgaccctcccccttgtagatatcaattcccaaacagagccaaatactctatatctatagtcacagccctgtacagcatttttcataagttatatagtaaatggtctgcatgatttgtgcttctagtgctctcatttggaaatgaggcaggcttcttctatgaaatgtaaagaaagaaaccactttgtatattttgtaataccacctctgtggccatgcctgccccgcccactctgtatatatgtaagttaaacccgggcaggggctgtggccgtctttgtactctggtgatttttaaaaattgaatctttgtacttgcattgattgtataataattttgagaccaggtctcgctgtgttgctcaggctggtctcaaactcctgagatcaagcaatccgcccacctcagcctcccaaagtgctgagatcacaggcgtgagccaccaccaggcctgattgtaatttttttttttttttttttactggttatgggaagggagaaataaaatcatcaaacccaaaa

SEQ ID NO: 5728 - DNA, 2037 bp, Homo sapiens
cagatttcccctttccctttgcatggttgactggctacctggccatcctcgtcggggcaggcatgaccttcatcgtacagagcagctctgtgttcacgtcggccttgacccccctgattggtgagttacaccctggcttctccctctggccaccactgccatttcctgtcatcccatggggctgatatgtttgtgttttgtgtttcccccaggaatcggcgtgataaccattgagagggcttatccactcacgctgggctccaacatcggcaccaccaccaccgccatcctggccgccttagccagccctggcaatgcattgaggagttcactccaggtcaggacttggggcacggggacaggggccctgggagtgggaccacccatggtcttgcaaactggtctctaacaagagccaggcttttctctgtactatccaaaatatggaactaatatgtggaggggaagccacgggtaaagttttcaggaccttgatatgagaacaatcaaaactatcagttctgagagaagcagtaagaccctcataactggtggttgtttcagcaaaagtggggtggccccttgatatagatgtggaaaaggtacttaggaagcacagacaccacctcccatctcctcactgcctcctatggggaactttacaattaggagaactccttggcatggaccatctatgttactttgtgcaagacctttgggatttgaatttatttatttatttttattttatttttttgagacagagtctcgcactgtagcccaggctggagtgcagtgatacaatctccactcactgcaacctccacctcccaggttcaagtgattttcctgcctcagcctcccgagcagctgggattacaggcacctgccaccacacctggctgattttttgtatttttagtagagacggggtttccctatgttggccaggctggtcttgaactctggacctcatgatgtgcttgccttggcctcccaaagtgctgggattacaggcgtgagccactgcacccagccggggatttgaattcttatctcaccatttacatactaagtgacctttggcaagtgatctaacctgagcgtcaattccctcatctgaaagatggaggacataacccctatctcattaggattattataaagatctgatgaggcaaagccatctgtgcaacagaaatagaaattcaggcatctaatataaattaaccgcatatgtcatcctaaaattttttagtagatacatttttaaaagtagaaacaggctgattcattcttcaataatgtatttgatctaaaccattatcactttaatatgtcatctgtcaaaaattgagagtctttgaaatctggtgtgtatttcatacttaaagcacatctcagtgtggacatgcggctagtgtattggacagtgctggtccacagcctgggcatggaaattggcaccttgggaaagtgaccaagcgcctggcctctggagccaggctcccaggatgtgaatttccacctcttccatctcccacctgtgggacttgaggagcctccattttctcatgtcaagaaataatggttgccactctgtagagtgttttttgagaattgagataatgcacagttgagtgctcctggccctcccagacacatagtaggtcctcatggaatccaggtaccctctgggctgagccataaggacaaagaagcctggaaggcccgagactgtgctgcctgtgatgcctgctagcttacctccccctcctcctccctactgccacccgcattgggcaacaggcccctcacctgtccaacctcttgtgttgcagatcgccctgtgccactttttcttcaacatctccggcatcttgctgtggtacccgatcccgttcactcgcctgcccatccgcatggccaaggggctgggcaacatctctgccaagtatcgctggttcgccgtcttctacctgatcatcttcttcttcctgatcccgctgacggtgtttggcctctcgctggccggct

SEQ ID NO: 5729 - DNA, 282 bp, Homo sapiens
cactgctaggagcaagatgggtcaccagcagctgtactggagccacccaaaaaaattcggccagggttctcgttcttgtcgtgtctattcaaaccagcacggtctgatccggaaatatggcctcaataagtgccgccaatgtttctgtcagtacgcgaaggatatcggtttcattaagttggactaaatgatcttccttcaaaggattatccaagtcatctactcaatgaaaaaccatgatagttctttgtacataaaataaacatttgaaaaaacaaaaca

SEQ ID NO: 5730 - DNA, 2098 bp, Homo sapiens; identical to SEQ ID NO: 5727

SEQ ID NO: 5731 - DNA, 2037 bp, Homo sapiens; identical to SEQ ID NO: 5728

SEQ ID NO: 5732 - DNA, 282 bp, Homo sapiens; identical to SEQ ID NO: 5729

SEQ ID NO: 5733 - DNA, 2852 bp, Homo sapiens
ggcaacaggagtccatggaggcagacacagacctagaggcaggcctggaagaagaggcggtgagtgctcactctcaggctgggtttaagagtgggatggacagcctagctcctctggttctccctggagctctctctgggtggggcactccctgcccctaattgatgggttgtgtcataggttctttctgcaccccagttccatttgtgcacggccacctctgcagaggaggtgggcagctacgggggcccttcctggcaccatgccccgctgggcagtggggaagccggctgcgtgtgttcctcctcggggcccactctgctcccatctgctggctgagcccagcctggctgcttagggtagggcaggagccctactggctgaaatctcccctatctcacaatgtcccacaggtggggggcctggggcctggagcctgggcctgcctccccgggcagggtcttcgctatctggaacacctgtgcctggtgctggagcagatggcaaggctccagcagctctacctgcagctgcggatccagaggcccccaggggtgagtgagattcgagtgggggagggagaggacagatgggaccctgggaaccatggctgccctcagagcagcttcagccctctagccaggccctgatcacctgtctctcctgtgcataggatcccggcgaggaggagtcgacccgagcccctttaccgtccccgttacacaccccaggcaatcgggggcaggggccatgggagctgctaagccagacagagcacacaggtgaggggccatcgtgtctccctttgtcctgcctgcctggggtcccaccagcaggtcctctgagccgaagcttgatggggtgtcttctggccctggccaacctgactgtctttctgaaggagcaaaggctgcttcacccccaaaggtggaggtgcccagtgccaaccctcccaggctgccagaaaccccagtggagccaacgtaccacttgccatcctcccagggacacaaggtaggggacaggtatatgtggggcaggtggtgggctggggtggggggaggggaggtgggggatgcatgggcaccctgggggccagcaactctggggaaatgacaggattgattcctgtttggagcaggcgacttgtcctggctgtggcgacagctgtctctgggagcttggtcgggggtctgagtgtggggagggctctgggtgacccctcatcctctgctcagcgggatatctcccactgggacaaggtcaaggtcctgctcaaccggatctgccggagaagccaccaccaccctgagccccctgcccctcctgatggctctgaccccaggtgagccccgtgcccagcccaggttagggcacggagaggagactgataagccaggatgctgagattgtcatgccagttgtcattattgtccccgcaaaacttgagaggcagtctgggaggggctgctagaagaaacagtagttaaaacaccccatttacagataaggaggcagggttctgggtggggttgggggtagttgcttttccaaagccgcacggtgagtcagtgacagctaggaccagaatgtgggaaatctgcctaccctagctcagcaacccctcaccctcaatgctgacatttaggccaccttccaggttcgtggggagagcaaggtggagcacaaaggatttcacagtgggtgaaggccatcatgcttcggggcttgtattgaatcgttctccaggaggaagaaataccaagtcatttaacagccccgggctgcgcccacacccagctacccaccagcagataaaccacgttctctcaactctagggccattgttagttttatttcccccttctagcctaatgtcttcttttcattccacaggatcgagtccagggacctccctgaaaggcctcagtgccgcccccaccggaagacctttatgccatcattagtggttaagaagcaacgagcaaaaaacctttctgtaggctgagacctctcggtgcacctggtgaccctgggtggaggggacttgctgtgaagtcttcctcgccctctgccctcttgctgcttctccacattgccaggaaaagctgctgacgcctgccctcctctcttgagtcgagggctgaatctttctcctctaagcagtctggtcaggaaccttggtttcttgagaggcccccaagatgccgcagctccagggctcttcctcctcaccagaaatccctgggcttccacaatgtgaactcactcattgtcaggtgtccgtggagtgtttttggcatggtgacctgtctgggcccagcatgttgcagatgtgtatttatgcgcaatggtatgcatatctctgtgtgactgtcagtgttgcaagctggctggatccaaccatctcttctgaaataatgcatccaaagggttgatattctgggggaggtcactgcagaaggatggaactgacctttattccccagtgggcagttactgagctttcctcctcagagccatgctggcagccctgggacagagaacggtgtggctttggctgcctctgcatggaatcttgccccggactcctgaagactgcacaaggaatgaggaagatcagggacaacctgggaactgaataactttcaaagccagtgctcagcttctctgctccgtactagcgtttacaggtcttaattcaaaccagatgcctgtactagtttttagaccccaagtcaacctttctgagccacagcttcccgctgggaataatgatgcctgccctatctacctcacagacttgttatgaggataaagtgagattaaactgcctcaaagtgctttgtaaa

SEQ ID NO: 5734 - DNA, 2852 bp, Homo sapiens
ggcaacaggagtccatggaggcagacacagacctagaggcaggcctggaagaagaggcggtgagtgctcactctcaggctgggtttaagagtgggatggacagcctagctcctctggttctccctggagctctctctgggtggggcactccctgcccctaattgatgggttgtgtcataggttctttctgcaccccagttccatttgtgcacggccacctctgcagaggaggtgggcagctacgggggcccttcctggcactatgccccgctgggcagtggggaagccggctgcgtgtgttcctcctcggggcccactctgctcccatctgctggctgagcccagcctggctgcttagggtagggcaggagccctactggctgaaatctcccctatctcacaatgtcccacaggtggggggcctggggcctggagcctgggcctgcctccccgggcagggtcttcgctatctggaacacctgtgcctggtgctggagcagatggcaaggctccagcagctctacctgcagctgcggatccagaggcccccaggggtgagtgagattcgagtgggggagggagaggacagatgggaccctgggaaccatggctgccctcagagcagcttcagccctctagccaggccctgatcacctgtctctcctgtgcataggatcccggcgaggaggagtcgacccgagcccctttaccgtccccgttacacaccccaggcaatcgggggcaggggccatgggagctgctaagccagacagagcacacaggtgaggggccatcgtgtctccctttgtcctgcctgcctggggtcccaccagcaggtcctctgagccgaagcttgatggggtgtcttctggccctggccaacctgactgtctttctgaaggagcaaaggctgcttcacccccaaaggtggaggtgcccagtgccaaccctcccaggctgccagaaaccccagtggagccaacgtaccacttgccatcctcccagggacacaaggtaggggacaggtatatgtggggcaggtggtgggctggggtggggggaggggaggtgggggatgcatgggcaccctgggggccagcaactctggggaaatgacaggattgattcctgtttggagcaggcgacttgtcctggctgtggcgacagctgtctctgggagcttggtcgggggtctgagtgtggggagggctctgggtgacccctcatcctctgctcagcgggatatctcccactgggacaaggtcaaggtcctgctcaaccggatctgccggagaagccaccaccaccctgagccccctgcccctcctgatggctctgaccccaggtgagccccgtgcccagcccaggttagggcacggagaggagactgataagccaggatgctgagattgtcatgccagttgtcattattgtccccgcaaaacttgagaggcagtctgggaggggctgctagaagaaacagtagttaaaacaccccatttacagataaggaggcagggttctgggtggggttgggggtagttgcttttccaaagccgcacggtgagtcagtgacagctaggaccagaatgtgggaaatctgcctaccctagctcagcaacccctcaccctcaatgctgacatttaggccaccttccaggttcgtggggagagcaaggtggagcacaaaggatttcacagtgggtgaaggccatcatgcttcggggcttgtattgaatcgttctccaggaggaagaaataccaagtcatttaacagccccgggctgcgcccacacccagctacccaccagcagataaaccacgttctctcaactctagggccattgttagttttatttcccccttctagcctaatgtcttcttttcattccacaggatcgagtccagggacctccctgaaaggcctcagtgccgcccccaccggaagacctttatgccatcattagtggttaagaagcaacgagcaaaaaacctttctgtaggctgagacctctcggtgcacctggtgaccctgggtggaggggacttgctgtgaagtcttcctcgccctctgccctcttgctgcttctccacattgccaggaaaagctgctgacgcctgccctcctctcttgagtcgagggctgaatctttctcctctaagcagtctggtcaggaaccttggtttcttgagaggcccccaagatgccgcagctccagggctcttcctcctcaccagaaatccctgggcttccacaatgtgaactcactcattgtcaggtgtccgtggagtgtttttggcatggtgacctgtctgggcccagcatgttgcagatgtgtatttatgcgcaatggtatgcatatctctgtgtgactgtcagtgttgcaagctggctggatccaaccatctcttctgaaataatgcatccaaagggttgatattctgggggaggtcactgcagaaggatggaactgacctttattccccagtgggcagttactgagctttcctcctcagagccatgctggcagccctgggacagagaacggtgtggctttggctgcctctgcatggaatcttgccccggactcctgaagactgcacaaggaatgaggaagatcagggacaacctgggaactgaataactttcaaagccagtgctcagcttctctgctccgtactagcgtttacaggtcttaattcaaaccagatgcctgtactagtttttagaccccaagtcaacctttctgagccacagcttcccgctgggaataatgatgcctgccctatctacctcacagacttgttatgaggataaagtgagattaaactgcctcaaagtgctttgtaaa

SEQ ID NO: 5735 - DNA, 590 bp, Homo sapiens
ggcgcaggccgtctaagggattgatggatgtggcctgccagggctttgcctaccacacagctcagagcacgggttccctgtcgctaacaaccgttgcgaagggaatcccatccacacatctcccagacagctggggccatatccgggctgcccgtggctgtccagtgaccgcccttcctcactgctccgggacacttctccctggggcagtgctgccagccttcaggaatgctgggggtgttgggggtggcctgcccagcctgacgctgactctccatgcagatggggctggcgagggcctggcacggggctgcatagtgcctggagtcaccagcacctacagacggatccccgacgctgcccacgggtgctcatcctgggagagaggtgacaagttcagaggtgtcggcagggaggcactctttctcaaactggcctcccgggactcaggagtggagatggcagttggggacagccccctggccgccttaccgggcctttctcaggactccctggactttgaatcctcagggagttctgagccccccgcccaggtaggccgactcctggccagccagaagctgggggag

SEQ ID NO: 5736 - DNA, 159 bp, Homo sapiens
atggggaggtcggaggataagggggggctgggattgctaatggggactaaaatggccagtctcctggcaagattttgagcaggtcatttcattgaggcctcttagatttcatatttgagaattagggcactgattcctgactggctaggcatggtggtc

SEQ ID NO: 5737 - DNA, 590 bp, Homo sapiens; identical to SEQ ID NO: 5735

SEQ ID NO: 5738 - DNA, 159 bp, Homo sapiens; identical to SEQ ID NO: 5736

SEQ ID NO: 5739 - DNA, 9689 bp, Homo sapiens
ttttttcagggtgaagaaaatcttaaaacaagcatttgtacgtttttagcagttttatcacatttagacattattactcaaaatattccagaaaaggtaagtttgtttgtaagaatttaaacttgactgtaaaaaaagaattgtatgtatttgtaccaattttttatatgtagagcattcctgtgaatgtttgcaatttttccctttcctttccactgccctgctaatgtgcacatgtattagacacaaatacccagtaaatgggaattacccatttacatgcatacacactgaggtgtgcttgagtacataccaaatttatagacaaactactgggtaagtttttgttgatacttgtataaaattaataattatttataattcttaggattaggattacttaggattctttaaacaggacttcccttaccttctttgactgaatggtagttatttaacaaatgctcgtgcaaagaaacttatggccagactattaaaagctgttgggtaattgaaggtgatataaaatgactgtcatcatttggagtgtgcagtacagttacttcatgttcctcaggtttagaacaatttcccctgtaagttctcacacagataggcagaaatcataactaattttggttaatcactatggcagccgttgaagaatttaagagaacctgccagtaagatttggaataagattctatattattgcatccacagaaaagaatgtactgatatactataaactctaggagaaaacttaattgaaatagtgttattaagtgttgaaagtaccataaaaatataagggaaaataagctttcctagaatttttcagtgttctagtttttaaacagtgatgttttttattaacctatttcatccattcaaagacaggcctttctccacaccacattttcctctaaaatcatgataacacttttaaattgatggtgtcttccagtgtgtatcagccagatggcagtgtgttacagttccaggaaaactcgttcacatcttccgtaagatcaagaaggctctggcatcagataagatcaaatgttgtctttctgttttaaatatgtgccgcaaagagatttgcttacaatctattgagaaagctaaaacagagcagacattgtcctgttgcggggtagatgaatagcctaagaatagtttagacaaattctgaaaacgaatttaccttagaagatgttcatgttagatctggtaaaagtaacatgttatttttctgtcaagccctttttgtacttgccgtttattacatattttagatttattttttattttcgaaacatccaaaaaggaatgctaattagtgaaatggaagaatttccatttcaacaccttaggaaaaaaaaaactgacttgacatacctaagaaaaggccaagttgatttactttgtcagtctcttcatttgtgatacgtaaagtccgttgttacctagataaatgtaggtttgatttcttggaagcaatcacttaagactttccattttcttcaaagcatcttacttaacctgcatgtgggatctgtactgagcaattagagattcaaaacaactgtcacacacgacagaggtggtaaccgcccaacaggttcacctcttccgccgcctacacagagccgatttatcaagacaggaattgcaatagaggaagagtacacagagctgcttgtgcaggagactggagtcttattagtactcaaatcgatctccctgagcattcggggatcagagtttttaaggataatttggtgggagggggaaggccagtgagtcaagggtgttgattggttgggtcggagatgaaatcataaggaattgaggtgtccttttgtgctaagtcagttccagggtgggggccacgagatcagatgagccagttaatcgatctgggtggtgccagctgatccgtcgagtgcaggtctgcaaaatatctcgagcaccgacataggagcagtttagggagggtcagaatcttgtagcttccagctacatgactcctgaaccataatttctaatcttgaggctaatttgttagtcctacaaaggaaatctagtccccagacaagaagggggtttgtcttgggaaagggctgttatcatctttgttttaaactataaactaaactaagtttctcccaaagttagttgagcctacacccaggaatgaacaaggacagcttggaggttagaagcaagatggagttggttaggtcagatctctttccccacctcagttacaattttgcaaaggcggtttcagaatcagagcacgaagtgttcctataaaaggaaaaaaaaaaaaaacctttcttaattatgctcatagttgtgtattgtcctgtcagcttgctcattgtgtaaaatgagcggacatgagaattcacgagcagagctttttacactgatatgtatgaaagcatcatttacgtcctgaaagccccagccgagcgatcactggcagtgccaacatttttgagtgtgggctccataggaagcactgttttccctattgagaattatagtgggtttttttcatttacgagtaatgtatacctagctccaagatcttggttgctaacaccattctccaataaaacgaaccagggatcgctggagaaatagctgattctaaaactagggcagaaagtatacaagatgagcctggagcatcttgtagagtcagagagcaaggcagaactttatacatacagtgatgtgagatgggcatgcagagggaagatgttcccagtggctgaagctgaaacagtgtgagcaacaaaataaagcagtgttggatcacaacccaaagaataaaataaatatcctcgagccccacaccgatataaataaatgattgaatcaataaatgagtccaggcactgtggctcatgcctgtaatcctgcactttgggaggccaaggcgggtggatcacttgaggtcaggagttcgagaccagcctggccaacatggtgaaaccccgtctctactaaaaatacaaaaattagccaggcatggtggtacatgcctataatcccagctactcaggaggtgaggcaggagaatcacttgaacccgggaggcagaaattgcaatgagccaagattgcaggactgcactccagcctaggcgacagagtgagactccatctcaaaaaaaaaaaaaaggatggacaagacaaatctcttgtaaaaaaaattacaagtaatttttatagaagctctgccctgagggagggggagcgtgacttctcactccttcagtgtgggctgcacaagtgacttccttccatatgggatcgttataacaaaagactgtaacaagggctatgggagttataagacaggaattgtggacaaaaaccagtgtatatcataacatcacaccttgtaatgttggcagtacagtcactgacctttgataaatgttgatgacatgttgagtaaaggaatgagagaaagaggattgtttatctctgtttttatccttctcagagaaacttagagtaacaagtgtgttatcagccatgctgatgcctttggtaaactattgtgtgaatatggttgttttgaattggtcagtagaaactgggctgccaggcgcagccggtaagcatttccatgtgagccttaggggagaagtgcatttggtaggagcatcaaaatagcttctgatatttcattaaaagtttgggtccgtctggttccttcattagtatatgtcacttcctttgaccttcagtgtctgttgaaccatgtgattttagaaagcaagggattgcttgacatctccaggctgtgaagactaaagttcacaggaaaagactacaaggaaatttaaacagttttattattttccccctcatttcttaattttcctgccactactcagtactgtgtgggtccaggatcaccattagggaagacagagtagctcagaaatcagtagtgaggaggaggacagcactttgtgtggtatcttgctctaggagcattttcaagccatcagaagtgggactcttgaagactatttctgactttctcagcacaaattaagataataggagatggaggctccatttgaaaaacattttggttgtataatggttagcataaaacatacttttttcaagttaactcaggtactagagtatggggggcggggggaaatgtactgcagcattaatgaaaactagagctgggagaatgtgtttttccttgagtaaattgcaaatgcctgtgcaccgcatttgaccaggagggaagaatgagaggccctggtagcaaagccagtggaagaagttttactaggagcagttgtatcattcgtgtactttttttgtgtcatacaagtgagagtaaaatggtccatgtctgtgttttgaggaattttttgcctttcttttcagaaactaattctgaagcaagcccttatagttgtgctgcagtggtgtttcaatcacaattttagtgttcgactgtatgctttagttgctcttaagaaactctggactgtgtgtaaagtgttaagtgttgaagaatttgatgccctgactcctgtgattgaatccagcctccatcaagtggaaagcatgcacggagcagggtaaggagccctcgtcaacctcatcgccctcactctcctccagcagggcccacagggagggggcagtgcccatactgtgtcagcttctccttccacatcctcatgctgccgtcctggagcatcgagggcttggactgggccaggcctaagcagctcactttggggtgtagttaattacagttcattgtcagctccaccttgacctcttattgcccttttatcctcaatcctttattgtacaaataatcttctacatacttgtacctgtttctcttcagtatagctaaatgtcatcctttgttgtttgagaactgcttagaagtggcacgacctgactttaaagacatacttttaatctctcagctatactagttatagctaaaggcttttttcttttctaagagaactctcctattccgcagacaaaatcatacatggaagctcagtatcaagcaagtgacgtggatggggtgagggagcggtgcaggacccagtgtctgtgaagcccccacggtggttcccatgtctgcctctctttccccgcacctgtcacggtgcagaagcaggctgcagtgtcataagcatctccaggtctctgcgcttgtttccttatctctgaggtggtgctgttttgcctttttattattatcatagattattgccatccaggaattctggattttttttttaaattttagagacacaggcaatatcaaccaacataaaagatttttcatcttaaaagctgaaaaagcacccactaatttatatacacaaatggttaagtgttggaagcagcataataggcaaatgaaatagcatttggaaaaccagtaacatgtagaagtcttggtcgtgaccattaagttatttgtacatggtacaaataagactgagtcattgtgtagcttcatatggggctggggcgagggtacctccctggcccgcaatgtacctttctacctcccttcacttttgatgcatttgttgaaaagaggcatttgggcattaagtgggtaagggaggttttaggggcttgggagaaagatatttgataaatacaaataaatactaaaatggagaaaaaagtaaatagcatgaaataaaacaggggagtagcaggagaaaaagagagttagctgtggggagatgggttccagaggagggacagagagcagaggcgggaatggattcctggtacatcgtgcacagttctgtatactggagaatgaccttcctgtgcctggcccagcaaaggctggtcatcaaaattagtcattcactgtagcattgccagggacccctacaattccaactgtcctctgaaaactaaaaatcttgatcttttcaagggaccttaaatgtcttatttctccttggtgtatggtgtatttcctattatttggtgaatacatggctgagtttacatgtgtagatttgaacattaatatttctcaggatcgcatttgcattatcatgcagtaatccaaactcaagctaccaaagttgctgctaatcatattttattatgtaatttaatgaacttacgtgctgtttgtgtttgatggttagagataggtaaccaggggacagagggtatagttaccccatagactttcagcccttccttaatggaagggagtttgagggaattgccataatttaacacgcagataggcatttgtcagcttgtagctgtctctgtgattcgatggtgagtgattatttggtattgagacatttcgatcctggttgttgatcctattctaaatttgttggtagctgtgttttgatttctaaaagcaattggctccagtcatattttttattaagcaataaaacgcacttttaaaaaataactttaaaaatctcagtaccaggtaggagataaatagccaatcaaaataaggcatccggctgggtgcagtggctcatgcctataatcccagcactttgggaggccaaggtaggtggatcgcctgaggtcaggagttcgagaccagcctgaccaacatggtgaaaccctgtctgtctctactaaaaatacaaaaattagctgggtgtggtggcaggcgcctgtaatctcagctactcgggaggctgaggcaggagaatctcttgaacccgggaggtggaggttgcagtgagccaagattgcgccactgcactccagcctcggcaacagagcaagactctgtctcaaaaataaataaacaaataaataaggcaccctgggcattaagccacctctgttctgtgattgcatacctccttgggatcggcttgtgacaggcacaaggccaggtgctggggcttagccaggtagatgagcctctttcttcatgtgactcacagtcaaatgggaatagacatcaagtaatcagagcaattttttaaagttttaaaataaatcacagaaaagtaaatgtgatgaggaaagttttaaaataaatcacagaaaagtaaatgtggtgatgaggaaatacagactgttcagtctgggtggtttagggaaagcctttctaagtaacatgatgtttacattaaaatctaaagcatgaataggagctaggtcaatgaagactgaaggaaagagatttctgtgcagaagacactgtgtttgggaacggccagccccacttgatttgcccagagctttaactaaagcaagcttggtctggctgagggaagcaacagagcagtcccaagatggagggagccagggccaggcttgggttgatgttgagtgaatggggaagccagcaaaaagttaaacttgagaatgacgtcatccagttttcttttgcattaaagtgtgaagagcagatcggaggtgagcaagagagagtgggaggaaaattgtgatttagattagtatgagattagtagagggacagagaaatggacaggctttgaggtaaggtaaacaagggcctaaagtactgactggatttatcaagagccattcgatagcataattaggggattgaaaccaaattaaaataggtacaagagggggccagctgcagtggctctcgcctgtaatcccagcactttgcgaggccgaggtgagtggattgcttgagcccaggagttcaagatcagcctgggcaacatggcaaaaccccgttctctataaaaataataataataaaaaaaagttagcggggtatggtggcatgcacctgtagtcccagcacctcgggaggctgaggtgagagaatcacctgagcccaagaagttgaggctgcagtgagcggagattgcaccactgcactccagcctggcaaccgagtgagaccctgtctcaaaaaaaaaacaaacaaacaaagtccaaatgtggataggatgatacattaacatatattacatcagagtggtaggtttactggtgtctataattttctttacctgaatattcggaatatttaaaatatttcatgtctttaacttttcaaaaaatgggtgatgaaggtgagacagagtcaacttatttagaaaattctctcaaaaaatagtatattagaaagttcaacagctagtggtgggggtgctgtcaaaagagggcttctgtttcatttttggtaacattagttgtttttaagtgatactcatagtcaggaagttgaacagtgcagaaaggcatcgaatgaaaacgagacagtctccttccttctcccaccaaaggtgaaactccagtaaacttgcttttcttttaacagctacctaatattccatttgccttaggatatcgcttgagtccattactgatggacactttaataaggttttgttttgttttttaagactagatacaaaagcccttttgaaaaggctgaaggaaaggctagaatagagaagaggggagatgcggaagttgggggagatagggcaaaacccaggggaatgggatctgttgcggggcagggtattgccctttgaagagagactcttgacagtgaaggagaaaagaggacaggtgggtaaggaggtggcaggaagaagaaagatctctcactcctgtctcctgtgatgtgtgaggcatggctgtctgctgatagtgagagggttggggagggcataggaactccagggagtgaagaagacacactggtcagggcaggagcgtgatcttgccagaaaaatgtcttgaaattgctgcttagtttatgggttgatgatcatgaattttatctgaaacctgcctgccatattgtataacttttatccctaccttttttgccttttaaaacataaacttgacaacagatgttttaaaaatttaaacgctgctcatagtaaatttgtttggtttgtgaaagtaggtacaacttggctgcatggtatgagtctttggagtagaaaaggtgacttttatgtaatggttttctctcctggaaaaaagagttttctgccagacataggtttaaggttccatttcaaaatgtgaaatttattaagtgtcagtttttaaagtatgtattgatcttggagaggtgtgtataaatcttaggataaagttcataaaattttctgttccttctcaactctgcagccaccctttaagatactgaattgattctcccctcaccagagttgtttcatttgtctgtggctcataccatatttttaatccttaggaatgccaagaagaattggcaacgcattcaggagcatttcttttttgcaacatttcacccactcaaggattattgtctagaggtgagtagagaatatcatttgtaaattctctattgtatctttaatcctgatgcttcctttctgcttttgttgaagggttgtgattagggtaaagtttttttcttgcttacaaacatcaccttaacattttaaagttctaagtttaactttgtcactttatgcagatgacttgctttcatttcactcttaagcagtgaaaattggctagtcattttcactttctatttctcaggcagtgtctggcttgtaaacaatggaagggaatatttaactctaaacagaaatctgttctgacattaaaaggaaatgagtgagaacatttgtgcag

SEQ ID NO: 5740 - DNA, 623 bp, Homo sapiens
ttgttttttttttgtttttattttattattattatactttaagttttaggttacatgtgcacaatgtgcaggttagttacatatgtataaatgtgccatggtcgtgtgctgcacccaccaactcgtcatctagcattaggtatatctcctaaagctatccctccccccctccccccaccccacaacagtccccagagtgtaatgttccccttcctgtgtccgtgtgttctcattgttcagtttccacctatgagtgagaatatgcggtgtttggtttttcgttcttgcgatagtttactgagaatgatgatttccaatttcatccatgtccctacaaaggacatgaactcatcattttttatggcctcatagtattccatggtgtatatgtgccacattttcttaatccagtctatcattgttggacatttgggttggttccaagtctttgctattgtgaatagtgccgcaataaacatacgtgtgcatgtgtctttatagcagcatgatttatagtccttgtgtatatacccagtaatgggatggctgggtcaaatggtatttctagttctagatccctgaggaatcgccacactgacttccacaatggttgaactagttta

SEQ ID NO: 5741 - DNA, 1591 bp, Homo sapiens
  SITE (534): n equals a,t,g, or c
tttttgacacagccctcaggagatcctgagaatatgtgcttgattgaagacttttgaacagagcagtgggtgtctggggaagaacactctggtggtgtggtacaagacagtgttaagaggaggcgtctggagcagaaggatgagctgggaggctggcagggccctacatttatgtggtcaaaacctagggtgtggtagcagcaaagatgaggaaaggaagggatggtgggccaggtggctctctagatgggaggtgtccgggaacttgcaggtctcaagcctgggtgactaggaggatggtgcgcaaaacaggaaaggcaggacgcggctgctgggttcctttctcgagtgcacgcagggctgaaaggaggggagctgagatgagaacggcccttttccccactgaatgctgcctgcccatgtgtgtcgtcttagctgttttctatttgcccatcgtgtttagtagaataattgaatctgcagacagttttgactagtccattttgcctctcactccaccccgctgcctctcgngctttctctctctcttccttacctgcctgctgccagctccttgcctcccctctgattactgcgcccccgcaataactcactgtttgatcttccacatacgggaacctcgaaacccagctactgtctgcccagcagggttgaagtggccagggtgacccaggccatgtcctgcactgattgtaatcctcctctgcgcctaacacagagccttacgtgtataccgagtagaggagaaggaaggatgtcaaacatgtcactaccaccccccagtgcatgttggtctccctcacgctggactgtggcaggagtcttccaaaactgctctcagtgccccatcccctctgtgtgcaatcatatcgttgcttacttaaccaaccattcatctcttagggcctgagttctgttacccagcctcctcagaatcttcagcagttcctcatttccataggggaaagccagctgtttatttcctttacttatgcaacgaataagtcagtgtcagatagtatttttgttgataaagccacagcggcgagcaaaacttttggtcctgcttcctgtgagctgactttctgcaagggagagagatgataaatgcacatataatatagttgagagtgatcagtgctgcaaggaaaagcagagctgaggaaggagcaaatggtggagagggaggagagggagtggtgctggcctagacggtcaaaggttgctgtggtaaggggacactggagtttttatctgagtgaggctgggtgcggtggctcactcctgtaatcccagcactttgggaggatgaggtgggctgactgcttgaggtcaggagttcaagaccagctcgggcaacatggctaatccccatctctacaaaaagtacaaaaatcagctgagcatggtggtgcatgcctgtaattccagctactgaggagactgagaggcaggaggagcacttaagcccgggaggggaaggttgcagtgagctgtcatcacaccactgcactccagcctgggcaacagagtgagactctgtcacaaaataaaatataaataaataaaa

SEQ ID NO: 5742 - DNA, 1906 bp, Homo sapiens
ggggcaaatgccattgaaaccgctagtcttatttcctttctacttttctttggcactcttactgcctgtaaggagtagaactgttagggcacactgttgctatacagtttaactcccattttcatgttttgtctttcttttcccatttctggggcttacctcctgatacctgcttactttctggaagtagtgggcaagtaagatttggctcttggtttctaatttttaaatttctgaatactgccctagtctgaacttggcctttatagattaatctttgcttcacatttttagtgttgtatttaaactattttataatttaaaaatagattctaatctgaagatacttttcaagaaatattattaactgatgtcatcctcatcccagcagctcatctgttaggaatgaagttgagatgcttctattccatgtttttgtatttgggaaggattcaaagttgaaggtttattgtcgttgggtttttcagatggtgacatgtaaactcaggatagcaaaccctaatgttcacacagtgctctgcctctgcatctcagttgggatagttgctccttttgagtgttttaatcatcgtataactaatcatagtgccaagaagttcataatgtgttatgtagctaatgtcactgaaaaacagtcctaccattttaggtaagaccaaacagagtctctaacccaaggacttgttacacctgacaacctatagtatatttgctttttctcacaaaatgaaaccaattttgccgaaagctagctgggataataggatcatcacaagttgcagtttctataactaaaattagattgaaatctcttctgacctagaacattttacttcaggcattcagcagatttcagaaagaattaccttattttaagttagtttctttgttagtttactgtgtgtctcttattcaataaacaagcagaatttgtgtcctgccctatccatgtcttaaagatgagaagttggatccactgagttagtttcattggggcgggggaaagaactgtaattaaacttgtttaatccttattttgtattgtagctattttttgtaaaagcaacttaaaatcttttaaaaattttatagtgacattagagacaatggtcatacaaattatcacataaacatggacttgaaaaattaggcttttcataaaacacatcacatgtcattgactgctttttagaaatacacttccaaggcagtacatctgtattgctactgaaaagtgccatttcacagaacacagacttcttcttgctctctgacatcttgaaaacatctgtttttcttttgtaatacaaaactttgtgctcaagacaaatcttacatgaaactctcataaaccatgaaaatgtagctggccttcgggccttaggcatgaaataagcatgaggaacatattcccctaacttctacccccagcccagcaagttatcctttaagaaatctcctaggaattctggagtttgaaaacaattgctctatgttattcctgcttccagtctctaagtaacaagggcatttaaaagcatagtctcttaaggtccactatagtggttctttatttaaggaataactcagctgggtgcagtggctcacgcctgttatcccagcactttgagaggctgaggcaagcagatcacttgaggccaggagttcgagagtctggccaacatggtggaaacccatctctacaaaaaatacaaaaattagccaggtgtggtggcgtgcacctatggtcccagctatttgggaggctgaggcaggagaattgcttgaacctgggaggtggaggttgcagtgagccaagattgtgccgctgcactccagcctgggtgacagagtgagactctgtctcaaaaaaaaaaaaaaaagg

SEQ ID NO: 5743 - DNA, 1237 bp, Homo sapiens
gtagaatgccatggagttaatagcttctgtgatcctacatgttccaagataactgcagcagtccaaaaagccagtttcctttctggtgtttgtgggcatacactttgttctgctcctgagtaagtcacactttgtcttccaggtcctctaggatccctgcaatgttccatttgttgcctgggcattggagtaatagcagtgcttggtgctacagaaatagatggatggaagttgtggttactgtgacaccaaaaacttgtcccctgagctccctactcctctttctcctatattttttggtaattggctctgtcattcacctcactgcaggattcagaatcctggtactgggtcttgtatttctctttttcccttaccctccttatccaaattgtcaccaagttctgcttcatgctctcatgatttctcacctgagttaccctagtagcttccaaatagggccctctgatttcaaccttggacactcccactatcttttatattatggaaagatctaatcatgttaccccccatttaaaatccctcagagagcactgcagatacaattcaagccagttagcttagtgttaaggttttacatgcatttctgcagccatctgcccctattcttgcaccctaataatgccaaacttcttttaggccttaatttcatcatctgcaaaatgaggataataaatagtacctacttcatatgattgtaataaggcccctcaaaactgtttcatgcctcttttgcccactgcattaggctgttctcacattgctataaagaaatgcctgaggctgcgtaatttataaagaaaagaagtttaattgactcacatttctacaggctatacaggaagcatgatggtggcatctgcttggctgctggggagggctcagaaaacttacagtcagccgggcacagtggctcactcctgtaatcccagcacttggggaggccgaggtgggcagatcacctaaggtcagaagttcgagaccagcctgtccaacatggtgaaacctcatccctactaaaaatacaaaaattagccgggtgtggtggggcggcacctgtaactccagctactcagaaggctgaggcaggagaatcacttgaacccaggaggtggaggttgcagtgagccaagattgcgccactgcactccagcctggacaacagagtgggactctgtctcaaaaaaaaaaaaaaaaaaaaaaggaagcaagaaaa

SEQ ID NO: 5744 - DNA, 2853 bp, Homo sapiens
cttggccgcaaggtccccctttgcccagtcggcggggaggaggccgtatttctgctggccagagacgtcgcgtccctggctgggcattcagtcacccccaggaaaggaggcaagtccacgctgggagttagaaggcatcgcctctaatccaggtttcgccatctcctctgctaagtgacgtccagcaagtcacttcactttcaggacctcaaatctcctccccagtagtaaaataggggtaataaaaacagctacagcggaagactgttgtgaggcacagagaaagggcttggtcattggaagcgggttccaggttctcaaccttcatttccttcacggttgaaggacgccaaagaaagcggaaagggtgaattttcttgaaatctcagttttggggaatcttagcgacgagtcgcggacctcagcttgtccggcgctccaaaacttccggcaggcggaccggaagcactgaggcgggaagggtggtagaggcccctcctgccggaacccggggggcggggctcgtggctgttgcggatggggcgtaggtgggcggtgcgcccacagctgcctgggtaaggcccaagatggctgtcttcgccttagtactcgtgtgaagttggcggggacggttcctgtcatcttcttgggcttatttggtgtgctgttgaaggggggagactagagaaatggcagggaacctcttatccggggcaggtaggcgcctgtgggactgggtgcctctggcgtgcagaagcttctctcttggtaagtggctgatgtaggcaccccgataactgcttcgtagtataataggcggctcagattaattccctcccttccccatccccaggtgtgcctagattgatcggtataaggctcactctcccgccccccaaagtggttgatcgttggaacgagaaaagggccatgttcggagtgtatgacaacatcgggatcctgggtaagacttgaccttcgacgtggtacacaatttcagaatggcaattaggctgtaacgactatcttttcctcctgtgtagagagtggtactgtgctcaatagtaagagcaaacacttatgtagctgtttacattgtgtttggcactgttctgagtcccctcgtataatttttacttcataagtaaaaataaacagtttttccaaagttaataaatggcagcatcagaattttaaccccaagcagtctggctccagagtctgtgctattgttctgtactgtaatgttccttgtctataggtgctgctcagcaagatgcaaccgtgggttgaaagcttagctggtgtaggatgagttctcttgtcttggatctaatgtgttctctcacattacacaggaaactttgaaaagcaccccaaagaactgatcagggggcccatatggcttcgaggttggaaagggaatgaattgcaacgttgtatccgaaagaggaaaatggttggaagtagaatgttcgctgatgacctgcacaaccttaataaacgcatccgctatctctacaaacactttaaccgacatgggaagtttcgatagaagagaaagctgagaacttcggaaaaggctcatctgtcaccctggagaagggaaactgtacttttccctgtgaggaaacggctttgtattttctctgtaataaaatggggcttctttggaatttgatagccacatacttttgttttcctctagatgctgcctctactcatgtagactatgaagtcttgactcatcctagatcttaggatcttaggtttgggcttcacaccacttgccttttacagtctagctatacctaattcctttaaaaagaaaagttggtgagaatgttattggcgctttttgacataatgctgttatgttaatagtgtttctaaagagccttccacactgaaatgaaatataagagaaaaatggagtcatacttctgtactactctcataaaatatttattaggcatattctctgagtaggaactataggaaaaacaaaaaagtgtgaggtgtcctttccatttaaatatgaaacattaagtaccatatgaatggtagagatggcggatactaagcctgactggtcatcagttttctgggtgttttaacatttcaaaagcctagtcctaacccctaaagattgatcagtagagctgagttgagtctagggcatctatgtgttttgttcttttttaataataatttttaagaattacagctgggcagaatggtgcccacatgtaatcccagcattttgggaggctgaggtgggaggattgcttggagacaggaatttgagactggtctgggcgacatggtgaaactccgtctctactaaaaataaagtggctgggtgcggtggctcctgcctgtaatcccagcaccttgggaggcggaggggggcggaccacgagctcaggagatcgagactatcctggctaacacagccctgtctctactgaaaatacaaaaacaaacaaacaaaaaaattagccaggagtggtggcggacacctgtagtcccagctactcaggtgtctgaggcaggagaatcacttgaacctgggaggtggagcttgcagtgagccgagatcgtgccactgcactccagcctgagcaacagagcaagactctgtctcaaaaaaaaaaaaaaaacaacttagctgggcatggttctgcatgcctgtagttccagctactcatggttctgcgtgcctgcagtcccagctacacaagaggctgaggtgggaagatcacctgagcccaggagtttgaggctgcagtgagctgagatcatgccactgcattccagcctgagcaactggggtgagactgtctcaaaaaa

SEQ ID NO: 5745 - DNA, 105 bp, Homo sapiens
aggctgaggcaggagaatcgcttgaactcgggaggtggaggttgcagtgagccaagatcgtgccattgtactccagcctgggcaccaagagcgaaactctgtctc

SEQ ID NO: 5746 - DNA, 787 bp, Homo sapiens
ctcatccagagatgcactgggcacagggaaagctttttttttcaagtagcagctgctattcattgaaatgttacaattttcctgccttagtatttcacacgtccttatactcctcataacattttttgcttgtgtagttttagccccatttcagaaatgaggaacccaggttcagaaggtttagaagcttgctcaagaccccccagctattaggtgccagagctgcaactggaatgcagctttgactccattgtgggtttctgttccattatcaagagtagcctgacagttggcaataacaatgactgaatgaatgaataaatgaattctccaaagaaaatagttcatgtttccctagtatgagggaatacttgagatagttgttttgagaagggggccacagaccaggagacaccaataagtctttctcatttctggtaaatcgctttataatgaccgttattataaagtgtaaaaacaacaacaacaaaaaataataggcgcagtggttcacacctataatcctagcactttgggaggcagaggcgggcggatcatttgaggtcaggagtttgagaccagcctggccaacatgatgaaaccctgtctttactaaaaacacaaaaattagccgggcggtagtggcacgtgcctgtgtagtctcagctactcgggaggctgaggcaggagaatcacttgaacccgggaggtgaaggttgcagtgagccgagattgtgcccctgcactccagcctgggagacagagccagactccatttcaaaaaaaa

SEQ ID NO: 5747 - DNA, 787 bp, Homo sapiens
ctcatccagagatgcactgggcacagggaaagctttttttttcaagtagcagctgctattcattgaaatgttacaattttcctgccttagtatttcacacgtccttatactcctcataacattttttgcttgtgtagttttagccccatttcagaaatgaggaacccaggttcagaaggtttagaagcttgctcaagaccccccagctattaggtgccagagctgcaactggaatgcagctttgactccattgtgggtttctgttccattatcaagagtagcctgacagttggcaataacaatgactgaatgaatgaataaatgaattctccaaagaaaatagttcatgtttccctagtatgagggaatacttgagatagttgttttgagaagggggccacagaccaggagacaccaataagtctttctcatttctggtaaatcgctttataatgaccgttattataaagtgtaaaaacaacaacaacaaaaaataataggcgcagtggttcacacctataatcctagcactttgggaggcagaggcgggcggatcatttgaggtcaggagttcgagaccagcctggccaacatgatgaaaccctgtctctactaaaaacacaaaaattagccgggcggtagtggcacgtgcctgtgtagtcacagctactcgggaggctgaggcaggagaatcacttgaacccgggaggtgaaggttgcagtgagccgagattgtgccactgcactccagcctgggagacagagccagactccatctcaaaaaaaa

SEQ ID NO: 5748 - DNA, 222 bp, Homo sapiens
cacagctgcctctatccgagtggtctgtgcagggcgccagcagccaccctgatggagggcaggtctctaaaagcagcatcctttgccaggcacctgagaattttaaagtgaggatgcatctgtggcatcatcttcctaaaccaaatgatgtgtaattgcatagttgttgaactgtgtggttggtctatttctagcagagtagctacctgagaggaaatgaga

SEQ ID NO: 5749 - DNA, 222 bp, Homo sapiens; identical to SEQ ID NO: 5748

SEQ ID NO: 5750 - DNA, 4454 bp, Homo sapiens
atgattaatcactaaacaggtattgcataaaatagcaattttcagctctggattttggggaagggagtagaggctggaaatgtaggtggagagtcaggctggggagagatgccacattcgcaacattgggttttttacaatagtactgcatctatctctgtgcaggagtctaaaagtggttggaagctacatttaggattatttaaaataacatactgccttatttttatctctgtagcaacaactttttgtaagaaaaatagctagttccatgatcttttgccttttgaaaaggagagatctattttaaactctttgcaggctcctcgaagttccttttcttgctgttgagtagcaggtagaatctctagttcatggaggtctgacggatccatggtcccgtgctggtccatgtgctgccctctgcttccgtccctcatccttgccactctcaacagtcttccccgacaacccttaggaagacaagggcttggaggagggggaggactgagtgtccctggcatgttctgattaatcctattcattgtcaagtacagctttttaatgaactgattcattactgagagtaggtctcatgcaaatccctagtttgtatcctgtggatttaatttctaacaatttcctcatttcaacacaactccattgtaccatgggctttgtgattttgttctaatatagagcttgacctcacattttaagactataagatgaatactaaaaaaacgaaatccttaaaataaaaaataaactagaagaacatgtaggtggatattcaactcctctctaaaggaagaagggttgtccacacataaaagttttggaagagactgggtttagtggctcacgcctgtaatcttagcactttgggaggctgaggtaggaggatcacttgagcccaagagttcgagaccagcctgggcaacataatgataccctgtctctacaaaaattaaaattagccaggcatggtaatgcacacctgttgtcacctgtggttgggaggctgagtgggaggatcgcttgagcccagaaggttgaggcttcagggagccatgattgcaccactgcactccagtgtaggtgacagagcaagaccctgtctccaaaaaaaaaaaaaaaaaaaaagaaattctggaagaaatgacagaggaaatcactgataaatttcgaaacataagtttgtgcaatatcagagacaaatttaacaaatatgtaaaatttgcctccattatgagttaatataaaactatgaagagttcaggagattataaaaagagacaaagacaaccaggagaaaacagataacttaatactttttaaaaaaacaccaggctaacaaaaaagaaatatatagttgactaaataaatatagcacaatatatttaaccctacaaatttcaactaatgcaatgaaaacataatagcagcttttcaactgttattattaccagaaagaaaaatattttaaaatgctattgtggttttggtgagggaacatttttcatgccctgttgtttgagagtagaattcagtgcaccctttctggaaagcagtttggtaacctgtaatacttcttttaaaaaaaaattcatcctcttgtctaaaaatttctcctctagaaacttaaagataatagtcaagtgaaaacacatttatgggcagtgtttaaagttttgtgagtgaaactgttgataagaacctattacaatggttaagccacctggaacattctattgatatattatgcagccttggaaaatagtacttttaaggaatgttaataagatgggcaatacaaaactgaatgaaaatccaatacagaattctgcctacataacatgatccaaattttgcctaaagtttgcctaaaacgtgcatagcaaaagaatttcgggaactacaccagaatgttagcatgggtccatcatttctgagctgtggtgttactggcatgactcttgtttttcttgtttattcttttatgttatattaaggtgaccacctgttcccgttggcctggtactgccctggttttagcactggaagtcctactctggacaattaatgattcgtgtgtgtgtgtgtgtgtgtgtgtgtgtgtgtgtacacattaaggtgaggttgtgcccatttgaaaggaagggccaaagataaagtgacaagctcatggggcctgtgtggtagtcaggcagtagatttttttttttttttttgagatggagtctcgctctgtcacccaggctggagtgcagtggcatgaacctggctcactgcagcctctgcctcccaggctcaagcgattctcccacctcacctgcccaagtagctgggactacaggcatgcacccccacacccagctaattttattttgcattttttgtagagacggggttttacatgttgcctaggctggtctcaaactcctgagctcaagtgatccactaccttggcctcccaaagtgctgggattacaggcatgagccactgtgcttggcccagggagtagattttctgatgataaaattaacgtgacttgttctagaaaatacagggaaagagtaaatgtgcaaagacttaaatagcatttacatgtagcccacagtgctctaaatgcttttggtggttcacagtttaatcatcataaccctatgaactagatactgttgttgcatccccatttacagaggcatagagacatggagtaattcacccatagccacacagcccttgacagaatctggatttgaactcaggcagttcggatccagagtctgggccattgaccacctcctgcatctctgtagatccccgactccagcctctcctcttgctgcctctctcaacagtaacgatgctgttactccccacgccaaacctctgggctggccaggctcactccagtcccacagtcattgccaggactgcctttgaccttacacagaggaaacatcttccacctgtcgggagggagccggggcggggatttccatggcagagttactgttctctggtgatagagttctttcagttttgctacatggtcttgtggcaaaggactgggtgcaggtgcagccttggttatttctggaaacacttctccttttcttttattttgccaggtctggctcatcagtcaccttcctctcagaaaggtgattttggctcctctgcccagaccatcaaacatttctggaggtgtcacaagcttccgtgagggttctggtctctgcgaattgcaggaagaatccaaacataggaaaggggtgatgtgtatcagggtgtccatcctcagctttgctccacaaagaccctcacacttgcacattgttttgttaacagtattatctctgagtagtgggtttattgtttttgcttacctgttttaaacacttcttcaacaaacttgctttactttccattttttaaaagtgtatttcaattttttattaataatgccattttactcctgcaaaatttctcactccttcaaagtctgtgtatggcaaagatcttcctaaccatcattcaagttagagcaactccatttctgtatcaaaaagaaatacctttagttattgtctgaacttgtcagaatttctgagaacgatgccagaaattctataattgttttgtcacattaattgaacaatgagagggcaccagcattcctcactcatgaggtagaagcaccacatctacatttctttttagctatgggtgatgtttttgcttttaaatcttagaaatctgttaataaacaaataacacaacaaagtttggggtacttccttgtggggactgggatgcttaagctaaaacaaagtttaaatttggactgtgtgtgttatgtttcgcagaatctatatgtttctcaaaagtgggtgtcaccctccttcctcccccaacacacccttcaggggtaagaggagaagtaatgtagaaaaattaactgtttctccactgtaaaagtagggtgtctttagaatgtttcatgttcaaaggaaagattgtgcttctcccaaggcaaggtgttcccttaaaaaaaaaaaaaaaaaaggttgagcatgtctttgtattgctgtctctggaagaggaaatgaggcatctcttggggtgagaacaagggagaattgaactctcgggcctggccagatggattcctcacactggcacagagctgtgaagggaagggcctttcatcctccagaggaaagagggctggggtctcagaggccagagcatagggacaggcaggagtcctgcagccctgatgcctgcccctcccagtacagaatctctgtcctgacccccacctgttgaacctttcaaatcccagtgactcgccagctttctctgtggatattggctgaattggtggcttgtgtggctgcctgggagagcaatttacccctgagccaaggagggggtgggc

SEQ ID NO: 5751 - DNA, 428 bp, Homo sapiens
cagaagacataccagtcaatgggttcttgaaatagtcaaggaatgtggcaattcacgctggatgtggaaggtggaaggaaagacaagtgttagcaaatgcagacctgtctgctgtggaacttgaagaccttgctagtagtcaggctgcttcctggcattccaggcctgagaggcttctattttgactcaaagcaaaaacaaatgctatgttaatgtcttcctatgtgtccccttcataagattttggtgaaatcatattaaaagtgcatttctcagtatcactctcagttatttagagatttcagttccccagtaccctggcaagggatttgacgaacgtagcaagaacgtcgtgaactttgagctaatttatatcattgttcatttgtctgtttaataaataaaagcaagaaaaccagagcaacaaa

SEQ ID NO: 5752 - DNA, 428 bp, Homo sapiens; identical to SEQ ID NO: 5751

SEQ ID NO: 5753 - DNA, 428 bp, Homo sapiens; identical to SEQ ID NO: 5751

SEQ ID NO: 5754 - DNA, 7337 bp, Homo sapiens
gtgtgcctggatgattgatagcttcggaaatgaggaacagaggcacaaattttgcccaccgctctgtaccatggagaagtttgcttcctactgcctcactgaaccaggtgaatttgccacactgcactgagatatagcagggagagatgcttcctgctcagatggcattaccgagcactccttccagcctcttgacatgtcgagccactgtttatctagctgtttggttgaggagtaatagagtcctgtgacctgatgtcacaaggaccaagaagctatctggtgtgttgggaggtaggcagtggcctgactggtatgagcagtttccaccaagtacagagagttcctttggccacttgggttttgcagtgacacactctgagcagggtctgtttagagaagatttcctagaagatagaattgtgctgggctccctcgacctcactgactttctcaccttctctctgctgccttttgatccctcctcaggaagtgggagtgatgctgcctctcttctgacctccgctaagaaacagggagatcattacatcctcaatggctccaaggtactagcgtgcgtcctcccagagcactttggagattgttcccagcttcctcctgacatcctctggttccttcacatccgcgggttaatactcccataggatttttatgtgttgggaagagaacctctgacccatttctctttctttattctcactgtttgtatctctcctaatctgattccagatcatttcgttgacttttgtctatcctttttatactctcttggactgcctctctgatctgcagtcactgcagcgaccttttacctcacctcagtctctgtgccattggaccttattgtcagtctctgtgccattggaccttattgtcagtctctgtgccattggaccttattgtcagtctctgtgccattggaccttattgtcagtctctgtgccattggaccttattgtcagtctctgtgccattggaccttattgtcaggaggacccagtggtgttcccagacgctgtgagaactcaagcattccctggtccttttgcaccccttttacccccacaggccttcatcagtggtgctggtgagtcagacatctatgtggtcatgtgccgaacaggaggaccaggccccaagggcatctcatgcatagttgttgagaaggggacccctggcctcagctttggcaagaaggagaaaaaggtgagtggctgttggacaggaaacaattcaggttatgagactctgccacctgccagcccaactcctgctctatttcagaaaacaggtttgcatacttgctaacctacctttgaagcagttgcttctattaggattttcaacaggagcatatgaaatacaacagggcattattaaacactaggcctctggggaaagtgacaatgtttgccagtaaattcttcaagccacctgtgagtgttctgacctctcctgcctctgcttttggcctgtgttccttatccagctgcttacgttggtgcactttgttgctccaggaagagacgcttagagaagacctggtgttggccacaagtctcagtaatggaaggcgtgtggtcccttttgcttctttgattaaaaataaagtaaaactcattggagatgattgtgggtatttcagcaacccaagaaggacacttaggtactgtaagtaatttgaaaagtaagatacttctaggattaagagccgccatggccagggcatgaacaggagacctgtgatcatgtaaccgtaattggtaataagggctcaagacccattcagattttttagaccagatgctcaaagcagtcatctctctctagtttgtactgttatggggggactttgtgagagaaggcaggtaatgaaatgacccctaagtgtacctctttctcacagctcctcgggtttctgtattttcctacaggatccttcctgatcctctgtaactgtaaggcattatgcattttagcatccccttctctttggtaacacagcaaccatttcctaggcttctactgtgtgtgaagcccatgctaactcctgggcaggaagaccttcagtaaaaggcttagaaatggagtttatcctatcaacaaaagagagcaaggaaatgatgtaaaggcagtctattttcagagccagagaggaactgggagattgtagatagtttgtggttttcaattagaggcactgaaattgggggcagttggtgtcacaatcctaaaagaagttgtgagaagtgtttgtaggttagtcaggtagagtagacattagtagattctcttaataagttagaaaatgtttagctgaaacaggtatctttctgagtgctgacaggcctttaaacctgaactttttctttttcctcattttaagttcttgtgggtctaagtcttgggtgctgaaacccatacctcacaggctcccgtccccagggaaggccgccctacctgctggattgttgggcaaccacgcagtccctgatttttgccaggtggggtggaactcccagccaacacgagctgtgatcttcgaagactgtgctgtccctgtggccaacagaattgggagcgaggggcagggcttcctcattgccgtgagaggactgaacggagggaggatcaatattggtgagatacgcaggggtgtggcagggaggtagcggtccgggacaggcactgctgttttccagcttggttggaacgtcggcgctcttcccctctagcttcctgctccctgggggctgcccacgcctctgtcatcctcacccgagaccacctcaatgtccggaagcagtttggagagcctctggccagtaaccaggtaacctctgccttgcctccacatggctttgcactatttgcagcccgggacctgctctagggcccacatttccaggagagaagccaggaaattcctctgtcagtcccaccactgtcctagccagagcttgtgctttatttctgtccatcttttcttgggatatctttaacgatattaaagtgtcgggtgagtgaagtggacttagcacttaaaagcaataaatttcctctatagaaaaagcaagagactttgaagctttggatcacttagaaaaggcgcctccgagatgtcttaccgaggctcctgcaccaggtgctggtctaagcccctcagtcttgtctggttctctgctccctgtgctgcagtacttgcaattcacactggctgatatggcaacaaggctggtggccgcgcggctgatggtccgcaatgcagcagtggctctgcaggaggagaggaaggatgcagtggccttgtgctccatggccaagctctttgctacagatgaatgctttgccgtaagtgattcctctggctctcctgggatggacagggaacagctgctaggcccaggggtcttgagagacatgagtcagatttggaacccagccctcctggaatcccacaaggatcaccttaagcttaaggatataaatgaactcatgagcggcctatgtgggagctctcatcgctggcttttaggcctgctgcatgccattatacacttcattatgtcactgttgtttggttgtgttctaggcgagaaaccacctttggaaggttcacagcagccccaatttagcactctgccatgtttacattgtcaggctgcattgccactagggggaaccatagctttttatcatcccagccagggtggctgtgggcagcttctgcctggcaggtaataagggagaggggcagagggctttgagtcgcctgtctggggggaactgacaagtttagtaggtgaacttcccttgtctctaaccatacagaatgtggaggccctctttgagcttggctgtttgtggttctttcatgggtttatggcgggctgccagatcgtgggctggggtaggaagggaagctgcttgctccacagtcttcccagagtccaagacgtctagtccctgtctccctgcagatctgcaaccaggccttgcagatgcacgggggctacggctacctgaaggattacgctgttcagcagtacgtgcgggactccagggtccaccagattctagaaggtaaaaattgccagaggttattctcttcccttcagaacggggacgggatcgctgctttccccactctctgtccccatgcctcctgggcctcagggtgcagtcaagccctgtctgtctcgaggcttcctcctccctcccgttccacagagctgttctggcaggggcctggagtccagagccgcagcttcgtccctttcggggggcctcagatcgctctgctgctgcccttttcctctggagatctgcgagaagggtgaactgagataatggatgagaaagcatgttgaaaaccacagccggggcttttctctaaggttatcgagtacgtggttctcagggatccaagaacagtgatggacaaggcaaatgtgagccagtatggtcatcagtagctctatattgattatcagccagatggcctaaaagatacctgtctcaatattactagtgtatttttcaataaaataaaccatcactatatgggtatcttcttggtagtcacagacattctatcgaggaaacatggaagccgttggggtcgggctcggagcctggctgtctccactctctacagccagtgcggaagtcttgaaatgacacgactcttggaaaagcaggaggggcagaggcttctttgagtgacttcggtgaagcaacgtgaggctgccttgctggaaacattatataatggggcttccctgcccctttcacagcacccttctcaaacctcagcctgtgctggaatcgcctggagggcatgggagcgcagattgcgggcctcaaccccagagcttctgctccagagggtctagtgtgggcctgggaatttgtatctgcaacaagtcttcaagtgaggctgccacagcttgtctgagaaccacactttgagacccaccgctctggtgttaatgtcagagtcacaggctaccacaggttagaccgctgctttcttctgcaaacctcattccagaaagatgtttatgggctcagtcgccagtgttcaaactgaattcccgagagtcgttttccttccattactcttggaattgctttctcactgagctttatgtgcgtaggaaacttcgccttcattctaactctctctccaccctgcaataataagcaggaaaacatttattgtaggccacaccatcacccacttacagaagaattggggcactcatcactgtatcactttgtttcatcatggactttactgttggataaatctacagtttatgctttatttgagacgatgtgactactgattcctcgagggggtttatatttctttttgcattaaaggccactgctaaaaatgaagcaaataattgataccctcctttcagggaaaatgttttcattcttttgtaagtcagttttctgattaccaaagaaatgtgtatttattgttgaaaccttataaaattaggaaaagtaggctgggtgcggtagcttatgtctataatcgccgcactttgggaggctgaggcgggtggatcgcgtgaggccaggagttcgagaccagcttggccaacccggtgaagccccgactgtctaaaattataaaaagttagctgggcgtggtggtgcatgcctggaatcccagctactcgagaggctgaggcaggaagatcgcttgaacccaggaggtggaggttgcagtgagctgagattgcaccatcgcactccagcctgggtgacagtgagactccatctaaaaacaatacaaaaaattagccgggcctggtggggcctggtggcacatgcttgtggtcccagctactcaggaggctgaggcaagagaattgcttgaacctggggggcggaggttgcagtgagccaagatcacaccactgcactccagcctgggcgacagcaagactgtctcaaaagaaaagtaaaagaaaaaaaatcactcatgtttctacatccagaatgttattttggtacatctccttttaggcattttactctgcctttgttggtacatttttaattttaattagaattatcctgtatatactgtttttattctgcctttttaaactttatataagcatttttaccatcagaagaagtttttaaaaaagtattatttcctgacatttttcagtactttgtagagaagtctctgataatctcatctctcccaggctaaaagcaatgattgtagtttaaatctgcagctactctgaactaggcctggagcagcctggtcagagctttactaaactctcagactttgctgctgtgaaattcttcctccttcctccctcttacaggtagcaatgaagtgatgaggatactgatctctagaagcctgcttcaggagtagaacccacacttgttctggcctggtgttcagtgcgactgcagtcagtgttgagtggtgccatgtgggccgctctattccaaaggaatcatggattagacccaagggctgagctcctctagggcaggacctgcaccctgtgtgttggcaccagcatcgggtcttggactggggcagaatccccagtggaaccggaagagctggactgatgagaaacatcagaagaacacatactaccttgttttcctaatgccagaagggtgaccagtgaagattcaccgtcaaaccatgaaagtcctttcttggatccactttatcttgattagtctgcattttactagttcactggatccctcctctaggggcctggggactttcactgatgctcttcctgattctagagcaaaggtgtgggaaggggaaatggaggaatgccctcctgtctgtgtcgttctctgtgccacagctacagatgcagaaggtttctctggatagcacacctctgaatgtaaatcatgataaaatggatatttggaaacttactcctaagctgtgatttagggtgtatttctacttctggactgcctcaatatcaagggctgagacttttgaattttgaatattcgttgggtttcatgttaagaagcctgtggtctaggagtgctattcagtgtttcttttcctgataaacactttgaatattttttttgtgtttttgtttccttttctgaagctgttcctccttttaaatatttttaatcacattgataaaatctatccttcaccacctctggttctactatagttgatttttattttaaatgtttaattgtatttgattaaacacttaactggattttggaataataaaactctcgtccaatttggcttttaaaaa

SEQ ID NO: 5755 - DNA, 7366 bp, Homo sapiens
gtgtgcctggatgattgatagcttcggaaatgaggaacagaggcacaaattttgcccaccgctctgtaccatggagaagtttgcttcctactgcctcactgaaccaggtgaatttgccacactgcactgagatatagcagggagagatgcttcctgctcagatggcattaccgagcactccttccagcctcttgacatgtcgagccactgtttatctagctgtttggttgaggagtaatagagtcctgtgacctgatgtcacaaggaccaagaagcctatctggtgtgttgggaggtaggcagtggcctgactggtatgagcagtttccaccaagtacagagagttcctttggccacttgggttttgcagtgacacactctgagcagggtctgtttagagaagatttcctagaagatagaattgtgctgggctccctcgacctcactgactttctcaccttctctctgctgccttttgatccctcctcaggaagtgggagtgatgctgcctctcttctgacctccgctaagaaacagggagatcattacatcctcaatggctccaaggtactagcgtgcgtcctcccagagcactttggagattgttcccagcttcctcctgacatcctctggttccttcacatccgcgggttaatactcccataggatttttatgtgttgggaagagaacctctgacccatttctctttctttattctcactgtttgtatctctcctaatctgattccagatcatttcgttgacttttgtctatcctttttatactctcttggactgcctctctgatctgcagtcactgcagcgaccttttacctcacctcagtctctgtgccattggaccttattgtcagtctctgtgccattggaccttattgtcagtctctgtgccattggaccttattgtcagtctctgtgccattggaccttattgtcagtctctgtgccattggaccttattgtcagtctctgtgccattggaccttattgtcagtctctgtgccattggaccttattgtcaggaggacccagtggtgttcccagacgctgtgagaactcaagcattccctggtccttttgcaccccttttacccccacaggccttcatcagtggtgctggtgagtcagacatctatgtggtcatgtgccgaacaggaggaccaggccccaagggcatctcatgcatagttgttgagaaggggacccctggcctcagctttggcaagaaggagaaaaaggtgagtggctgttggacaggaaacaattcaggttatgagactctgccacctgccagcccaactcctgctctatttcagaaaacaggtttgcatacttgctaacctacctttgaagcagttgcttctattaggattttcaacaggagcatatgaaatacaacagggcattattaaacactaggcctctggggaaagtgacaatgtttgccagtaaattcttcaagccacctgtgagtgttctgacctctcctgcctctgcttttggcctgtgttccttatccagctgcttacgttggtgcactttgttgctccaggaagagacgcttagagaagacctggtgttggccacaagtctcagtaatggaaggcgtgtggtcccttttgcttctttgattaaaaataaagtaaaactcattggagatgattgtgggtatttcagcaacccaagaaggacacttaggtactgtaagtaatttgaaaagtaagatacttctaggattaagagccgccatggccagggcatgaacaggagacttgtgatcatgtaaccgtaattggtaataagggctcaagacccattcagattttttagaccagatgctcaaagcagtcatctctctctagtttgtactgttatggggggactttgtgagagaaggcaggtaatgaaatgacccctaagtgtacctctttctcacagctcctcgggtttctgtattttcctacaggatccttcctgatcctctgtaactgtaaggcattatgcattttagcatccccttctctttggtaacacagcaaccatttcctaggcttctactgtgtgtgaagcccatgctaactcctgggcaggaagaccttcagtaaaaggcttagaaatggagtttatcctatcaacaaaagagagcaaggaaatgatgtaaaggcagtctattttcagagccagagaggaactgggagattgtagatagtttgtggttttcaattagaggcactgaaattgggggcagttggtgtcacaatcctaaaagaagttgtgagaagtgtttgtaggttagtcaggtagagtagacattagtagattctcttaataagttagaaaatgtttagctgaaacaggtatctttctgagtgctgacaggcctttaaacctgaactttttctttttcctcattttaagttcttgtgggtctaagtcttgggtgctgaaacccatacctcacaggctcccgtccccagggaaggccgccctacctgctggattgttgggcaaccacgcagtccctgatttttgccaggtggggtggaactcccagccaacacgagctgtgatcttcgaagactgtgctgtccctgtggccaacagaattgggagcgaggggcagggcttcctcattgccgtgagaggactgaacggagggaggatcaatattggtgagatacgcaggggtgtggcagggaggtagcggtccgggacaggcactgctgttttccagcttggttggaacgtcggcgctcttcccctctagcttcctgctccctgggggctgcccacgcctctgtcatcctcacccgagaccacctcaatgtccggaagcagtttggagagcctctggccagtaaccaggtaacctctgccttgcctccacatggctttgcactatttgcagcccgggacctgctctagggcccacatttccaggagagaagccaggaaattcctctgtcagtcccaccactgtcctagccagagcttgtgctttatttctgtccatcttttcttgggatatctttaacgatattaaagtgtcgggtgagtgaagtggacttagcacttaaaagcaataaatttcctctatagaaaaagcaagagactttgaagctttggatcacttagaaaaggcgcctccgagatgtcttaccgaggctcctgcaccaggtgctggtctaagcccctcagtcttgtctggttctctgctccctgtgctgcagtacttgcaattcacactggctgatatggcaacaaggctggtggccgcgcggctgatggtccgcaatgcagcagtggctctgcaggaggagaggaaggatgcagtggccttgtgctccatggccaagctctttgctacagatgaatgctttgccgtaagtgattcctctggctctcctgggatggacagggaacagctgctaggcccaggggtcttgagagacatgagtcagatttggaacccagccctcctggaatcccacaaggatcaccttaagcttaaggatataaatgaactcatgagcggcctatgtgggagctctcatcgctggcttttaggcctgctgcatgccattatacacttcattatgtcactgttgtttggttgtgttctaggcgagaaaccacctttggaaggttcacagcagccccaatttagcactctgccatgtttacattgtcaggctgcattgccactagggggaaccatagctttttatcatcccagccagggtggctgtgggcagcttctgcctggcaggtaataagggagaggggcagagggctttgagtcgcctgtctggggggaactgacaagtttagtaggtgaacttcccttgtctctaaccatacagaatgtggaggccctctttgagcttggctgtttgtggttctttcatgggtttatggcgggctgccagatcgtgggctggggtaggaagggaagctgcttgctccacagtcttcccagagtccaagacgtctagtccctgtctccctgcagatctgcaaccaggccttgcagatgcacgggggctacggctacctgaaggattacgctgttcagcagtacgtgcgggactccagggtccaccagattctagaaggtaaaaattgccagaggttattctcttcccttcagaacgggggcgggatcgctgctttccccactctctgtccccatgcctcctgggcctcagggtgcagtcaagccctgtctgtctcgaggcttcctcctccctcccgttccgcagagctgttctggcaggggcctggagtccagagccgcagcttcgtccctttcggggggcctcagatcgctctgctgctgcccttttcctctggagatctgcgagaagggtgaactgagataatggatgagaaagcatgttgaaaaccacagccggggcttttctctaaggttatcgagtacgtggttctcagggatccaagaacagtgatggacaaggcaaatgtgagccagtatggtcatcagtagctctatattgattatcagccagatggcctaaaagatacctgtctcaatattactagtgtatttttcaataaaataaaccatcactatatgggtatcttcttggtagtcacagacattctatcgaggaaacatggaagccgttggggtcgggctcggagcctggctgtctccactctctacagccagtgcggaagtcttgaaatgacacgactcttggaaaagcaggaggggcagaggcttctttgagtgacttcggtgaagcaacgtgaggctgccttgctggaaacattatataatggggcttccctgcccctttcacagcacccttctcaaacctcagcctgtgctggaatcgcctggagggcatgggagcgcagattgcgggcctcaaccccagagcttctgctccagagggtctagtgtgggcctgggaatttgtatctgcaacaagtcttcaagtgaggctgccacagcttgtctgagaaccacactttgagacccaccgctctggtgttaatgtcagagtcacaggctaccacaggttagaccgctgctttcttctgcaaacctcattccagaaagatgtttatgggctcagtcgccagtgttcaaactgaattcccgagagtcgttttccttccattactcttggaattgctttctcactgagctttatgtgcgtaggaaacttcgccttcattctaactctctctccaccctgcaataataagcaggaaaacatttattgtaggccacaccatcacccacttacagaagaattggggcactcatcactgtatcactttgtttcatcatggactttactgttggataaatctacagtttatgctttatttgagacgatgtgactactgattcctcgagggggtttatatttctttttgcattaaaggccactgctaaaaatgaagcaaataattgataccctcctttcagggaaaatgttttcattcttttgtaagtcagttttctgattaccaaagaaatgtgtatttattgttgaaaccttataaaattaggaaaagtaggctgggtgcggtagcttatgtctataatcgccgcactttgggaggctgaggcgggtggatcgcgtgaggccaggagttcgagaccagcttggccaacccggtgaagccccgactgtctaaaattataaaaagttagctgggcgtggtggtgcatgcctggaatcccagctactcgagaggctgaggcaggaagatcgcttgaacccaggaggtggaggttgcagtgagctgagattgcaccatcgcactccagcctgggtgacagtgagactccatctaaaaacaatacaaaaaattagccgggcctggtggggcctggtggcacatgcttgtggtcccagctactcaggaggctgaggcaagagaattgcttgaacctggggggcggaggttgcagtgagccaagatcacaccactgcactccagcctgggcgacagcaagactgtctcaaaagaaaagtaaaagaaaaaaaatcactcatgtttctacatccagaatgttattttggtacatctccttttaggcattttactctgcctttgttggtacatttttaattttaattagaattatcctgtatatactgtttttattctgcctttttaaactttatataagcatttttaccatcagaagaagtttttaaaaaagtattatttcctgacatttttcagtactttgtagagaagtctctgataatctcatctctcccaggctaaaagcaatgattgtagtttaaatctgcagctactctgaactaggcctggagcagcctggtcagagctttactaaactctcagactttgctgctgtgaaattcttcctccttcctccctcttacaggtagcaatgaagtgatgaggatactgatctctagaagcctgcttcaggagtagaacccacacttgttctggcctggtgttcagtgcgactgcagtcagtgttgagtggtgccatgtgggccgctctattccaaaggaatcatggattagacccaagggctgagctcctctagggcaggacctgcaccctgtgtgttggcaccagcatcgggtcttggactggggcagaatccccagtggaaccggaagagctggactgatgagaaacatcagaagaacacatactaccttgttttcctaatgccagaagggtgaccagtgaagattcaccgtcaaaccatgaaagtcctttcttggatccactttatcttgattagtctgcattttactagttcactggatccctcctctaggggcctggggactttcactgatgctcttcctgattctagagcaaaggtgtgggaaggggaaatggaggaatgccctcctgtctgtgtcgttctctgtgccacagctacagatgcagaaggtttctctggatagcacacctctgaatgtaaatcatgataaaatggatatttggaaacttactcctaagctgtgatttagggtgtatttctacttctggactgcctcaatatcaagggctgagacttttgaattttgaatattcgttgggtttcatgttaagaagcctgtggtctaggagtgctattcagtgtttcttttcctgataaacactttgaatattttttttgtgtttttgtttccttttctgaagctgttcctccttttaaatatttttaatcacattgataaaatctatccttcaccacctctggttctactatagttgatttttattttaaatgtttaattgtatttgattaaacacttaactggattttggaataataaaactctcgtccaatttggcttttaaaaa

SEQ ID NO: 5756 - DNA, 9308 bp, Homo sapiens
cttccatgggacttaatgaagagcagaaagaatttcaaaaagtggcctttgactttgctgcccgagagatggctccaaatatggcagagtgggaccagaaggtaggcgtttttcttgtgcttagacgttctaacaacagatgtctcaggcagacctttatctttgtctcccgataatgtaattgttaaatgtctcctccacttaccaactcttactgcaagtgagaataccggtagtggatgatttttcctagaaggcatcctgatcatcttgtacataactttttttttgttagttgaataaagatttggatataaaactaaggcagttctatagataataaaaagaaacttcttaatgccagaacaagtttttacaggacccatgttaactgataaccactgtaagatgacaaacaggcatattaagagaattcatacgctgtcgcatgtgcaagcctcctaatccctcactgtgccctctaaaaggaaggccgtctctgaatcagctgctgatcaccctgctctcttttgtacgtaggagctgttcccagtggatgtgatgcggaaggcagcccagctaggcttcggaggggtctacatacaaacagatgtgggcgggtctgggctgtcacgtcttgatacctctgtcatttttgaagccttggctacaggctgcaccagcaccacagcctatataagcatccacaagtgagtgcccaagcttggaaggcacaatgaagtgctcactcgggctgactgtgagagttcagattcgtaggaaaaagattgatcttttgaagctgagtgtcctcaaggaactggacttaaaagtacactctaggggccgggcgcagtggctcgtgcctgtaatcccagcactttgggaggccaaggcaggcagatcacgaggtcaggagtttgagaccagcctggccaacgtggtgaaaccccgtccctgctaaaaatacaaaaaattagccgggtgtggtggctggcgcctgtagtcccagctactcgggaggctgaggcaggaggatggtgtgaacccgggaggcggagcttgcagtgagccgagatggaccactgcactccagcctgggcgacagagcgagactccatctcaaaaaaaataaataaataaaataagtacacgctaggtctgttgctgcctgttggacttgattctgtcatcctgtgtattgcttagggaatcaggtcagccagctttctcagaaatcttattttgagctggtaccaggagacttctccaatagagtgatcagggtcctctcacccttttatttatttatttatttttaagacagagtctcgctctgttgcccaggctagggtgcagtggcatgacctcggctcactgcaacctccgtctccccggttcaagtgattctcctgcctcagcctcctgagtagctgggattacaggcacgtgccaccacacctggctaattttttttcatatttagtagagatggggtttcaccatgttagtcaggctggtctcaaactcctgaccttgtgttctgcctgcctcggcctcccatagtgctgggattacagatgtgagccaccgcacccggcccctctcacccttttcctcaatccaaagatggaactgccagtgatttgaggaagtaatagaaactactaatagaaagcacatataactctgatttttagaggctcgtgtaacctaactagaagtagtacaaacgtgctggtgagaagtacctcagcctggttatctctgggtagtccttattccaggaatatgttttaatccaccgtttgcctttaaagagtcttcccaattgtgactctccccttcccactcttctgctttactccactgccctgccctttgttctctttccccttctcccccatttttttttcttttccatctttatttctgtcattgtcttttcttcttggtgtacctatcagcatgtgtgcctggatgattgatagcttcggaaatgaggaacagaggcacaaattttgcccaccgctctgtaccatggagaagtttgcttcctactgcctcactgaaccaggtgaatttgccacactgcactgagatatagcagggagagatgcttcctgctcagatggcattaccgagcactccttccagcctcttgacatgtcgagccactgtttatctagctgtttggttgaggagtaatagagtcctgtgacctgatgtcacaaggaccaagaagctatctggtgtgttgggaggtaggcagtggcctgactggtatgagcagtttccaccaagtacagagagttcctttggccacttgggttttgcagtgacacactctgagcagggtctgtttagagaagatttcctagaagatagaattgtgctgggctccctcgacctcactgactttctcaccttctctctgctgccttttgatccctcctcaggaagtgggagtgatgctgcctctcttctgacctccgctaagaaacagggagatcattacatcctcaatggctccaaggtactagcgtgcgtcctcccagagcactttggagattgttcccagcttcctcctgacatcctctggttccttcacatccgcgggttaatactcccataggatttttatgtgttgggaagagaacctctgacccatttctctttctttattctcactgtttgtatctctcctaatctgattccagatcatttcgttgacttttgtctatcctttttatactctcttggactgcctctctgatctgcagtcactgcagcgaccttttacctcacctcagtctctgtgccattggaccttattgtcagtctctgtgccattggaccttattgtcagtctctgtgccattggaccttattgtcagtctctgtgccattggaccttattgtcagtctctgtgccattggaccttattgtcagtctctgtgccattggaccttattgtcaggaggacccagtggtgttcccagacgctgtgagaactcaagcattccctggtccttttgcaccccttttacccccacaggccttcatcagtggtgctggtgagtcagacatctatgtggtcatgtgccgaacaggaggaccaggccccaagggcatctcatgcatagttgttgagaaggggacccctggcctcagctttggcaagaaggagaaaaaggtgagtggctgttggacaggaaacaattcaggttatgagactctgccacctgccagcccaactcctgctctatttcagaaaacaggtttgcatacttgctaacctacctttgaagcagttgcttctattaggattttcaacaggagcatatgaaatacaacagggcattattaaacactaggcctctggggaaagtgacaatgtttgccagtaaattcttcaagccacctgtgagtgttctgacctctcctgcctctgcttttggcctgtgttccttatccagctgcttacgttggtgcactttgttgctccaggaagagacgcttagagaagacctggtgttggccacaagtctcagtaatggaaggcgtgtggtcccttttgcttctttgattaaaaataaagtaaaactcattggagatgattgtgggtatttcagcaacccaagaaggacacttaggtactgtaagtaatttgaaaagtaagatacttctaggattaagagccgccatggccagggcatgaacaggagacctgtgatcatgtaaccgtaattggtaataagggctcaagacccattcagattttttagaccagatgctcaaagcagtcatctctctctagtttgtactgttatggggggactttgtgagagaaggcaggtaatgaaatgacccctaagtgtacctctttctcacagctcctcgggtttctgtattttcctacaggatccttcctgatcctctgtaactgtaaggcattatgcattttagcatccccttctctttggtaacacagcaaccatttcctaggcttctactgtgtgtgaagcccatgctaactcctgggcaggaagaccttcagtaaaaggcttagaaatggagtttatcctatcaacaaaagagagcaaggaaatgatgtaaaggcagtctattttcagagccagagaggaactgggagattgtagatagtttgtggttttcaattagaggcactgaaattgggggcagttggtgtcacaatcctaaaagaagttgtgagaagtgtttgtaggttagtcaggtagagtagacattagtagattctcttaataagttagaaaatgtttagctgaaacaggtatctttctgagtgctgacaggcctttaaacctgaactttttctttttcctcattttaagttcttgtgggtctaagtcttgggtgctgaaacccatacctcacaggctcccgtccccagggaaggccgccctacctgctggattgttgggcaaccacgcagtccctgatttttgccaggtggggtggaactcccagccaacacgagctgtgatcttcgaagactgtgctgtccctgtggccaacagaattgggagcgaggggcagggcttcctcattgccgtgagaggactgaacggagggaggatcaatattggtgagatacgcaggggtgtggcagggaggtagcggtccgggacaggcactgctgttttccagcttggttggaacgtcggcgctcttcccctctagcttcctgctccctgggggctgcccacgcctctgtcatcctcacccgagaccacctcaatgtccggaagcagtttggagagcctctggccagtaaccaggtaacctctgccttgcctccacatggctttgcactatttgcagcccgggacctgctctagggcccacatttccaggagagaagccaggaaattcctctgtcagtcccaccactgtcctagccagagcttgtgctttatttctgtccatcttttcttgggatatctttaacgatattaaagtgtcgggtgagtgaagtggacttagcacttaaaagcaataaatttcctctatagaaaaagcaagagactttgaagctttggatcacttagaaaaggcgcctccgagatgtcttaccgaggctcctgcaccaggtgctggtctaagcccctcagtcttgtctggttctctgctccctgtgctgcagtacttgcaattcacactggctgatatggcaacaaggctggtggccgcgcggctgatggtccgcaatgcagcagtggctctgcaggaggagaggaaggatgcagtggccttgtgctccatggccaagctctttgctacagatgaatgctttgccgtaagtgattcctctggctctcctgggatggacagggaacagctgctaggcccagcgggtcttgagagacatgagtcagatttggaacccagccctcctggaatcccacaaggatcaccttaagcttaaggatataaatgaactcatgagcggcctatgtgggagctctcatcgctggcttttaggcctgctgcatgccattatacacttcattatgtcactgttgtttggttgtgttctaggcgagaaaccacctttggaaggttcacagcagccccaatttagcactctgccatgtttacattgtcaggctgcattgccactagggggaaccatagctttttatcatcccagccagggtggctgtgggcagcttctgcctggcaggtaataagggagaggggcagagggctttgagtcgcctgtctggggggaactgacaagtttagtaggtgaacttcccttgtctctaaccatacagaatgtggaggccctctttgagcttggctgtttgtggttctttcatgggtttatggcgggctgccagatcgtgggctggggtaggaagggaagctgcttgctccacagtcttcccagagtccaagacgtctagtccctgtctccctgcagatctgcaaccaggccttgcagatgcacgggggctacggctacctgaaggattacgctgttcagcagtacgtgcgggactccagggtccaccagattctagaaggtaaaaattgccagaggttattctcttcccttcagaacggggacgggatcgctgctttccccactctctgtccccatgcctcctgggcctcagggtgcagtcaagccctgtctgtctcgaggcttcctcctccctcccgttccacagagctgttctggcaggggcctggagtccagagccgcagcttcgtccctttcggggggcctcagatcgctctgctgctgcccttttcctctggagatctgcgagaagggtgaactgagataatggatgagaaagcatgttgaaaaccacagccggggcttttctctaaggttatcgagtacgtggttctcagggatccaagaacagtgatggacaaggcaaatgtgagccagtatggtcatcagtagctctatattgattatcagccagatggcctaaaagatacctgtctcaatattactagtgtatttttcaataaaataaaccatcactatatgggtatcttcttggtagtcacagacattctatcgaggaaacatggaagccgttggggtcgggctcggagcctggctgtctccactctctacagccagtgcggaagtcttgaaatgacacgactcttggaaaagcaggaggggcagaggcttctttgagtgacttcggtgaagcaacgtgaggctgccttgctggaaacattatataatggggcttccctgcccctttcacagcacccttctcaaacctcagcctgtgctggaatcgcctggagggcatgggagcgcagattgcgggcctcaaccccagagcttctgctccagagggtctagtgtgggcctgggaatttgtatctgcaacaagtcttcaagtgaggctgccacagcttgtctgagaaccacactttgagacccaccgctctggtgttaatgtcagagtcacaggctaccacaggttagaccgctgctttcttctgcaaacctcattccagaaagatgtttatgggctcagtcgccagtgttcaaactgaattcccgagagtcgttttccttccattactcttggaattgctttctcactgagctttatgtgcgtaggaaacttcgccttcattctaactctctctccaccctgcaataataagcaggaaaacatttattgtaggccacaccatcacccacttacagaagaattggggcactcatcactgtatcactttgtttcatcatggactttactgttggataaatctacagtttatgctttatttgagacgatgtgactactgattcctcgagggggtttatatttctttttgcattaaaggccactgctaaaaatgaagcaaataattgataccctcctttcagggaaaatgttttcattcttttgtaagtcagttttctgattaccaaagaaatgtgtatttattgttgaaaccttataaaattaggaaaagtaggctgggtgcggtagcttatgtctataatcgccgcactttgggaggctgaggcgggtggatcgcgtgaggccaggagttcgagaccagcttggccaacccggtgaagccccgactgtctaaaattataaaaagttagctgggcgtggtggtgcatgcctggaatcccagctactcgagaggctgaggcaggaagatcgcttgaacccaggaggtggaggttgcagtgagctgagattgcaccatcgcactccagcctgggtgacagtgagactccatctaaaaacaatacaaaaaattagccgggcctggtggggcctggtggcacatgcttgtggtcccagctactcaggaggctgaggcaagagaattgcttgaacctggggggcggaggttgcagtgagccaagatcacaccactgcactccagcctgggcgacagcaagactgtctcaaaagaaaagtaaaagaaaaaaaatcactcatgtttctacatccagaatgttattttggtacatctccttttaggcattttactctgcctttgttggtacatttttaattttaattagaattatcctgtatatactgtttttattctgcctttttaaactttatataagcatttttaccatcagaagaagtttttaaaaaagtattatttcctgacatttttcagtactttgtagagaagtctctgataatctcatctctcccaggctaaaagcaatgattgtagtttaaatctgcagctactctgaactaggcctggagcagcctggtcagagctttactaaactctcagactttgctgctgtgaaattcttcctccttcctccctcttacaggtagcaatgaagtgatgaggatactgatctctagaagcctgcttcaggagtagaacccacacttgttctggcctggtgttcagtgcgactgcagtcagtgttgagtggtgccatgtgggccgctctattccaaaggaatcatggattagacccaagggctgagctcctctagggcaggacctgcaccctgtgtgttggcaccagcatcgggtcttggactggggcagaatccccagtggaaccggaagagctggactgatgagaaacatcagaagaacacatactaccttgttttcctaatgccagaagggtgaccagtgaagattcaccgtcaaaccatgaaagtcctttcttggatccactttatcttgattagtctgcattttactagttcactggatccctcctctaggggcctggggactttcactgatgctcttcctgattctagagcaaaggtgtgggaaggggaaatggaggaatgccctcctgtctgtgtcgttctctgtgccacagctacagatgcagaaggtttctctggatagcacacctctgaatgtaaatcatgataaaatggatatttggaaacttactcctaagctgtgatttagggtgtatttctacttctggactgcctcaatatcaagggctgagacttttgaattttgaatattcgttgggtttcatgttaagaagcctgtggtctaggagtgctattcagtgtttcttttcctgataaacactttgaatattttttttgtgtttttgtttccttttctgaagctgttcctccttttaaatatttttaatcacattgataaaatctatccttcaccacctctggttctactatagttgatttttattttaaatgtttaattgtatttgattaaacacttaactggattttggaataataaaactctcgtccaatttggcttttaaaaa

SEQ ID NO: 5757 - DNA, 989 bp, Homo sapiens
tttttcttctatgccggacgtggtggctcacgcctgtaatcccaccactttgggaggccaaagcgggtggatcacaaggtcaggagtttgagaccaccctggccaacatggcaaaaccctgtctctactaaaaatagaataattagccacgtgtgggggggggcgcctataatcccacctactcaggaggctgaggcaggagaatcacttgaaactgagagacacaggtttcagtgagcccagatggtgccattgcactccagcctgggcgacacgagcaagattccgtctctcaaaaaaaagaaaagaaaagaaaaaagagaagagaaaagaagaaagaaagaaaggagattttgtctaatagttgaatttactccatttatatgtattgggataacaaacattttggagcctacatcttaccatatttcatgtggtatttgtattgtaatacttttttattatatgggctgtgctatactttctttttctatactccctttctgggaagactctgggatctcttttttatttttcctttttttcctacgggaatggcaaatagtgttctcacacgtttatgagcggtggagtataatctaagaaactgtgatgaaagtacatcgaaccactgcacgtgcacaaattgacaactgcaccttatggtgtgtagagagatttacaacgctcttaactctttatgtggatactttgctctatgtgaaagactttctttttgttctcttaaatagccttcacacataatttaaacctgtggctctgggctgtggatcctctttcatcataatcctgaaacatcatttgtcttttttactgatggggcacaaagcactgatggatgataaaactgatgatgcctcaccatgagtcaaggcggcggcaccacactgtgatagtaaatgtagtaatagacgcatgtgctttagtaagaaccacacactccactaaaaaaaaaaaaaaaaaaaaaa

SEQ ID NO: 5758 - DNA, 985 bp, Homo sapiens
tttttcttctaggccggacgtggtggctcacgcctgtaatcccagcactttgggaggccaaagcgggtggatcacaaggtcaggagtttgagaccagcctggccaacatggcaaaaccctgtctctactaaaaatagaataattagccaggtgtggtggtgggcgcctataatcccagctactcaggaggctgaggcaggagaatcacttgaaactgagagacagaggtttcagtgagccgagatggtgccattgcactccagcctgggcgacgcgagcaagattccgtctcacaaaaaaaagaaaagaaaagaaaaaagagaagagaaaagaagaaagaaagaaaggaaattttgtctaatagttgaatttactccatttatatgtattggtataacaaacattttggagcctacatcttaccatatttcatgttgtatttgtattgtaattcttttttattatatggtctgttctattctttctttttctattctccctttctgggaagactttggtatctcttttttatttttcctttttttcctaagggaatggcaaatagtgttctcacaggtttaggagcggtggagtagaatctaagaaactgagatgaaagtacatgaaccatgcaggttcagaaattgacaatgcagcttatggtgtagagagagatttacaacgctattaactttttatgtggattctttgctttatgttaaagtctttctttttgttctcttaaattgccttcacagataatttaagcctgtggctctggtctgtggatcctctttcatcataatcctgaaacatatttgtcttttttactgatggtacagaaagcaatgatggatgataaaactgatgatgccttaccatgagtcaaggcagcggcaccaaactgtaatagtaaatgtagtaatagtcgtatgttctttagtaagaaccaagcacttcagtaaaaaaaaaaaaaaaaaaaaaa

SEQ ID NO: 5759 - DNA, 988 bp, Homo sapiens
tttttcttctaggccggacgtggtggctcacgcctgtaatcccagcactttgggaggccaaagcgggtggatcacaaggtcaggagtttgagaccagcctggccaacatggcaaaaccctgtctctactaaaaatagaataattagccaggtgtggtggtgggcgcctataatcccagctactcaggaggctgaggcaggagaatcacttgaaactgagagacagaggtttcagtgagccgagatggtgccattgcactccagcctgggcgacgcgagcaagattctgtctcacaaaaaaaagaaaagaaaagaaaaaagagaagagaaaagaagaaagaaagaaaggaaattgttgtctaatagttgaatttactccatttatatgtattggtataacacaacattttggagcctacatctcaccatatttcatgttgtatgtgtagtgtaattcttttttattatatggtgtgttatattctttctttttatattctccctttctgggaagactggggtatctcttttttatttctcctttttttcataagggaatggcaaatagtgttctcacaggtttaggagcggtggagtagaatctaagaaactgagatgaaagtacatgacccatgcaggttcagaaattgacaatgcagcttatggtgtagagagagatttacaacgctattaactttttatgtggattctttgctttatgttaaagtctttctttttgttctcttaaattgccttcacagataatttaagcctgtggctctggtctgtggatcctctttcatcataatcctgaaacatcatttgtcttttttactgatggtacagaaagcaatgatggatgataaaactgatgatgccttaccatgagtcaaggcagcggcaccaaactgtaatagtaaatgtagtaatagtcgtatgttctttagtaagaaccaagcacttcagtaaaaaaaaaaaaaaaaaaaaaa

SEQ ID NO: 5760 - DNA, 8252 bp, Homo sapiens
cagttggcagagttgccacaaaagccaccacctggagacctgcccccaaagcccacagaactggcccccaagccccaaattggagatttgccgcctaagccaggagaactgccccccaaaccacagctgggggacctgccacccaaaccccaactctcagacttacctcccaaaccacagatgaaggacctgccccccaaaccacagctgggagacctgctagcaaaatcccagactggagatgtctcacccaaggctcagcaaccctctgaggtcacactgaagtcacacccattggatctatccccaaatgtgcagtccagagacgccatccaaaagcaagcatctgaagactccaacgacctcacgcctactctgccagagacgcccgtaccactgcccagaaaaatcaatacggtgggtgggacaatgttcaggcccttaggaaccctattccgcactttgcaagttggtgggagggcaggtgctccaacttacacaagaaaaagtgagagcttgctcacctgacccttatgtgctctggttcaagcatgatggtggattagagcctgtgggttacaaacccaggctttaggctccagcagacaggcttcaagacctggcttcagtgcctgacataactgcacaaccttggcaagttactttctctgagtcttactttcttcacatacaaaaaggagctaatacaatatttgagctcacagatgattaaatacagtgacaaatgagcagcacttggctggcacctagaccactgagcaagtagtcactattacctaggaaccttgaggatgaaacttttcctttcctgagggtcacgagaaaccaatttccctctcggggttctgggtattttctctctctctctattttttttttttttttgagaagggctcgctctgtcgcccaggctggagtgcagtggtgcgatcacagctcactgcagcctcagtctcctaggctcaggtgatcctcttacctcagcctcctgagtagctgggaccaaggtacatatcactacgcctggcttttttttaatatttttggtagagatggggttttgccatgttgcccaggctggtcttgaactcatgggctcaagcactcctcccatcttggcctctcaaagtgctgggattacaggcgtgagccactgcacctggctccctgagttgctaagtcagactttctcgctgcatcttcctaaaggaattggagataaagctctcgatataatagaatagcatagaattttgtagaaatctcatattctgtcattttcatgaaatgtttcctactctatatccagaagttctcccattgcacatggcagctctacctgcctcacattctgttataaaatgttacagtacccagcactttgggaagaggcgagtggatcgcttgaggccaggagttcagggctgctgtgatcacaccactacactccagcctgggtaacagagcaagaccctgtctcaaaaaaattaaaatggggctgggtgcagtggctcacatctgtaatttcagcactttgggaggccaaagtgcgaggttcccttgagcccaggattcatgaccagcctgggcaacatacagagaaaccgtctctataaaaaataaaaattaattagctgggcatggtggtacatgcctgcgatcccagctacttgggaggctaaggcgggaagattgcttgagccctggagatcgaggctgcagtgagcgtaatcatgccactgcactctagcctgggcaacagagtgaaaccccgtctcaaaaaaaaaaaaaatttaaatgttgcagtaaaagtgtgtcatatcaatacttaaattaagaaaaataaaacccatcttcctgtaggttggaggctgccgtgtctgatggtggatacttctgctattcaaaagggaactctcccatgactcccaagcaccactgatgcaaaattttcatttcatgctacacactatatagttttattatgtcatttaatctctgtgttataaattaacacactacaggcctctcagttgctcacgcagtcactgccacagttctgccaggcttctccaacccacccgcacggcccagaagggagctcggaaagcagctggaactatcagggtgattaaaggagaaaccaggggacagagaggaagaggcactccacccaaaacatttaaagagacagcttgctttttttaaaattgccaattagccaggtgcaaaacaaaaacccatcatttagaaggtgatacctctattttcacttttctatttgcaaagaactggaagttcaacaaataaatgctcaaatcaaaactaatcaaaaattaaaactgttttaggaactgcatagacttctccgagccccaggccgatcctgctgtgtttaaccagcatgtactgacttgctgttttgcatgaggggactgacaaatttgtttatgctgcacattcattatgcagaagctgcagattttgctttacatcatgtttcctaaaaacatttttagactctgctgtcattctgcaagctgatgtgggttgggggtgcgtacagagtgcttgatggtttttggtgaagctcaattttgatccctacccatagtgtttgctttctggtgaaaataacttgatgatgcccaatcaccaatgcagggccaccctgatgatggggggagaggaagggcctgtagttaagagtacacagtatgctgggtgcctgacagacactcttcttcccgcccttcaagggtgaggaaatcaaggctcagcgaggttaagttactggccaaggtcaaccattttacaaagaaccgctgctctttttttccattcagtccattctttcaattaaaacccagtttctttctttaaggggaaaaataaagtgaggcgagtgaagaccatttatgactgccaggcagacaacgatgacgagctcacattcatcgagggagaagtgattatcgtcacaggggaagaggaccaggagtggtgggtacgtacgaatatccatccacttcatccgtacattcatacagcatgcctgggcaggcaccacattggagcctacagacagtgcagtaaaagagggctcttgagcacaaggaccctgtcagctgcatcactcacccaacagccattgcatttggtgtcttttctatgtcacacactattacatgctagaaaaacagccgtggagctggccgggcacagtggctcacgcctgtaatcccagcactttgggaggctgaggcggatggatctcgaggtcgggagttcgagaccagcctggccagcatggtgaaaccccgtgtctactaaaaatacaaaaaattaactgggcatggtggcacgcacctgtagtcccagctactcaggaggccaaggcaggagaatcgcttgaacccgggaggcacaggttgcagtgagatgagatcacaccactacactccagcctgggcaacagagcgagactccatctgaaaaaaaagaaaaacagccatggggctttgaagacaggtcaagagaattaacatttgtatgtactttacccatggtatcatgtaaccttgtgagttgtaggcattttctgatttttcatataaatactaaagcggaagaaagttgagcatgttgcctgtggtccctcagccagtaagcaggctaagtcaagattccagatcggccctgaccccagagcctatgtgctttgctcaccattccacactgtccccaggctgggaatcagaatgcccaagttcctgctcaggctgagcagttgacaagtcctcagactcaattcttaatccagtctgcagttctttctttgtcaaataggccaagacaccttctccacgtaattttaggaaaagattaaatgaaaatatctatgaaaactccttttacattaaaacctgcagctcaggcatcaggagggaaagacatcagcatcctcataggccctgctaggtacccaggctgtgagtgacctgcgagggcagtccacacatctattggttttcacgttgccagggagtaagtctcccgatgggaactgccaggccaaggtacagtgaataagccacctcttctgctctccttgttgatcatttcctgacatcagggtgaaaattccccttccttggcagcctgagccccgtcctgccaagagggactcagttctgtctgccaggaagggacctgaggctcgcagttgagccagcagtacctaagaatacccagaaatacatatgtatatacatgtgtgcacacacacataggcatgggcacacattcacctttgacttttcttccttcaggcctagacagtgacctcagattcttaatcacagctgtagggattttgtttggactcaactggggcaattttgccctccagggacatttacaatatctggaaatattgattgtcaggacctaggaagggggttgctaccaacaactagtagatggaagtttagtggccagggatgccactaaacatcctccagtactcagggagcccccacaagcaaggatgccagtagcaccatggttgagaaactggactgaagggatcagcctggggaggcccaggggtacctccagcctctgtcagcagagtggggccagccctggcatgaagcctgtcagagagtccacttcatctcatgacgaggaggtgggctctgaagcccccccacgtgaatcagttactagctctatgggccttggataaagcatgtcccttctgtaagcctcactttcctctgaaaaataggacatgattaatcgtttctcacaaggatgttgaggaactcactttgtaatctgttaatattattataatcaagcagtgatcatgttctttgctaagcaactgatgactacagcagagatacctgcggggaatgggaagctgtcattggtgtccctagcatcattcctaggggacattgtgtgtgccaccattacgtgcctcgccagatgtaaagatggtgccacacacacatgctaactgtgatgtgaaattcacaaagacctcacacatgcatgatgccaactaagaccacacgcggtgggtgggcaagccttcaggagagctgggcaggcctggttgactctgttccactcttaaaaccaccttcctctctatcgatttggcattggaagccaatatgcacgattttgttttttctattgaaggcccattacatgattctctttagtgcaatcaatactaatctaattgaggtaattagaaaatttttacaggtaactggcttacaggccaatgcagcagacaataaaattgccattcgccaccatcagtctcaaactttcacagtattcttcctccacggtaaccagaaaacaagtgatagtacatagcagccttttttttttttttttactggctagaacaacactttactcacaaagagaagagacagaacaagattagctttgatttgagtatggtaccccgcagtgggtcttgccaggcagctgacacagcttaatggtctgtatgcatcctacctgggctgtgggcaaagaaaccccttccttcccaactaggaataggtaatagtactgggattggccaggtgccatagcagccttttcatttgcttttttttttttttttcttttttaaatgtatcacacaagcctggagagaagggattttctttagccccacttaacagagaaaaggcttagcaaggtttgtgtgaggtcacccagctgtaaaggcagccaggcgccctggttcagagcaaggactctagagccccacgcctgtgggagagcatgtcacctctctgggccactgtcccttcatctgtaaaatgaagattgtaaactgtataagaaatatccacctcagggggttgctgtgtgggtacagcaagatccatgtagaatgctgagcatattggaagttctgtcgtttgctctttccttatgtagtttatgaccgttaagctctctgtagttcactaaagggtgggaagaagggtaagcctgggattccaccgccaggtctgtgggcagactaggctgggctcttacccactgggtttgtcgtggggccactgcctgctgcctccatcctgaccactctcttttctccctgcagattggccacatcgaaggacagcctgaaaggaagggggtctttccagtgtcctttgttcatatcctgtctgactagcaaaacgcagaaccttaagattgtccacatccttcatgcaagactgctgccttcatgtaaccctgggcacagtgtgtatatagctgctgttacagagtaagaaactcatggaagggccacctcaggagggggatataatgtgtgttgtaaatatcctgtggttttctgccttcaccagtatgagggtagcctcggacccggcgcgccttactggtttgccaaagccatccttggcatctagcacttacatctctctatgctgttctacaagcaaacaaacaaaaataggagtataggaactgctggctttgcaaatagaagtggtctccagcaaccgttgaaaggcatagaattgactctgttcctaacaatgcagtattctcaattgtgttactgaaaatgcaacattagcaaagaggtgggttctgttttccaggtgaaacttttagctccatgacagaccagcctgtagttatctgtgtacacagtttacagctacaaaaacctactttggtatttattacagaaaagtgctcagttaaatgtaagtgttattccttcagcaaaatattcactgacccaaaactctttatggcattttacaatgcacacagcctcatgcaagtttagacaagtggatttatactgtcttatgagtgcccgcccctgatatattacctcattatgcaaaaataacatatctttcatgactattttgacaaaagtttaaaacacatatgaagttcaaatttcaggaaccaaggactgccagaaaatattagcctctacattacgcatgcatttagaagcttacctgaaatctgccttttataaaggaatagtatggataagtggaattgtacattttttaaacttgattgccattaaagcagaaattataaggttgcaacaatatttgtttctaatcactggctttctcaagagtatggattgacatattgtgttatgaatgcacatctctcagatgtgttgaagcatccattgcatccattttttattattttcttagttttgttcttggacaaatttaaacttttaaaagattattcaagatgaatttaaaagtcaacccttcacacagtttccctactgtatgtagaatccaggtgctgaaaccaagtgtttcttttcccatgctctttgttaaaccccaattatagataatttttccagtcttaagctctgtccaccttcaagtcaattcataaccaagtttttgaacgctgctatgaattgcactgtgaaaagcactcttccctctcagttttcttttcatcccagccatgtttatcagatccttaagaacattgtatttcagtcttttacatcagtctgaattttggaaaagaatgcaatagttgtactccacagtcagtggaactgttccctgagtccgaggctcatgtgtcattctggcactacatttgcttaaattgctattttggcaacagcacagaaaactaatatttttaagcagagaatcttggcaatgagtgagagatgttaatttcacagaagcacaactcccaacccaacccttaggaaaagccctcttccatcgttacagtgctcagtgaatattaatttagttctgcttaagtggttgctatacaaactttgaatagccacctaataaataaaccttgcatgacaaacctgcaaaatattttatcagctgttattggaaagtgattttaagcaattgcttcctcagtgtcagggcacatgtgaatttccacaccaaacagagcatgaggaaccagttgacatgctgggttgtgactggcagctttagcagcctcggtactgaagccacaccagtgtccggatggaagtctgcatctgaggttgctcagtgtcccggtcattcatttacacattttaacttgcattaaagagctgttcttttctgtggcctagactcttttcactgatctcaaaataaactggtttttttcaaaaaaaaaaaaaaaaacaaaaa

SEQ ID NO: 5761 - DNA, 14425 bp, Homo sapiens
caggctcagccgtgctgctcttcctggccatgccaatgctcaccattgggggaatcctgtttctcatcaccaacctgcaggtgggagccttccctaatcccaggcactcggcagggtggcgggaaggtggagggaaggagagacccttttctataattggctgcctcagatggggttggcccaagctgaggtgggagctctagcggtggagggtgagtttgggtataaggagggtctgccacatgctgggtgctcaggaagtatctgtttcatgaataaataagtgatccaggctagtcctatcatccccagattgggaacctatttggccaacaccgttcgaccatcatcactctgtacaatggagcatttgactcttcctcggcagtcttccttattattaaggtaaatatagcaacagcctacattcactgggcacttgtatatgccagacacttgtcttgtgaacctgcattatttgtctccatcaactcggtgaggtaggtactgtgttacccccattttacagatgaagcatttgagtctctgaggttaaaaagcttgttgaaggttctgcagctagtagccatgatactggaacttgaacccaggcttgtcggttctagagcctgagcttgtaaccgctaagccccttcttcagacttgcccaagcttttgtggcagtggtcataatgtgcttgggccagtgttgggtagaggctgggggacctttagagtggggcgtttgctgctgtgagcttctagtttggacaagaaggtggcaagtggctagtgggtacagcaggggcagacacagaggcttgtccagctgtcccagtggctgatgttggggtatcaggggatgaactgttgccaaggctattagaggtcaatcaacaaccattctgtcttattcattgcgaacagttttatctgggcagtgacccgcttagcccaggggatgaatcctgattgattaaagccaaccatggcaatccatttacccgttgctagtgataggtggaggtcagcatatgatccagtcctttttaatgagataaagggagtgtatatagtggaagattcaaggggacttttcttccctgacgcaaggtgaaagcagagtaaaaacaaagtcttcctcattgaatgttgtggtgtgaggatgtgatagctggagttgtggcaaccatgcttcaattatgaggcagcaagctggaggactaaagccagcacaccacagatggctgagtgaaaggaagggaagagtgtggatctcaagccatccaacctgggacttctctctgggcttagtgttaggtcacaggcagttggcactgcctgcaggttatgggggcagagaagaggatctctggcagtcaccacccagacatgagtctagcttagtcccataagctttggaggtttggagggttatgcagagactgagcccctgaggcactcaagcctttctactcctggcataagagtcactttctgggttctccctccttcccctggagaacccagatggctgcctcatctttctttcctctctcttttttttttttttttattattgagttggagtctcactttgtctcccaggctggagtgcattggtgggatcttggctcactgcaatctctgcctagtgggtttaagcaattctcctgcctcagcctcctgagtagctgggactataggcgtgccaccacagtcagcttatttttgtatttttagtagagatggggtttcgccatgttggccaggctggtcttgaactcttgacctcaagtaatccgccttccttgacctcccaaagtgctgaaattacaggcatgagccaccatgcccagcctctctcctgtctctctagagttggaaggggaaagggagcaggaacaggaattcttagtttaatctgactttgctgctgcttactctgtcaatttattgagcaattcactgcacctctctggacctcaacgtcactctctgtaaaatgggaggaggttgggctaggtcggtggttttcaaactgagctgttgaggaacttagggattctctttgatgtcataccagtcaccaaggagaataaagagggagatgactggcaagctccccattggtgtgttttgtaagatgaatttttgtgtaaaattttctttgaacaaaaggcctttgctgtcgttgggggaaaaaaggcactgggctagaagatctctggggagccacacgaggaggctccaccggctgtggggatgggtcgtatgaggactcctctactgccgggtgtgtcttggggtgggtgggggcatgtgtgtaccaggtgtccctaatcagcttacaggatagtaggtgatggcttgtactaggactccttagaaaacagggttccagcccctgcctcttctgctgatgtttttgtatgcaataaaatatacataacataaaatttactatcttaacctttttttttttttgagacagagtctcgctctgttgcccaggctggagtgcggtggcaggatcttggctcactgcaacctccgcctcccgggttcaagcgattctcctgccttaaccacccgagtagctgggattacaggtgcgtgccaccatgccccactaatttttgtattttcagtagagacggggtttcaccatgttggccaggctggtctggaactcctggcctcaggtgatctgcttgcctcagcctcccaaagtactgggattacaggcatgtaatcatgtaatcatatcctctcacctcagcctcccaagtagctggaattacaggcgtgcaccatcacgcccagctgatttatttatttatttttagtagagatgaggtcttgctgtttcccaggctggtctcaagctcctggactcaagcaatcctcctgtcttggtcttctaaagcactagaattacaggcaggaaccactgagcttggccctgcatagtgctcttaaagttcatccatgttgcagcatgtgtcagaatttctttcctttccttttttttttttatttggaggcaaggtcatgtttcattgtccaggctggggtgcagtggcccagtcatgactcactgcagcctcaaacttctgggctcaagaaatcctcccactcagcctcctgagtagctggcactacaggtgtatgccaccacacccagctaattaaataaaaattttctagagaaggggtgagggtctcactatgttgtcaaggctggtcttgaactgggctcaggtgatcctcgtgcgtcccaaagtgctgggattgtaggtgtgagccagcatggttgcctctttccttttttaaggctgaataatattccattgtgtgtatagatcacattatgtttagctgttcatctgctgatggacccttagtttgcttccatcctttggctattgtgaatagtgctgctatgaacgtgggtgtgacactgactttttccttctccttctgcagcttctttatgaaaaaggcatcagcctcagggcctccttcatcttcatctctgtctgcagtacctggcatgtagcacgcactttcctcctgatgccccgggggcacatcccatacccactgccccccaactacagctatgggtaaggactatctggtgattgtgggccagagcccctcattggccctagggtgggatggacagggtaaagcaaacctatcacaggagaggaggaggactggagcagtgcatctgttagctattgctgcataacaaactatctcaaaactcagcagcctaaaatgttaagcatttattatttttcacaagtctgtgggtagctggctagttccgctgatcagggccagatgtagatgattttgacagggctcattcatacatctgatcatttggaggattacatgggggctggctatgctaggatggcctcactcacataggtttggagtgacagggatgcctgggtcacgtggctgtcatcctccagcaagccagcgtgggctcattcacaccgtgatttcagggttctgaaagagtgcagaaatgcacaagcgttcttgagatttaagcttggaattggcacagccacttctgctgcattcttttggctgaagcagttcacaaggctggcccagattcagggcatggggaaatagagctgcagtctcattcaaattgggggaaatacagaggaggtgaagaaatgtgatcatttttgcagtcatttgccacaaggagtagaggaagggcattcctttgctgctcacttactaattgtcagaccccatgtgctctctgatttcatcctcacaataatcctctgagatatccttatctccattttctaaatgcaaaaaatgaggctcagaagggttaagtctgagccatctttctgttgctaggaagaggcagagctgggatttgaacctgggcctgccctactcttttcatgcttcctaaactttgctgcttattagaatcactagattcacatagagatcttagaaaaggaagcctggctctcacctccagacattctgatttaactggtctggtctgcaacctgggcatcagagtggctaaaaggtgattccaaagtgcggtggaatgtgggattcaccatgctattccctccagtctgagtctcaggttcggctcacagtccttggccttgctggtggggcttttgtttccatagcctgtgccctgggaatggcaccacaaaggaagagaaggaaacagctgagcatgaaaacagggagctacagtcaaaggagttcctttcagcgaaggaaggtgagccctgctggctaacccatctctcctccagacccaagcctctccttgtgcctttcctggcccctcacctccagagctcccccagggacccagaatcaggaaaggcaggacagaaaaagggccttaggcatcttcccaaccctctcacttaatggagggtccagggctttcgtctcttttctgtccctcttttctctatttcgcatcctatcacttccccaccccttgaagcccgcctgccatgggttgccttcccttccccccactcctcggttctgccctcttctgtgatgccattgcactaagtctggtacagtgcccccatttctccaggtctcctgggtccgccctctcttattgtcccaactctatcactgcttcctttccttcctctctgttctgcgtctttggttacacacatcacaaaccgcagctagctacagtagaaataagaacggggtgggagaggagatgggagatgcaggtcgaaggacaaaaaggagcagatgagcaggatgaacaggcctagagatctaatgcacagcacgaagactgtaggtcatcaaactgcattgtgtttgggactttcctaaacaagtagattttaactgctcttgtcacaaaacaggtagaaatgtgagatgatggatatgttaatttgcttaactgtagtaaccatcttagtagctatatgtatcctatgacctcatattgtatatcttaaatatacagaataaaattgatttttttgtttttatttttaccatctgacaattggatccaaaacatgtatttatttatttattttaaagaaagaagaatagggttctgggaagcttccaaaatcaagggaggacattgaacttgccagggtgtaggacctattttagattaagtccatcctaatctaaactcatggccggtctgccttgttaggaggaaccatctcattggttaaccttgagagaggaacagaacactgaattcatggtcccatctggaccatgaagattagggtagaggaagatttcccaaagaaactcaggatactggtatcaaaagaaagggaggtgctgaggagcaggttagaacagagtatccacactcattctcctctcccttctgactttctcctctccttgtcgttcctttcacctttctcgctgagaaagatcaggaaggtattactgcaagaagtgtcattgaccaggctgtgagagacagatcggatttcaatagagaagaacacagagggtcatccaaggtggtagggccagcatgacaaagcagggaggtggggatgtgtgagtccgaggcaggtgcagagcacgccgggtgagttctgggagccaagggtagaaggtgggcccggatctgaaatgttccattgaagcctccacactccccatcctacctgtccactttcctcgtaattcacgcccagatcctcctctccccattagagaccccaggggcaggggcagaagcaggaactccgctccttctggagctacgctttctctcggcgctttgcctggcacctggtgtggctgtctgtgatacagttgtggcactacctcttcattggcactctcaactccttgctgaccaacatggccggtggggacatggcacgaggtatgtggtagggctgggaggtagcccatctgcatgtcccagctgggaacacagagcctcccagcagggctgtacacaccagaggagggtctgatggtgtggggaggagggacatgcagacaagggtaaggtgggagagtccctgcctggaagggagttttggaaacttctcatcaaccaacctctctcttccttctgcagtcagcacctacacaaatgcctttgccttcactcagttcggagtgctgtgtgccccctggaatggcctgctcatggaccggcttaaacagaagtaccagaaggaagcaagaaagacaggtgagatgcgggggagggcaggggctggtcagggaaccaggaagggaggtcttcatttaccccatgacatcttctctcgctcttttttttttttttttttttttttttgtgatagagtcttactctgttgcccaggctggagtgcagtggtgtgatctcagatcattgcagcctgcacctcctgggttcaagagattctcctgcctcagcctcccaagtagctgggattacaggcgtgtgccaccatcccccactaatttttgtctttttagtagagacggggtttcaccatgtcaggctggtcttgaactcctgacctcgggtgatctgcccgcctcagcctcccaaaatgctgggataacaggcgtgaagcaccatgcctggtcttctcttttgttcttaaccctgtctagttgcactcattcattcattaaaacactagtcactgagtgatagttatgtgtcagccatggtgccagacaccagggattcaatgacagacaagatagatgtgttctttttctcaaggtgttctcagtctagagggtggagaaaggcaggtagtcaggcagttataatccgtgaagcaaacccacagggggccatggggggcacaaagaagcgcacataatctgttctaggtgaggatgggattggtgtcagggaaggcttcctggagggaatggcacctaagccaagacctgaaggatgagtaaggagggaggagatgaagaggcggggccttggagagtggcccaggagcacagtggggtcaaaatggtgaatgagagagtgaaacattgaggaatctgggcagatgagtcgggctggctagggcacagagcactggggaatcttagggaagtggctggagagagagaggtaagaaggggtcaggctgtttaccacatcagggagttttggcctgatccttggacctggttggaggagtagaggtatgctgaggtattttaacctgctgggtcaggagggacaaaagtagactaacattttgcatacttatttcatctatcccttcccccacccatgcacctgcttctcccacacctgctagagttttcaaagcaaatctcagacatcgtatcatttcatccgtaaatatttctctatacccgtacatgtatctctaacaaataaggcctcttttacttaaacatcaccataaaatcatgatcacacctaaaaaataacaataatttcttcatatcatctactgtgcagtcactgttcaaattcctccaatcatttcaaatacatccttttacagttggtttgttccaattaggatccatgcctggtccatgcagtgtatttggttgctgtgtcttctatagcttttaaaatctagaacagtcctcccccctaccttttcttgtttatttgttgaagaaactgggtcatttccccatattttggatttggcgttgttttaatgtgtcatttaaaagtattcctttccttgggtatttcctgtaaacaacaggattagaagcttggaggaaacgcagtttaatttttttttttttttttttgccgtgaataactcagtggtagagctatgggtttcctctgttctcctgtcagcagcccctggtgtctgttgtcttgttacgatgttaagattgatcaactggtttagacattgcgagtctgatccatccactataaagtttcccatcaaccatatacttagtgattttaggagccattaatgatcaatgcctaggcccattatttcattaggatcgcaaaaggatgattttcttttctttctttttttttttttgagacagagtctcactgtgttgcctaggctggagtgcagtggcgtaatctcagcctactgcgacctccgcctcccaggttcaagcgattctcctgcctcagcatcccgagtagctggcattacaggcacccactacctggctaatttttgtatttttagtagagatggggtttcaccatgttggccaggctggtctcaaactcctgatctccagtgatccacctgccttggcctcccaaagttctgggattacagccactgcccctggccaaaaggatgattttctatttctatcttctacttttaatcactagaattcttctagaaagaaaaacattccttactattttgttacccagaaataaatgcttggcttacacatttatttaccagtctcaaatatgagttggtgccctagtgaccttcagggatggctactaattgtttcttttataatatttcattttaaaatatatttgacatgttttaatctgttctgtcatgattcttcttgatgctcaaattgtctcacctttggccattgaaaactttaccagcccagaatctgtgtcttttagatgaaatcacattatttctagagagtttccttactttctaacacaattaaatgttcaggtccatttcactaggtgtgtttcttgccctagacatgaaattgtcatttttcccaactagccctgggtttctttaattggaaatggtagagactacagtctggatgctgaggttttttattgctcctgggttgtcactgcttttgggttttggatagagttaacatatatataatttttttataagaaaaatatcataaatacttaatactgatatttttattcaaatttttatttccttgattttacatttgtagccctttctcttcctctgataaacttggttcctaacatatgcatatgtaaatgtacatacacatatatagtattttaaatataattactggttttaccaatattgatgttacttgataacaatacaattgctaaatactgttgctacttctttgtttccttttttctgtccttccttattcctttctcatccttaggatatatcccattagagatgtacagtcaaattgccatattttcttctttatttttagggatgaggtctcactctgttgcccaagctggagtacagtggtacgatcacggctcactgcagcctcaacctcctgggctcaagtgatcctctcccttcagcctcccaagtagcttggactacaggcatgcactaccatgtctggctaatttaaaataatttttttttttttttttttttttttttttttttggaaaaggaagggtctttgttgcccaggctgatgtctaactcctgagctcaagcaatcctcttgccctggcctcccaaagtgttgggattgtgggtgtgagccaccacactgggccaaattactgattttaagggtcactaatttggtatagagttatgttcattgatttcattttattttgtttctgatttttaaagattgttttacttgttttcttcctattattattttattttatttgtaaaacatttacatatcagacatttacattttcccaaaggtaaaactgtgaaacaagatatattcaaagaagtttactttccctctctgtttcttgtaccccttttcctcttctttaggtaaccatttttatttttttaaatataaacattgtgtaggtgtatatacatgtattagtctgttttcatgctgctgataaagacctatctgagactgggaagaaaaagaggtttaattggacttacagttccacatggctggcaaggcctcagaatcatggcaggaggtgaaaggcacttcttacacggtggtggcaagagaaaaatgaggaagaatcaaaagtggaaacccctgataaacccatcagatctcgtgagatttattcactatcacaagaatagcgtgggaaagactggcccccatgattcagttaccctcccccactgggtcccacccacaatacgtgggaattctgggagatataattcaacgtgagatttgggtggggacacagccaaaccatatcaatacatttccctctcttttagataaaaggtagtatactgtatacactattctgcagagttttttttttttttgatgtaactctatcctgagggtgctctgtagcagggacctctcatgccttttaaccactgcctgggtctccattacatggctgcagcatagttgccacagcattcctgtactgatgactatttggattgtttccagtcttttgctattaccagtagtgttacaaagaggatctggctacatgttcagggtggggaggggcagatgtgtagcctgtcaggagggtattgcagtaatccatgactgagttaatggtagtttaaagctaggatgagtcagtggggttggagagaagtgggcacatttgaatgatatgtaggaggtgaatgatcagcattattgatgagtttgaggtggggcatgtggggaaaggattcgaggatgactcccaggtttctgttgggacagtggatggatagtggctcctcccctttttccaatcttccttggcccttcgctgacttctgttgggttggcctacagagagcttctttttcctctctgttcgcccaggttcctccactttggcggtggccctctgctcgacggtgccttcgctggccctgacatccctgctgtgcctgggcttcgccctctgtgcctcagtccccatcctccctctccagtacctcaccttcatcctgcaagtgatcagccgctccttcctctatgggagcaacgcggccttcctcacccttgcgtaagtggccttggggcgggctctgtggagacggacacactggggcaaagagaagctggaggtaaagaaattgggaggcaaggcggggcctggaggcagtcaggtgcgggagactgggtttgggggcaggtgtggagggggtgagaccagaggtggtgggaaggatagaacattcatgcacttgagcctttacatctgcggtgccctctccctctgttttctacctggtgaactcgtattcatcctctgaggcccacttctgtttcagttctccagggaagaaatggaaaagtgtcttcccttctttgtgcccttagtactctagtcttacttcctttgctagtgcgtgcattgtctggcatgccatccatttacatgcctgtcttttctttcctggtgcagcctgcatgagggtcctgtctgtttttccagggccccgcatgtgccttcttctgggttctgtgggtcaaatgtctgagcagagctgaagagggaaaggccagacaggtgtggttggagggcaggcctaggacaggggagctggggacaagcggccgacagcccccagaggccaggcttctgcttggagggagggtccctgaagctcactggaacccctctggtttctctccccagtttcccttcagagcactttggcaagctctttgggctggtgatggccttgtcggctgtggtgtctctgctccagttccccatcttcaccctcatcaaaggctcccttcagaatgacccattttacgtgagtactgggaggatggggatccctggcaggaggcctgggccttaggccttggctgccccaaatctggctgtgatggcctgggtatgtagcatggtgcagcttcccaaagggtctgtgttattcaagtatttggggcaaaagtatttgtgtgtgtggggaaacagacattctggagtagggtggggaattctcacgaaacttcaagcaaaatcctgagacctcaaaggtgtttcctgcttgtggtgagtgcaggcccaccctggcctctcccctaggcccacacagggtttccacagttggccccagggacaggacctctgtgctttcacctctgtgtccttacacctggagggatgctctgaggtcctgctctaggaggtggtcgtgagtctcctgctctttgcagaaactgaggctcaaagaggttacttacgtgttcagaggcaccagctaaggagcaaaagtcaactttgaattctgtgttttgactactgcacagctctatttgcctcattttttatttttaaagcagcaaatcttagaataggagtttaaatccatcacttggagaaaagaaagactaaatgttttttgtttttgttttggagacacgatcttgctttgtcacccaggctggagtgcagtggcacaatctcggctcactgcagcctcgatctcctggactcaagcgatcctctcatctcagcctcctgagtagctgacactacaggcatgtgccaccatgccaagcttattttattttatttttttgatagacactggggtttcgctatgttgcctgggctggttttgaattcctggcctcaagcgatccacccgtctctgccttccaaaatgctgtgattacaggcgtgaaccactgtgcatggccaaaagagtaaacttgaaatctgaggcgaatgacttgattgtgacatcaggtgacctagtaatcagctgtgtattctagctggtgcctctaccagcttcccatgtgaccttgaacatgtcattgaatgctcgctaggcctctgtttctttatctgtgaaatgggcttgatattcctcctctaccccaaccgatagtgcagaatgaaaagtaactgaaagtccttcctccagggcaccatagtgtctgggtgaaaagtagaatataaactcggtagacttctggtcccttcattggtcatggaatggaccagtgcttgcttcattgagcaacagttctgttgttcagaattcctggatttcacctcacttctgctctccctgcaggtgaatgtgatgttcatgcttgccattcttctgacattcttccacccctttctggtatatcgggaatgccgtacttggaaagaaagtccctctgcaattgcatagttcagaagccctcacttttcagccccgaggatggttttgttcatcttccaccacctttgaggacctcgtgtcccaaaagactttgcctatcccagcaaaacacacacacacacacacacacacacaaaataaagacacacaaggacgtctgcgcagcaagaaaagaatctcagttgccaagcagattgatatcacacagactcaaagcaaaggcatgtggaacttctttatttcaaaacagaagtgtctccttgcacttagccttggcagacccttgactccaggggagatgacctgggggaggaagtgtgtcaactatttctttaggcctgtttggctccgaagcctatatgtgcctggatcctctgccacgggttaaattttcaggtgaagagtgaggttgtcatggcctcagctatgcttcctggctctccctcaagagtgcagccttggctagagaactcacagctctgggaaaaagaggagcagacagggttccctggggcccagtctcagcccagccactgatgctggatgaccttggcctgaccctggtctggtctcagaatcacttttcccatctgtaaaattgagatgaattttggtgttgaaagttcttcctggagcagatgtcctagaaggttttaggaatagtgacagagtcaggccaccccaagggccatgggagccagctgacctgcttgaccgaaggatttctgacagactatctttggggatgttttcaagaagggatataagttatttactttgggcatttaaaagaaaatttctctcgggaataattttatagaaaaataaagcttctgtgtctaaggcaa

SEQ ID NO: 5762 - DNA, 3141 bp, Homo sapiens
gctcgacggtgccttcgctggccctgacatccctgctgtgcctgggcttcgccctctgtgcctcagtccccatcctccctctccagtacctcaccttcatcctgcaagtgatcagccgctccttcctctatgggagcaacgcggccttcctcacccttgcgtaagtggccttggggcgggctctgtggagacggacacactggggcaaagagaagctggaggtaaagaaattgggaggcaaggcggggcctggaggcagtcaggtgcgggagactgggtttgggggcaggtgtggagggggtgagaccagaggtggtgggaaggatagaacattcatgcacttgagcctttacatctgcggtgccctctccctctgttttctacctggtgaactcgtattcatcctctgaggcccacttctgtttcagttctccagggaagaaatggaaaagtgtcttcccttctttgtgcccttagtactctagtcttacttcctttgctagtgcgtgcattgtctggcatgccatccatttacatgcctgtcttttctttcctggtgcagcctgcatgagggtcctgtctgtttttccagggccccgcatgtgccttcttctgggttctgtgggtcaaatgtctgagcagagctgaagagggaaaggccagacaggtgtggttggagggcaggcctaggacaggggagctggggacaagcggccgacagcccccagaggccaggcttctgcttggagggagggtccctgaagctcactggaacccctctggtttctctccccagtttcccttcagagcactttggcaagctctttgggctggtgatggccttgtcggctgtggtgtctctgctccagttccccatcttcaccctcatcaaaggctcccttcagaatgacccattttacgtgagtactgggaggatggggatccctggcaggaggcctgggccttaggccttggctgccccaaatctggctgtgatggcctgggtatgtagcatggtgcagcttcccaaagggtctgtgttattcaagtatttggggcaaaagtatttgtgtgtgtggggaaacagacattctggagtagggtggggaattctcacgaaacttcaagcaaaatcctgagacctcaaaggtgtttcctgcttgtggtgagtgcaggcccaccctggcctctcccctaggcccacacagggtttccacagttggccccagggacaggacctctgtgctttcacctctgtgtccttacacctggagggatgctctgaggtcctgctctaggaggtggtcgtgagtctcctgctctttgcagaaactgaggctcaaagaggttacttacgtgttcagaggcaccagctaaggagcaaaagtcaactttgaattctgtgttttgactactgcacagctctatttgcctcattttttatttttaaagcagcaaatcttagaataggagtttaaatccatcacttggagaaaagaaagactaaatgttttttgtttttgttttggagacacgatcttgctttgtcacccaggctggagtgcagtggcacaatctcggctcactgcagcctcgatctcctggactcaagcgatcctctcatctcagcctcctgagtagctgacactacaggcatgtgccaccatgccaagcttattttattttatttttttgatagacactggggtttcgctatgttgcctgggctggttttgaattcctggcctcaagcgatccacccgtctctgccttccaaaatgctgtgattacaggcgtgaaccactgtgcatggccaaaagagtaaacttgaaatctgaggcgaatgacttgattgtgacatcaggtgacctagtaatcagctgtgtattctagctggtgcctctaccagcttcccatgtgaccttgaacatgtcattgaatgctcgctaggcctctgtttctttatctgtgaaatgggcttgatattcctcctctaccccaaccgatagtgcagaatgaaaagtaactgaaagtccttcctccagggcaccatagtgtctgggtgaaaagtagaatataaactcggtagacttctggtcccttcattggtcatggaatggaccagtgcttgcttcattgagcaacagttctgttgttcagaattcctggatttcacctcacttctgctctccctgcaggtgaatgtgatgttcatgcttgccattcttctgacattcttccacccctttctggtatatcgggaatgccgtacttggaaagaaagtccctctgcaattgcatagttcagaagccctcacttttcagccccgaggatggttttgttcatcttccaccacctttgaggacctcgtgtcccaaaagactttgcctatcccagcaaaacacacacacacacacacacacacacaaaataaagacacacaaggacgtctgcgcagcaagaaaagaatctcagttgccaagcagattgatatcacacagactcaaagcaaaggcatgtggaacttctttatttcaaaacagaagtgtctccttgcacttagccttggcagacccttgactccaggggagatgacctgggggaggaagtgtgtcaactatttctttaggcctgtttggctccgaagcctatatgtgcctggatcctctgccacgggttaaattttcaggtgaagagtgaggttgtcatggcctcagctatgcttcctggctctccctcaagagtgcagccttggctagagaactcacagctctgggaaaaagaggagcagacagggttccctgggcccagtctcagcccagccactgatgctggatgaccttggcctgaccctggtctggtctcagaatcacttttcccatctgtaaaattgagatgaattttggtgttgaaagttcttcctggagcagatgtcctagaaggttttaggaatagtgacagagtcaggccaccccaagggccatgggagccagctgacctgcttgaccgaaggatttctgacagactatctttggggatgttttcaagaagggatataagttatttactttgggcatttaaaagaaaatttctctcgggaataattttatagaaaaataaagcttctgtgtctaaggcaa

SEQ ID NO: 5763 - DNA, 576 bp, Homo sapiens
aaaagtgagtcaacttaaaacattttagcaaataataggacaggcataggttgtggccagaataatggtgggcagaagtctggtttggggaggaagaatttgtcaagggttcccctagcccagctcttgagcttttttgctgtggtctcacacttaccagacctgttataaccatttgtttgcatgtcagtctatttaagggcaaggactatctgattcatcttgcatttccagtgccaagcacaatgcctggcaccaaagaagtgctcagagtttagtgaacaaagaaaagaccatggtccttttctcactcagttctcatagcacctgagacaggaagagcaggaactgttgttcccattaaacagatgattgaagctcaaggccaataccatgaattagggaatgggctagagggttgagccagggacctgagtccagggtcttcttttccaggagtgtcaaggatgaaagggagaggcagcttgtggtttactgagggaagagagaggtggcttcacttagagctctgcctctgtctgtagacttcctggcctgccacagactgaggaccaa

SEQ ID NO: 5764 - DNA, 379 bp, Homo sapiens
gtgaaatccatctggtctgctgggatcctgctcaaaatgtcatcttctccaaaaatcattactcaggctttccagcatgtctgagtccctggcacttggtcacacccttcctggtgactggcatttgcctccacatcatgaccctcccaccccttgcctgggcagcatactccaggaggcaaggtctgttctcgcctggctctaattaatctgtgcttaccatccacatggtaccagctaattcttgttgaatgaatgatcgttgaatgagtggattcttgttttggcctcagaaccaattagaaggagccagaaaaacacatgggggtgggggaggtgcagtgtggtgcagtggaaaaaaacccttctggaaatctca

SEQ ID NO: 5765 - DNA, 379 bp, Homo sapiens; identical to SEQ ID NO: 5764

SEQ ID NO: 5766 - DNA, 1297 bp, Homo sapiens
tttgaaaaacagagacaaaattagtgaactcaagtttgtgaactcaagataaatgctaaatttgacaccatggtaaatactactgttgagtttaaagttgtcccagaatccagcatattaattaaaagttactgatttctagtcctttattcatatttttatagcttttaaaaattattctttagattttgaaatgcttaaaactacagacttagaaaataatattcaaatatgtgtgatcaaccatctagaataaataaatgctaatctttgtcatttttgcatcagctattttaaaataattaaaatattagaaatacagttaaaatcacctttgttctgcttctagtccaacttatacctttattaaaatttggtgtgtgtatccatccaatctctgttttcagattgttttattatgtgctttaagtccacataaatgatctcatactgtatgtatcactgtagaattttttcttcaaaattgtatttttgaactttctgtatatatatatttctttaattttaaccattttatgaattctaaagtttatatatttccccaccttaatacattatttccaatttttcaattacaagcaatgtaatctaaaatgtacactttcgtatggttttcttctgtatatgtgcaatattttgtctaggatatatacctaaaagtggaattgctattatagagtgtgtgctttttcagctttaccacatattgctaaattgctgtctgaagcaaatgtggcagttcacactgctgtctagaattttctcatatccttattagattttgaattgtcagaccctgtgatttttactcttatgatggctgtgatatgcttttttgttttaatttgttcttcccttattatttatgggaataaatatattaccatgtttaaacagcatttggatttttttcttctatcaacaacatatataaatctttgtcaccaaatcagcttttttgaggtatgacttacacgtaataaaatgtgccaattttgagtgtaccattctctgaattttgacaaatgtatgaagctatgtatccatcaccacaattgagttacaaaacattttcagaatgccaaaaaaatgctccattgtggtaactgtcttttcccccattgaattaattttctcggtacattcgttgaaaattgattgaccacactatgtgtgaatctgtttctggactctattattctcttgatctataattatgccagtaccacagtcttgattactgtagctttacaataaatcttgactgtagatagtt

SEQ ID NO: 5767 - DNA, 8941 bp, Homo sapiens
caacggctagtcaacggctgcggggacaagtccgttgaggctgccaggcgagtcaggcctttctggacctcgcctgactcggatgggctgtgcctgaaattgacccagctccactagggattatgaagaaacaaggagtaaacccaaagccgctgcaatcttcccgccccagcccgtctaagcggccgtacggggcctcccccgcccgggagctggaggtggaaaagtcggccctaggcggcgggaaactgccagggggcgccaggaggtcctccccggggaggatcccaaatctgaaaaagcgaaaaggcttggagctaaaggtggtggccaagacccttctcgaccccttccagttcgtccgtaattccctggcgcagctccgggaagaggtgcacgaactgcaggcgcggtggttccccagcagaaccactctcagcatcggtaaggagagggcaggagagccctaggagggagccgcatggcgcttttcttgagtcttgaaggagatcagtttaacaagcaagggtttgtgggtgcctagtaggaaataatagcaaggtctgagtagaaagaagttggccaaaaatcttgtcattgaaccagaggagagagagagatagggagtatattggtttgaagggctgtcagatcgcagagagtgttttaaggtctaggagttttaaaggctgggggcaaggatcaagggaagaggatgagattaagattccaagagaggaaataattagtggagcaagtcttggaatatttggaggggtagagttaagggcacaaatttgataagctaactgtggaaaagaggagagagacttccttttctgagatggcagggagtagaaaagcgagaattactatatggagaaatgttaaagtggagataaaagaagttgggagtgctggcgtctaatggtctttgtttcagtgaagtatgaggctgggtcaccttcagaggtgagattgataggatgccggggtccgggggacatgcttctgtcacagcttggaaagggcatgtgataagcccttcaagcatttagaatactggcatcgttacaccatatcatttttttcagatgtggtatgtgggttaagggagggagtgagagacacagaaagattttgagcatctttggaaagctagatgaatttggtactatatttgaccttttccttatatatcatctgaagagttttttcagtgtatataattgttaggagaattagaaataggatacaaatatagttgaacaggatagtctctgtatattttaaaattaatgaagcctaataaacagttatgagcatctttacaaccatttaaagttttcaaccttttaaaaattatagcaaccgtgcttgcagacagtccaaaaatacaccatgggccatactttgcttatcctggtataaaacaagtaaatcttccgggaagtgtttaagataagcccaggacagttagtaatataggaaaagatctgggtaagcatggttgagaatttcaacattgcaattttttaatttttaaaaatttaatttcttcaataattattgaattaatttgcatttattttgttagccaagtgaagtaatttttgaatttttaagaggctattattggtggtttataagatgacttgccaagtatatttgggataaccataagaaatactattataaaatctcagaagggaggtaggacttctggaatagccaagaaaatgcactcctccatgacgacaatgaaaatacttggaaaattatcaaaatcattttcttcaaactttggaaattaaccaaaggtttacaacaatctaaagggcattaattcaagaaaagctgctgaacctctataagaacagcagagtttgtggtgttttaacttgttctattccccactcttctctctccaggggaattgaaaacaagcaattccccaaccaaacaggggcacaggctgcgtttgcagctcctgtaaaagctccatacccagagcagtgtctcccagctcccaggtgaagtcttatgtatacatggggcgttggcccacgtgactccagactagtctcctaggccatctagtagcttctaggtctgggctcttgcaaagagcttgcaattcatcaagggttgagctgcacattggggcttttagatgtgctgctgaggaagtgatttcctgcgtttaatcatcttctgatgaatggtagagaaactgatctagagtggctcctcttggttagaactagctgaagcatactgtatatacttacttcttttaaaaatttcttataaaggaatagaaaataatactgaaaaaaaaacaaaaaaggtcacaatcttccataattccatcactcttaccaattacctgaagtaaaaaaaccctctcaagtttctccctttacttgtcgagccctgctgcagagaggtaagctctgttcagaatttgctttgtgtcctggattttttcctatgctcatagagacaggattagctggctgtcttgctttgtgtgctatctttctagacatgtaaaataatacatttgaaatacttgttttaatggtattttataataaagcagctattaataactttccttttttttttattccagccatctttgtggcaattctacattggtaagatttagtttcagtttgaaatatttaaaaacttttgaattaaaaatcgccatcactctttgcatacagtaaaacaataacttctggctatatttgtagaacatctttatgtgcaccaatttatacatgtattttgcttttttacaaacctcatatgtgaaacagcatttacaaaatagatgcattaggggaatagtaacttacgaattaaaatatttttgctttaccaaataattcaccacacgtttctttaaatatctggcttctctagtgtattttgcatgtgtagttcatttaaaaccttcctttattttatggtaattatatgttgctagtgaaataacttttttttttttttttgagacagagtcttgctctgtctccgaggctggagtgcagtggcgtgatcttgactcactgcaacctctgcctcacaggcaccagtgatcctcgtgcctcagccttccaagtagctgggattacaggtgtgcaccaccacacccagccaatttgttgtatttttggtggagacaaggtttcaccatgttggccaggctggtgtcaaactcctggcctcaaatgatccacctgcctcggcctctcaaagtgttgggattacaggcatgagccaccacactcagccagtgaaataactttggtgataaagttttagtaacacctgccaattggaaatcaggtaaaaaagaagataaagattctgcagtggttatatggttaaatggctctgagtctttcagtgtgcaagtctgtgtacattattttacaaaaatgtttataaaaatttgtaaaataatacttccttctggaatattttctttttacctgtgctcagtgatttctacccttggaaggtatgagatctgctcctatgttctgttgacacagtgctgctctagacatttagtctgcagggagcttttgatgttagaactgaggctgcaatggtagggaatattcctgcagtttttggtaacctggcatatagcctacatgtaaagaagggttagtggaaaacagggttaatatatggaactttgctttattttcaacttcactggaaagtactgactacataagttagctatagcataattgttggccacagctaattttgtttatcacatatgctcctttcttcactgccgacagctgttgagtttcactactaaaaggtcttcaagtacacacctgtattctttggcacttgaaagttgatcccttatgtgatattatacttattgtaagtctgctttgatctaaggtaattttatttaaaattatattctgaacccttttcaacagttacggaggtatttcccaaggctggtacattagaatcacttgaaacttaaaaaacaaacactaacctgcctctgttctgatttagaggcctgggatggaaggaagggtgaaaaaagccacaagaattttagatatacaattaaggtgttttttttgtttgtttgtttttttgagatagagtcctctatctgactcccaggctggagtgcaatggcatgatctctgctcactgcaacctccacctcctgggttcaagaaattcttctgcctcagcctccctagcagccaggattacagacatgcactaccatggctggctaatttttgtgtttttagtagagacggggtttcaccatgttggcaaggctggtctcgaactcctcacctcaagtgatctgcccgcctcgggctcgggctcctaaagtgctggaattacaggcatgagccaacgcacccggccacaattaagcttaaaaaccactgagttaaggagtttcaggtgtgtgccatactggattataaatgcctaaaaacatacaagttagtaggcaaattataaaattaatattataataatttattgttttcttttttatggctttcttattgcttattttactgttagttttgaaacttgttcttattgtaatatgatacttaatttttttctaggttacatttagtaacactttttgaaaatgatcgtcatttctctcacctctcatctttggaatgggagatgacttttcgcactaaaatggttagatttcttcttctaacgaattaatttgtggtttaagaatagcgagactatgaggtagaaatgtattaggaattgaaatgaacttttggtgaattgcactgtttcataagctataacccaggtttattatttaaatagtaaagtgtttgagattatttttcttttacttcattatctctcaccctttcctaatgcagacttctttttaagataataaagatgaattataatagctgaggaaggaggacaaagaaagcactgaagaagtgataaaggggaatgaaatgagatgttatcagaaattgctttctctttggctacagttaggagatcccatgttttacctgggccttttaatgatgacgattattatttggctctcttttgatttcaagataatctcttctaagagataacttttgatataatttttaaataattttctgtttttcaatacttaatctttaaaatggagttttctgccgtacatatctcacataattattgtgaggagtaagtgggatagcaaatgccaaaattgcgcaattttacatttagaagacaccacaaccgtccatcttccagatctgctcacagctggtcgggcgcctagtgaagcattgaaactggctctcctcagtctagccattgctttttgtttaaattatggtaaaacttagatttaaatttgtaataaaaaatttcaatgtttatcctttaagcatacaattcagtgagattaagtacatttatgttgtcttgcaactattaccactgtccacatccggaactttttgctatcccaaacagaaactctacccactaaacactaatcacacccagctctattttctgtctctatgattttgcctatgccaggcccctcagtcactgctttttaattttcatccctatattgcccctataaagtttcaaagcattggatacattaacatatgtatgacatttgaacattttaaaggtatttccaaagacagaatataaaatattattaaataaagagcgtaactgtggcagagtctggactttggtgacagatcgctggattctaatagcagttctgtgctttattgtatgatggctagtcaggtcacctctcagattctcagtaatctcgtctgctcaatagaaataatgccaaccttagaggggtttagggaaaatgaagggagataatgaatggcaacacatagcagaatacttaacacaaaacaatagctgttattagtaacttatttatatatttaatatttccctaaatatagtcttttgcatattagatatcctttaattgttgtattgctttgttatcctcctaagcagaaaggaaaattctttatgaattcatattttgccaatcaactatgaggtaatggcctttcagacatcagctaaaacagacctgtaatttagtagttactcgtgttggatgaggcagatatgattatagcatatagcattttttagggagaatgcattttaaacaatgtggcccttttttgcttttagattttaggagtgaaagcaagaaattgttggggaaataagacacaacatgctgttgttaatccatgaattttaactcaacagcacttttactatcccaatgaagcctttattttatatgctgaagtataagacactaaaataagctgctttttagtacatagcatttgtgagcaacaatagtcaattgacattgagctttcactttgcacagaggattagatggagctatgaattaagctagaagcactggattccttgctcgtgatgcttatggtcattatattttatttcctaagagcatgggaaaaaaagtaattttctatatgcaaagttgtacagaggcatgaaggcatccctgtttatgatagaattaatcagatatcaaccttcaagcatctcaaatgtgggggataaaaccagatttgggaaaatcaaacatatactgtctacacattttaagacattattagagaaactctttaaattgtttgaccatccctccaactctttagtttgaaagcctatagaaaatttgaaagaatagtacagtgatcacctgaaaatacgtgttctttaaagtccaagaatgcaaaatagcgaggagtgattaagaagtcttattattaactttttttttcagaaaaaaagttctaaagaagtgataaaaataaatattttaaagttttaattccattgacaatatgtgccttttttttttttaaaaagggactttattattcctacttcaagaccatcattgaagcaccttcatttttggaaggactgtggatgattatgaatgacaggcttactgaatatcctcttgtaattaatacagtaaaacgcttccatctttatccagaggtgagtcataatttgagacaaataatatttgtagagtgatcctctttgtcagataaaaatagtaagcacaatcttgttaagaaagggaggggacgtttcaggtttactaattgtatgtatccttatagttgagtagagtatcataagttcctctcttaaaatttaaagaccccagaaactgttctctcatgaactcaaagaatgaaacttagtgtgtaaataatggccagggtaatagacaagccaaatggaaaagagagtcatgggagccaaaaagttctaaatagggatgggcttttggctttggacacctcatgggtgagcacgatgaccacgtgaagggacagtgagagtgatgagcttgaatagtgatcttggagttacgttagtaaagtaagatttatttagtcacacagccagaaatctattactattttccaacacttagcctaaaagagtatggttgttatagtagtctataaatgctagaaatttgaaaaacggagacaaaattagtgaactcagtttgtgaactcaagataaatgctaaatttgacaccatagtaaatactactgttgagtttaaagttgtctcagaatccagcatattaatgaaaagttactgctttctagtcctttattcatatttttatagcttttaaaaattattattctttagattttgaaatgcttaaagctacagacttagaaaataatattcaaatatgtgtgatcaaccatttaaaataaataaatgctaatctttgtcatttttgcatcagctattttaaaataattaaaatattataaatacagttaaaatcacctttgttctgctcctagtccaacttatacctttattaaaatttggtgtgtgtatccatccaatctctgttttcagagattgttttattatatgcttttaagtccacataaatgatctcatactgaatgtgtcactgtaggatttttttcttcaaaattgcatttttgaactttctgtatatatatatttctttaattttaaccgttttatgaattgtaaagtttatgtatttccccatcttaatatattatttccaaatttttgattacaagcaatgtaatctaaaatgtacatttttgtatggttttcttctgtatatgtgcaatattttgtctaggatatatacctagaaatggaattgttgttatacagtgtgtgctttttcagctttaccagatattggtaaattgctgtctgaagcaaatgtggcagttcacactgctgtctagaattttctcatatccttattagattttgagttgtcagaccctgtgatttttactcttatgatggctgtgatatgcttttttgttttaatttgtacctcccttattatttatggggataaatatatttccatgtttaataaacatttggatttgttcttctagcaacaacatatataaatctttgtcaccaaatcagcttttttgaggtatgacttacatgtaataaaatgtgccaattttgagtgtaccattctctgagttttgacaaatgtatgaagctatatatccatgaccacaattgagttacaaaacattttcggaatgccaaaaaatgctccattgtggtaactgtcttttcccccattgaattaattgtctcggtacaatcgttgaaaattggttgaccacattatatgtgaatctgtttctggactctgttattctcttgatctataattatgccaataccacactgtcttgattactgtaactttagaataaatcttgaaagtagatagtt

SEQ ID NO: 5768 - DNA, 8941 bp, Homo sapiens; identical to SEQ ID NO: 5767

SEQ ID NO: 5769 - DNA, 1486 bp, Homo sapiens
ggacacctcgtgggtgagcacgatgaccacgtgaagggacagtggagtgatgagcttgaatagtgatcttggagttatgttagtaaagtaagatttatttagtcacacagccagaaatctattactattttccaacacttagcctaaaagagtatggttgttatagtagtctataaatgctagaaatttgaaaaacggagacaaaattagtgaactcagtttgtgaactcaagataaatgcttaatttgacaccatggtaaatactactgttgagtttaaagttgtctcagaatccagcatattaatgaaaagttactgctttctagtcctttattcatatttttatagcttttaaaaattattattctttagattttgaaatgcttaaaactacagacttagaaaataatattcaaatatgtgtgatcaaccatctaaaataaataaatgctaacctttgtcatttttgcatcagctattttaaaataattaaaatattataaatacagttaaaatcacctttgttctgctcctagtccaacttatacctttattaaaatttggtgtgcgtatccatccaatctctgttttcagagattgttttattatatgctttaagtccacataaatgatctcatactgaatgtgtcactgtaggattttttcttcaaaattgtatttttgaactttctgtatatatatatttctttaattttaaccattttatgaattgtaaagtttatgtatttccccatcttaatatattatttccagttttttgattacaagcaatgtaatctaaaatgtacatttttgtatggttttcttctgtatatgtgcaatattttgtctaggatatatacctagaagtggaattgttgttatagagtgtgtgctttttcagctttaccagatattggtaaattgctgtctgaagcaaatgtagcagttcacactgctgtctagaattttctcatatccttattagattttgaattgtcagaccctgcgatttttactcttatgatggctgtgatatgctttttgttttaatttgtacttcctttattatttatggggataaatatatttccatgtttaataagcatttggatttgttcttctgtcaacaacatatataaatctttgtcaccaaatcagcttttttgaggtatgacttacatgtaataaaatgtgccaattttgattgtaccattctctgagttttgacaaatgtatgaaactatatatccatcaccacaattgagttacaaaacattttcagaatgccaaaaaatgctccattgtggtaactgtcttttcccccattgaattaattgtcttggtacaatcgttgaaaattggttgaccacattatatgtgaatgtgtttctggattctattattctcttgatctataattatgccaataccacactgtcttgattactgtaactttagaataaatcttgaaagtagatagtt

SEQ ID NO: 5770 - DNA, 3290 bp, Homo sapiens
actttttgaaaatgatcgtcatttctctcacctctcatctttggaacgggagatgacttagatgacttctcccactgaaatggttagatttcttcttctaacgaattaatctgtggtttaagaatagtgagactatgaggtagaaatgtattaggaattgaaaccagcttttggtgaactgcactgtttcgtaagctataacccaggtttattatttaaatagtaaagtgtttgagattatttttctgttacttatttcattgtctctcaccctttcctaatgcagacttctttttaagataataaagatgaattataatagctgaggaaggaggacaaagaaagcactgaagaagtgataaaggggaatgaaataagatgttatcagaaattgctttttctttggctacagttgggagatcccatgttttactgggtcttttactgatgatgattattatttggctctcttttgatttcaagataatctcttttaagagataacttttgatataatttttaaataattttctgtttttcgatacttaatctttaaaatggagttctctgccgtacacatctcacataattattgtggggagtaagtgggatagcaaatgccaaaattgcagttttacatttagaagacaccacaaccgtccatcttccagatctgctcgcagctggtcgggggcctagtgaagcactgaaactgactctcctcactctaaccattgctttttgtttaaattatggtaaaatttagatttaaatttctaataaaaaatttcaatacgtttatcatttaagcatacaatttagtgacattaagtacattcgtgttgtcttgcaactattaccactgtccacatccagaactttttttgctatcccaaacggaaactccacccactaaacactaatcacacccagctctattttctgtctctatgattttgcctatgccaggcccctcagtcactgctttttaattttcatccctatattgcccctataaagtttcaaagcattggatacattaacatatgtatgacatctgaacattttaaaggtatttccaaagacagaatataaaatagtattaaataaagagtgtaactgtggcagagtctggactttggtgacagactgctggattctaatagcagttctgtgctttattgtatcatggctagtcaggtcacctctcagattctcagtaatctcatctgctcaatagaaataatgccaaccttagagaggtttagggaaaatgaagggagataatgaatggcaacacatagcaggatacttaacacaaaacaatagctgttattagtaacttatttatatatttaatatttccttacatatagacttttgcatattagatatcctttaattattgtattgctttgttatcctcctaagcagaaaggaaaattctttatgaactcatattttgccaatcaactatgaggtaatggcctttccgacaccagctaaaacaaacctttaatttagtagttactcgtgttggatgaggcagatatgattatagcatatagcattttttagggagagtgcattttaaacaatgtggcccttttttgcttttagattttaggagtgaaaacaagaaattgatgggaaaataagacacaacatgctgttgttaatccacgaattttttttttaattatacttttaagttctagggtgcatatgcacaacacgcaggtttgttacatatgtatacatgtgccatgttggtgtgctgcatccattaactcatcatttacattaggtatatctcctaatgctatccctcccccctccccccaccccatgacaggccccggtgtgtgatgttccccttcctgtgtccaagtgttctcattgttcaattcccacatatgagtgagaacatgcggtgtttggttttctgtccttgcgatagtttactgagaatgatggtttccagcttcctccatgtccttacaaaggacatgaactcatccttttttatggctgcatagtattccatggtgtatatgtgccacattttctcaatccagtctatcattgatggacatatgggttggttccaagtctttgctactgtgactagtgacgcaataaacatacgtgtacatgtgtctttatagcagcatgatttataatcctttgggtatatacccagtaatgggatggctgggtcaaatggtatttctagttctagatccttgagattaatccatgaattttaactcaacagcatttctactatcctaatgaagactttattttatatgctgaagtgtaagacactaaaataatctgctttttagtacatagcatttgtaagcaacaatagtcaatcgacattgagctttcactttgtacagaggattagatggagctatgaagtaagctagaagcattggattccttgcccatgatgcttatggtcattatattttatttcctaagagcatgggaaaaaaagtaattttctatatgcaaagttgtacagaggcatgaaggcatccctgtttatgacagaattaatcagaggtcaaccttcaagcatctcaaatgtgggggataaaacccagatttgataaaattaaacatgtactgtctacacactttaagacaatattagataaactctttaaattgttggaccatacctccaactctttagtttgaaaacctatagacaatttgaaagaatagtacggtgatcacctgaaaatacgtgctttttaaagtccaagaatgcaaaatagcaaggagtaattaggaagtcttattattgaccttttttttttcagaaaaaaaatgtactaaagaattgataaaaataaatattttaaagttttaattacattgacaatatgtgcctttaaaaaaaaaagggactttattattcctacttcaagaacaatattgaagcatcttcatttttggaaggactgtggatgattatgaatgacaggcttactgaatatcctcttgtaattaatacagtaaaacgcttccatctttatccagaggtgagtcataatttgagacaaataatatttgtagagtgatcctttttatcagatataaatagtaagcacaatcttgttaaaaagaaagggaggggacctttcaggtttattaattgtgtgtatccttataggtgagcagaatatcataagttcttctcttaaaatttaaagaccccagaaactgttctcgcatgaactcaaagaatgaaccttagtgtgtaaataatg

SEQ ID NO: 5771 - DNA, 818 bp, Homo sapiens
ttttttgttgctcttgtatagaaatatagttgattttgaatattaactttgtacctgcatcttgatgcagtcagtggttctagtagcttgtttgtagaatcctttggatttttctatgcacgtgatgatagagtctataattaaaaagttttactttccagtagatataccctaaatgtttttaaacagctttattgaggtataattgacatatgatagctggtcatatagatgaagtgtaaagtttgattagttttggcccacctgtaaaaccatcaccagtcaagataatgagcatatccctcatcccgaagtttccctgtcctccttggtaatccctccttccttcgtctctctttgcccacatcccatccctaggaaaccactaatattctctgtcattatggtttagtttgcattttctagaattttatagaaatagaaacagagttgttctgtgcctaggtcttaatttatgcggttgactgagtgatgacacagatcagtgccactgaaagaagaatttatgactaatacttccttggagaagaggacaagtcacatcacacagagccacaggagagatacagtttggtcaggcagaagcaggactgagggtaaagcctaggccatcgcttttattggggtttctatgggaaagggaaaaccaggcagagtttaaaaaagaaaataaataaacaaaatcgaaagacagttgatacactgggagaagatatttgtttggtttctttttgtttgtttattttgagacagagtctcacttcattgcccaggctgaagtgcagtggcgtgatctc

SEQ ID NO: 5772 - DNA, 679 bp, Homo sapiens
ttttttgttgcttttgaatagaaatatagttgattttgaatattaactttgtacctgcatctcgatgaagtcagtggttctagtagcttttttgtagaatcctttggatttttctatgcacgtgatgatatattctgtaattaaaagcagttttactttccagtagatataccctaaatgtttttaaacagctttattgaggtataattgacatatgatagctggtcatatagatgaagtgtaaagtttgattagttttggcccacctgtaacaccatcaccagtcaagacaatgagcatatccctcatcccaaagtttccctgtgctccttggtaatccctccttccttcatctctctttgcccacatcccatccctaggaaaccactaatattctttttgtcattatggtttagtttgcattttctagaattttatagaaatagaaacagagttgttctgtgcctaggtcttaatgtatgcagttgactgagtgatgacacagatagatcagtgccgctaaagaagaatttatgagtaataatttcttggagaagaggacaagtcacatcacacagagccacaggagaaagacagtttggtcaggcagaagcaggactgagggtaaagcctagaccatcacttttattggggtttctatgggaaaggcaaaaccggg

SEQ ID NO: 5773 - DNA, 679 bp, Homo sapiens; identical to SEQ ID NO: 5772

SEQ ID NO: 5774 - DNA, 6217 bp, Homo sapiens
ttttctttattccagccgtctttgtggcaattctacattggtaagatgtagtttcagtttgaaatatttaaaaacatttgaattaaaaattgccatcactctttgcatacagtaaaacaataacttctggctatatttgtagaacatctttatgtgcaccaatttatacatgtattttgcttttttacaaacctcatatgtgaaacagcatttacaaaatagatgcattaggggaatagtaacttatgaattaaaatatttttgctttaccaaataattcaccacacgtttctttaaatatctagcttttctagtgtgttttgcatgtgtagttcatttaaaaccttcctttactttatggtaattatatgttgctagtgaaataacttttttttttttttgagacagagtcttgctctgtctcccaggctggagtgcagtggtgtgatcttgactcactgcaacctctgcctcccaggcacaagtgatccttgtgcctcagccttccaagtagctgggattacaggtgtgcaccaccagacccagccaatttgttgtatttttggtggagacaaggtttcaccatgttggccaggctggtgtcaaactcctggcctcaaatgatccacctgcctcggcctcccaaagtgttgggattacaggcatgagccaccacactcagccagtgaaataactttggtgataaagttttagtaacacctgccaattggaaatcaggtaaaaaagaaggtaaagattctgcagtggttatatggttaaatggctctgagtctttcagtgtgcaagcctgtgtacattattttacaaaagtgtttataaaaatttgtaaaataatatttccttctgaaatattttatttttacctgtgctcagtgatttctacccttgggaggtatgagatctgcccctatgttctattgacacagtgctgctctagacatttagtctgcagggagattttgatgttagaactgaggctgcaatggtagggaatattcctgcagtttttggtaccctggcatatggcctacatgtaaagaagggttagtggaaaacagggttaatatatggaactttgctttattttcaacttcactggaaagtactgactacataagttagctatagcataattgttggccatagctaattttgtttatcacatatgctcttttcttcactgcctatagctgttgagtttcactactaaaaggtcttcaagtacacacctgtattctttggcacttgaaagttgatcttttatgtgatattatacttattgtaagtctgctttgatctaaagtaattttatttaaaattatattctgaaccctcttcaacagttatggaggtatttcccaaggctggtacattagaatcacttgaaacttaaaaaacaaacactaacctgcctctgttctgatttagaggcctgggatggaaggaagggtgaaaaaagccacaagaattttagatatacaattaaggtttttttttgtttttgtttttttgagacagagtctctatctgtcacccaggctggagtgcagtggcatgatctctgctcactgcaacctccacctgctggattcaagaaattctcctgcctcagcctccctagcagcgaggattacagacatgcactactatggctggctaatttttgtgtttttagtagagacggggtttcaccatgttggcaaggctggtctcgaactcctcacctcaagtgatctgcccgcctcgggctcccaaagtgctgggattacaggcatgagccaacgtacccggccacaattaagcttaaaaaccactgagttaaggaatttcaggtgtgtgccatactggattataaatgccgaaaaacatacaagttagtaagcaaattataaaattaatattataacaatttattgttttcttttttatggctttcttattgtttattttactgttagttttgaaacttgttcttattttaatatgattcttcatttttttctaggttacatttagtaacactttttgaaaatgatcatcatttctctcacctctcatctttggaacgggagatgactttttgcattgaaacggttaggtttcttcttctaacgaattaatttgtggtttaagaatagccagaccgagaggtgacagcatgctggcagtcctcagagcccttgcttgctctcggcacctcccctgcctgggctcccgctttggtggcatttgaggagcccttcagtcccccactgcactgtgggagcccctttctgggctggccaaggccggagcccactccctcagcttgcagggaggtgtggagggagagacacgagcgggaaccggggctgtgtgctgcacttgcgggccatctggagttccgggtgggcgtgggcttggtgggccccgcactcagagcagccagccagccctgctggccccgggcaatgggggacttagcacctgggccagtggctgcggagggtgtactgagtcccccagcagtgctggcccaccggcgctgcgctcgatttctcgctgggccttggctgccttcccacggggcagggctcgggacctgcagcccgccatgcctgagcctcctacccaatccatgggctcctgtgcggcctgagcctccccgacgagcaccaccccctgctccacggcgcccagtcccatcgaccacgcaagggctgaggaatgcgagcgcccggcacaggactggcaggcagctccacctgcagccccagtgcaggatccactaggtgaagccagctgggctcctgagtctggtggggacgtggagagtctttatatctagctcagggattgtaaatacaccaatcagcaccctgtgtttagctcaaggtttgtgagtgcaccagtcaacactctgtatctagctgctctggtgagggcgtggagagtctttatgtctagctcaaggattgtaaatacaccaatcagcactctgtgtctagctcaaggattgtaaatacaccaatcggcactctgtatctagctcaaggtttgtaaacacaccaatcagcaccctgtgtttagctcaaggtttgtgagtgcaccagtcgacactctgtatctagctgccctgatggggacgtggagaacctttgtatctagctcagggattgtaaacgcaccaatcagcgccctgacgaaacaggccactcggctctaccaatcagcaggatgtaggtggggccagataagagaataaaagcgggctgcccgagccagcattggcaacccgctcgggtccccttccacactgtggaagctttgttctttcgctctttgcaataaatcttgctactgctcactctttgggtccacgctgcttttgtgagctgtaacactcaccatgaagatctgcagcttcactcctgagcccagcgagaccacgagcccaccgggaggaacgaacaactccagacacgccaccttaagagctgtaacactcaccgcgagggtccaccgcttcattcttgaagtcagtgagaccaagaacccaccaattccggacacaagactatgaggtagaaatgtattaggaattgaaatgaacttttggcgaactgcactgtttcataagctattacccaggtttattatttaaatagtaaagtgtttgagattatttttctgttacttcattatctctcaccctttcctaatgcagacttctttttaaggtaataaagatgaattataatagctgaggaaggaggacaaagaaagcactgaagaagtgataaaggggaatgaaatgagatgttatcagaaattgctttctctttggctacggttaggagatcccatgttttacctgggccttttaatgatgacgattattatttggctctcttttgatttcaagataatctcttttaagagataacttttgatatagtttttaaataattttctgtttttcaatacttaatcttaaaaatggagttttctgccgtacgtatctcacataattattgtgaggagtaagtgggatagcaaatgccaaaattgcgcaattttacatttagaagacagcacaaccgtccatcttccagatctgctcacagctggtcgggggcctagtgaagcattgaaactggctctcctcagtctagccattgctttttgtttaaattatagtaaaatttagatttaaatttgtaataaaaaatttcaatgtttatcatttaagtgtacaattcagtgacattaagtacattcatgttgtcttgcaactattaaccactgtccacatccagaacattttgctatcccaaacagaaactctacccactaaacactaatcacacccagctctattttctgtctctgtgattttgcctatgccaggtccctcagtcactgctttttaattttcatccctatattgccccataaagtttcaaagcattggatacattaacatatgtatgacatttgaacattttaaaggtatttccaaagacagaatataaaatattattaaataaagagtgtaactgtggcagagtctggactttggtgacagatcgctggattctaatagcggttctatgctttattgtatgatggctagtcaggtcacctctcagattctcagtaatctcgtctgctcaatagaaataatgccaatcttagaggggtttagggaaaatgaagggagataatgaatggcagcacatagcagaatacttaaaacaatagctgttattagtaacttatttatatatttaatatttccctaaatatagtcttttgcatattagatatcctttaattgttgtattgctttgttatcctcctaagcagaaaggaaaattctttatgaattcatattttgccaatcaactatgagataatggcctttcagacatcagctaaaacagacctgtaatttagtagttactcgtgttggattaggcagatatgattatagcataaagcattttttagggagaatgcattttaaacaatgtggcccttttttgcttttagattttaggagcgaaagcaagaaattgttggggaaataagacacaacatgctgttgttaatccatgaattttaactcaacagcacttttactatcctaatgaagcctttattttatatgctgaagtgtaagacactaaaataatctgctttttagtacatagcatttgtgagcaacaataatcaattgacattgagctttcactttgcacagaggattagatggagctatgaattaagctagaagcactggattccttgctcatgatgcttatggtcattatattttatttcctgagagcatgggaaaaaaagtaattttctatatgcaaagttgtacagaggcatgaaggcatccctgtttatgatagaattaatcagatgtcaaccttcaagcatctcaaatgtgggggataaaaccagatgtgggaaaatcaaacatatactgtctacacattttaagacattattagagaaactctttaaattgtttgaccatccctctaactctttagtttgaaagcctatagaaaatttgaaagaatagtacagtgatcacctgaaaatacgtgttctttaaagtccaagaatgcaaaatagcaaggagtgattaggaagttgtcttattaacctttcttttttcagaaaaaaagttctaaagaagtgataaaaataaatattttaaagttttaattacattgacaatatgtgccttttttttttttaaaaaagggactttattattcttacttcaagaccattattgaagcaccttcatttttgggaggactgtggatgattatgaatgacaggcttactgaatatcctcttgtaattaatgcagtaaaacgcttccatatttatccagaggtgagtcataatttgagacaaataatatttgtagagtgatcctctttgtcagataaaaatagtaagcacaatcttgttaagaaagggaggggacgtttcaggtttattaattgtatgtatccttatagttgagtagaatatcataagttcctcttaaaatttaaagaccccagaaacagttctctcatgaactcgaagaatgaaccttagtgtgtaaataatggccagggtaatagacaagccaaatggaaaagagggtcatgggagccaaaaagttctaaatagggatgggctt

SEQ ID NO: 5775 - DNA, 674 bp, Homo sapiens
ttttttgttgcttttgaatagaaatatagttgattttcaatattaactttgtacctgcatctcgatgaagtcagtggttctagtagcttttttgtagaatcctttggatttttctatgcacatgatgatacagtctgtaattaaaagcagttttactttccagtagatataccctaaatgtttttaaacagctttattgaggtataattgacatatgatagctggtcatatagatgaagtgtaaagtttgattagttttggcccacctgtaaaaccatcaccagtcaagacaatgagcatatccctccatcccgaactttccctgtgctccttggtaatccctccttctttcgtctctctttgcccacatcccatccctaggaaaccactaatattctttttgtcattatggtttagtttgcattttctagaattttatagaaatagaattgttctgtgcctaggtcttaatatatgtggttgactgagcgatgacacagatagatcagtaccgctaaagaagaatttatgagtaatactgccttggagaagaggacaagtcacatcacacagagccacaggagagagacagtttggtcaggcagaagcagtattgagggtaaagcctaggccatcgcttttattggggtttctatgggaaaggcaaaacaagg

SEQ ID NO: 5776 - DNA, 838 bp, Homo sapiens
gtaagtgctaggcagagtgacctttcatctgatgctaagcccctacaagtttgagaaggtaagaaaagatgaaggagacatatattaggtcagctcttacttttgaaaatgttttatttgaagaaacacctgtagcattgaggtgactgaatgcctccacttatttcaggaaaacgtatccaaaaaaagttgaaatatttggacaactttttttttaagtgccatcgatttccctagcagcattctaaaagatagcaagtaaaatgatgtttgttatcctaaatgctttagttttaggtcatttattaattttcttacaggtgcactttctagtacatgaagtatcctttgtaattaatgtgtgccatatgtttattcccatttagtataactataaattatattttaaattatatatttttaggatagttatattttttttgggttctacgacattgaagttggactagtgatttatttgaatgctgaatcctagtataggggaatataatcttatattttaacaggggtcctctatgggaaaataggatgaactttgtttcccagaaattgttaagtgatgaaaaacttcaaaataattttcctgcattttctgctttatttacatgtaaagtgaattccctgaaaattggatttaaaaagcattctccttcaatgtgcctttaccttgtagctttaacaacttttctgttaaatatgtagttttttattaaacaatgttattaaataaaaacatttatccactgattttattactgttccaatgtaacacattttctacttcatcactcttctgttaccactcttaaatgtctta

SEQ ID NO: 5777 - DNA, 2454 bp, Homo sapiens
tatacaaactcatatacatacttaaattggtacggtggtgtatgtgtgcgtgcgtgtgtgtgtgtatgtgttgtagtcctcaagatgaagttaaatatagactttaattaccctgcaatgaatttaaaacacattctgtatgcttaaactttgagtgcgttggctgtgaaatgtatacatatataaagaggatacctactaaacccaccttaatcataaaggaaaattattttttgttagaattgcttattaaataggcatactttatactgtggtttataatttcaaatataacttggggttatggtcctattcactaagagaatgaaagatatccatgagttaaaagaacaaaactaaaaatttcagatctaacaattgaaagaaaattgaggcagtaaatgacctcttttactcttttatgttttacaatattatcatgttatttacagttaatgctgaaataattctcaagtgcaggaatataaatgttaagtggttttatgattccaagctgatatatttcacctgttaaaaattatgctgctaaattagcattagaggccttatgtttggtaattacaagtgtctgggctattggcgcgtctctatatatgtgtgtgctttgttccagtttcttcaaattatctatgtataattgtatgaaatatttaaatagcaaagaagtcaaagaagattgttaaatattcaacaagaatcataaatacctttatatgtattttaaaagtattgggctgttctgaacatgattatgctggtctgtctgtcttttagcctgactccttcactcttgtgtgtgaagtctattagcaactttcaataagctaagcaatgttgtaacttgcaaaaaagcctccactctgagaaacagggccttatagagtaggaatgttttcatactgggactactgaaattttgcagatgtgtgcatctgttccatttaaggtgcccttaaatgtgttgaatgtaatgtgttgaatgtttatgtgtaatggctaaagtatctatatgtatgtgcataaaactgtcacaagatgtattctcaggaatactgttacctggagtttgaaaggaataactattaaaaaaaaaagttggggaagattagaaaaaagctcaagataaatgttcaaaatattattaagtacatgactaaaagctaattactacatatgataaatgcagtgttggtaatagtagatcatttcttaagccatgatacttaatgatatttatcttattcagaggaaaaacaaaaaaggtacccacttcccatgtagaaaaaattagactcagcaaagaggttgcttcttctgaaattagcttttgagagaccttggaataaaccatgtgttatccatgatagtatgactcagatccaattaaaacagtttaaattctggatataggatctcctatagcaaaacattttactttcatttttcagtatttgctgctttctagaattctattagataagctatgtcatttttctgaaaaagaaactgagttattgagtgtattaagacaaggcactgagaactacagtgtcaaaatcaaagggcataaatgggcatggcagtgctggtggaaaaatctgtggtactggtgatctggttagggcctgttgcacaggctgggagtaactggtttgctgtttcaagcctccaagagtaccttaaacaaggtgatagctcctctcttctttagcattatattcctttagtcaacaaagaactttctccactctgctgcccagctctgagagtatctgagatgagaataggatgtgtgtggaggggcttttagggaagaaagggtcataaatgaatagaagtacagtctgaaacatgaattaaatatccttcctcaagttataaaggatactttaatagaacacagtctccagaattcgctgctatcacaccaagtcatgctgttgccctgtgacctcacacttcccattccatggccttgtcttggcagggagtaaaaaatcccacttctttttactttagtgggtctcaactgcagcatttcagaaacaaattttgatttgacactcaggagaataaaaacaagttgagggcagaatgtatttggaaaagcttaagacaaatttactgatattattttatgatcatttaggattacagatcaatttacctccataaatctttgaattgtcactgtgaccacaggatgaaaatcctttattagccattttataggttaaaacaaaaaattgactacacagccgacttccctcagataactatgaagtctattatgagtactgaatgaccaaagaacatggaaaaaatgcatatgaataaatactgaaatgtttatgaaagatatttatgaaagatattaagacttctgtgtttaggtatgcacatatgataaaataaatctaaaaacattaaaga

SEQ ID NO: 5778 - DNA, 779 bp, Homo sapiens
caaaatagcactttacttctaatgggtggcacaaatctgaataggttttgctgccaatacacatgatgtttcataaacatcttaaaagtcaatggctaaaaggatttagttgtgtgaaaatcacaaaaccagggaggaataaggggaaagagccatttcactgcacattgtttatgattcaagaagccttcagcagttaaaaatatatactattcattgctgctttcatagaaatattaacaaatgatatgatctaaaaatagaatgcaattttttgagattactcacattatacatctcatgcaaatatttatttttatagtttaaaaaatatcaattcaggttggctatacaagtagcaatttacataaaaaaataattaataggaaaaatattactttggggagactaaataacaagcctgcagccatttttgttttgagtaacaatacagccatttagaagaagaaaaaaatactatatagagagctgtggacttttagatatttatttttcaactatcattttcattgcatgttgtaaatcaaaatgcagatggcataagatcatcccatttcataatctatcacattagaatattacagaatattctagaaatcatcagaaataattctgaattaagaacctaaacagcctatacaattataaaaactaaatgtatatataatcacttaaaagagatggtattcctattcctagccctgactacatcaataccaagattagaagctattggaaaatgtgattagtaatacttt

SEQ ID NO: 5779 - DNA, 3861 bp, Homo sapiens
cagcagctcatcccagctccagtcgtggactgtccagccctcctttgaagtgatctcagcacagccacagctcttattccttcatccacctgtaccatctcctgtcagtccatgtcacactggtgagaaaaagtccgactccaggaactacttgcccattctgaattcttacaccaaaatagccccacatccaggcaaaaggggcctttcccttggcccagaagaaaaaggaacaagtggagtgcagaagaaaatctgtactgagagacttgggcctagcttgtcttccagtgagccaaccaaggctggtgctgtcccatccagtccctcgacgccagcaccacccagcgccaaacttgccgaggactcagctctgcagggtgtgccctctctggtggcaggtggaagtccacagactcttcagccggtatccagcagtcacgtggctaaagctcccagtctgaccttcgcttcccccgccagtcctgtctgcgcatcagacagcactctccatgggttagagagcaactctcccctttcaccactgtccgctaattatagctcacctttatgggctgcagagcacctctgccgcagcccagatatcttttcagagcagcggcagagcaaacataggcgctttcagaataccctagtagtcctacataaatctggtttgctggagatcactttgaaaaccaaggagttgattcgtcagaatcaggcaactcaggtagaactagaccagctaaaggagcaaacccagctgtttatagaagccaccaagagcagggcccctcaggcttgggccaagctgcaggcatctttaacacctgggtccagtaatacaggcagtgacctagaagcattctctgatcacccagccatatagcacagaggcatattttcctgttacttgagtggttcttttagctcatttgctgttacctactcctgtttcccaaagcttatgtaagagcttttccttctaaacttaaactgtgttgtggttcacttaggaagccacgtgccaatacctggctgctgtcttaactcgtagtctgggcacaggatacatatgtccccgtcccactgaggacctcagtttgggagtgcccttgagccccttttccttagcctgcaggtgcttcaatggatcatggggcaaagcaggagatgattgtgtggggctcttcctgctgtcacctcccatcatcccactctctcaccaggatcaagggtacagtaacacgaatgagcatacagagcaacacctgttgagccagggagtaggtgacacaaggaaaccttcatggatcttcccttgcctgtcttagtcacagagagaaataagaggaggttgtttgcatcccacaaggcatcgtactagttgggcgagacctaaaattccctgggcacaggttgcacctgggtgtgagcacttaatcactcaacgctttgttttcttacacttgaaaatcaagggaaagagtagtaccatctgactcctacactttcattacaagtcagatttttcttaaactagcaggcaaaaacagtacttccaaattttaaggtatggaatgaatgcagtacatctggaattgtagtcgatgaattgcttttttgacttagaagctgaagaaaatagacatagccggcatatctcatggtcaggagctggacgattctggtaacttaggctttttttctctcttcttttgaaacagtgtaacctgttttatgtctaaaaatcttaaggatagtttcagtggttcctgggatgtagtataagttaactctgctgccatcttgttttttttttttttcctttattttgataagtgattattatgcttgataaactttgaattaaatacagttgtcttgagggtatgataagtccacaaaaaattggaaagcatcttacccattttcttcacatcccaaatttttatttgttccatgtcatagtgatgggaagcagttacagagcagcgtcttctgtgtttccttcatgtgttagatattggcaacaaagccagaggtgtaatgttggttatatgaagttcatctcaaaatggagaccatgaccagagtttccagatgatacacgttcttttcagcttcattaaataggcaactatgtttctaaatagtaaagtttcaaaatattctctcaatttaaaatttcatcctcttgaaaatctttgttctttacaaaattatcttaataagttctatatggtcagcttcatcttccttttttttttttttgagatggagtttcgctcttgttgcccaggcggagtacaatggtgggatctcggctcactgcaacctccgcctcctgggttcaagtgattctcctgccacagcctcccaagtagctgggattacaggtgcctgccaccatgcccagctaatttttgtatttttagtagaaatggggttttaccgtgttggccaggctggtctcgaactcctgacctcagttgatccgcctgcctcagcctcccaaagtgctgggcttacaggcctgagccaccacgctcagctcagcttcaccctgtctgcaaagaaaagttttaccaagaccagaagttaaatatgacatttcctaggtagttgtaactctaacatagtttaaaaagtatgtggcttcagattgcctatactttgttcacaaacgtgtgatttagatatgactgatgtagaagtgaacaacttggtaacatccctagactccactcatgaacgcagaattattacctgctgtttgctttctgaaagaatttcagaaatcagagcaaatgtgtctttaggcagattcagctccttttaatatttttctcttggcccactctctttgcttcccctgaatctgtgtggtactatagcagctctactctgtgcaccatgctaggaagcttcctttttggcagaatatgtttggcagcaaagctatagagacaggtgcattcagaacatcctgggcaccagtcatgagtcttactgtgtcaaaaatctgaaaacacttgctgagaaccaaatttattccattggaaaaaccctctgtggagctataagcctcttggactcttcttcctagattaaggcttgcatttccctccctgtttcagtaaaagatgatgaaagccactatcaatcctcactgctgagtggcagggagaagcagcaccactctcagctcttttctaatcttgtaacttagtgctagaagtctctccaggctattaccatgggcatttgttctctgttggagctgtaagcagatgaacccaagtagagaagatagatcttggaaggagagatccattgagtccagaagccagatcagcaaatggaggaacctcggaggtgaccagaaagatctccatcggttgcccaaggctgtaagtagtgatggttttagcgatgaataacgtaattggctatgaagtactgtggcagagctgctgttttctgaaggtgagaagccatttttagctcagagcaacccttaagagaacttttggcagattttgttggcattattgaaatatatatagaaaagttgctgattgcaatggttatgggaatggaatttaatgacatttgtaatttattacactcattggtttttattgattatagtattgtctgactttttattttctactatggttcctttagcagaaaagtaacttttgtgcatatattgaagtggtttttcagctatgaattctttagggtagaaatttatttagcaaatgtgaattcttttgagaaagtatgaagttttgcagaaattgactgtgaaatgtcagagaaaaataaaagtcacttacttgaaaccta

SEQ ID NO: 5780 - DNA, 291 bp, Homo sapiens
gttgttgtttttgaaaccaagtcttgctctgtcactcaggctggagtgcagtggcgcaatctcagcttactgcaacctccacctcccaggttcaagcgattctcctgcctcagcctcccaagtagctgggactacaggcgcacaccaccaagcccagctaattttttgtattttttagtagagacggggtttcacacgttggccaggctggtctcgaactcctgacctcaggtgatccacctccctcagcctcccaaaatactgggattacaggcatgagccatcacacct

SEQ ID NO: 5781 - DNA, 474 bp, Homo sapiens
agaaataatctctcaagctcttcgtacaaagtttgattaagagagagtgtctgcaactctctgctttgctcccagctgggtctgctgttctagtgagcgccagcagttattctcgttttctgcagtattcccaggctgccaaaaggctctgctctgtaagctgagaaagactcaacagctacaacactggtgttcacagcagcaaggtttatttcctcacaagatgatattcctgggtttgcatacgtttgctcttttcagtgaaccatgtcctctaaatgtcaccttgcttccattcagcacggtctgtgttccgactgtccaggggcttccaggaacagcccacagattgatggcttgctgaaagctccctcgttatctttcactgtaaattcctttcatcagtaatctcttgtgccctggatgcagcacttctttgtacgcgtgctgtgaaataaaatctcagataatgtg

SEQ ID NO: 5782 - DNA, 1820 bp, Homo sapiens
atctttaggtttttcctatagaaaacattcttcctccatcagtagccctttatttgatattcagaagtggaaagctttttcattctccagtagaacttttaaaaattgttacagatacctagctcttcacagatatcatgtactgtaaacagtcatgtgtcttaattttattttctctatttgagtgcataattatcctaataatcccaaagacactgacaactcaaggaacagcagtacagtactattagaagttaagtatgttgttgttatttcacatttcatttaattgtggataaatgttagacatctgttgaaataagctcatatggtggaaacgacaactatattatgaattattttcagaaatggatctttgaatagcagatcaggatttaaataataaaattatctatgaatcacttttatggtcatacatatatgatacaaatccagagttattggtgcagaaatggctacccgagagcttggtaaatttgccttggtttcttatgttaaatgtattgtgcttcccttctgtctctagaatgtggctcttcagaagacagacaatcgacatttaaatttttccaaacaatgaaaaactaaattaaaaacattgcttgatatttcatttaaaattgcaccttgcttaaggtttactgaataactgaaatgtcagcaatttaaaataaattcaattgtgtgataaaatatctcacctataatagaagaaaaggaaaatcatattatttggcaattttgcagcattgtggttgcctaacaggtatatccagcagatgagaaacagtatgaaaggattgtattaacatggtaagttttgccctaaggaaaacgatcttgcattctggattcttgcagcaaagtctcagatacttaatacgttttcttgttttatcatctgttctatgattcggcttcactttgtgtggttattgaattatgtaacagagatttggttttcccaaaatgttatcacatttgaaactatgattgctttgtgttcagtccttttggaacacgtagcttccagcttaagggtagagaaatatatacctaaaatcatcaatacatgaaagaaaaaggatggaaactatgtcctcagttttacttctaccaaaacatccctgtatgtgtgtgcatgtatgttggcgtgtgtgtgtgtgcatgcatattagtaaatgtgtgtttgcatgtgtgtgttggggagtgtatgtgatctgggtgtttgtttatctctgttattattcccctttagctttattttagtcaactctacattatgatgaatttcaaaatgaagctgtattaaaataattgtaatataacaattcaatctcacatgttactgcagatagttaacttttgctgcaatctattgtacatttgcaattttctgtgttagtaaacttagcagaatctggttatttatttttgtgtaggcttaatgttcactgaaagataagtcaattactgttagtaaaaaattaaggtactctcactgcagagatttaaggcctgggcctaatgtgctgtattatgaagccttgtgactgaaaaatatgtttacatatgttgtctatttttttaataaacttttatagctggtctatttgctcagtagctttgatcctctcttgattattgtgactatagtttgcaatggtttattttgtattcaataagaaaaattgtgttaataaagattattgtttaataagccaggtattaacctgctaaatatattaaactgaaaatcactaaatgagtcattcaattaaatacatcaaaaaaggtag

SEQ ID NO: 5783 - DNA, 1821 bp, Homo sapiens
atctttaggtttttcctatagaaaacgttcttcctccatcagtagccctttatttgatattcagaagtggaaagctttttcattctccagtagaacttttaaaaattgttacagatacctagctcttcacagatatcatgtattgtaaacagtcatgtgtcttaattttattttctctatttgagtgcataattatcctaataatcccaaagacactgacaactcaaggaacagcagtacagtactattagaagttaagtatgttgttgttatttcacatttcatttaattgtggataaatgttagacatctgttgaaataagctcatatggtggaaacgacaactatattatgaattattttcagaaatggatctttgaatagcagatcaggatttaaataataaaattatctatgaatcacttttatggtcatacatatatgatacaaatccagagttattggtgcagaaatggctacccgagagcttggtaaatttgccttggtttcttatgttaaatgtattgtgcttcccttctgtctctagaatgtggctcttcagaagacagacaattgacatttaaatttttccaaacaatgaaaaactaaattaaaaacattgcttgatatttcatttaaaattgcaccttgcttaaggtttactgaataactgaaatgtcagcaatttaaaataaattcaattgtgtgataaaatatctcacctataatagaagaaaaggaaaatcatattatttggcaattttgcagcattgtggttgcctaacaggtatatccagcagatgagaaacagtatgaaaggattgtattaacatggtaagttttgccctaaggaaaacgatcttgcattctggattcttgcagcaaagtctcaggtacttaatacgttttcttgttttatcatctgttctatgattcggcttcactttgggtggttattgaattatgtaacagagatttggttttcccaaaatgttatcacatttgaaactatgattgctttgtgttcagtccttttggaacacgtagcttccagcttaagggtagaggaaatatatacctaaaatcatcaatacatgaaagaaaaaggatggaaactatgtcctcagttttacttctaccaaaacatccctgtatgtgtgtgcatgtatgttggcgtgtgtgtgtgtgcatgcatattagtaaatgtgtgtttgcatgtgtgtgttggggagtgtatgtgatctgggtgtttgtttatctctgttattattcccctttagctttattttagtcaactctacattatgatgaatttcaaaatgaagctgtattaaaataattgtaatataacaattcaatctcacatgttactgcagatagttaacttttgctgcaatctattgtacatttgcaattttctgtgttagtaaacttagcagaatctggttatttatttttgtgtaggcttaatgttcactgaaagataagtcaattactgttagtaaaaaattaaggtactctcactgcagagatttaaggcctgggcctaatgtgctgtattatgaagccttgtgactgaaaaatatgtttacatacgttgtctatttttttaataaacttttatagctggtctatttgctcagtagctttgatcctctcctgattattgtgactatagtttgcaatggtttattttgtattcaataagaaaaattatgttaataaagattattgtttaataagccaggtattaacctgctaaatatattaaactgaaaatcactaaatgagtcattcaattaaatacatcaaaaaaggtag

SEQ ID NO: 5784 - DNA, 1821 bp, Homo sapiens; identical to SEQ ID NO: 5783

SEQ ID NO: 5785 - DNA, 5251 bp, Homo sapiens
tttttttttttcagtagagacggtatttcaccatgttagccaggatggtcttgatctcctgacctcgtgatccacccgcctcggcctcccaaagtgctgggattacaggcatgagccaccacgcccggccaagtggaatgaattttcaagagcattgaagttaccataaggggcctagaaatactctgtatacctatatagtgctctaggtattgactagtagtgatttccagcatatcagttcagttaccaaaataaataataatattgttcatttttgtggtgttagtagctgtcttagaagagattgtaacacttgaaattttggtaaaactaaaaatactctacatacattaacttcattactcattttctgtttttcatgttaaaatgttgtttaaagaacaaaattaaatgattttcttctgatattttattctgtgaatgtattttgggaatttttttccccattttccttctacactttatttggtatgtcatcatccttagatttgatatgtagtaggtttagagaatatctttgctttttacatttttttcataagttttatatatgaaatatcatggaaagaagttctaggttataaatatattaataatggcatatatacatttatagcatctctgttttcatcaaactgtttcatagttctattataatttttattcacagacatttaatgattacccttaatattcatgacaggagccctctggcacaaatggaagaagaaagaagggagcaagtagctaaaattaagaagatggagatggagatggagcaggtgtttgagatgaaggtcaaagaaaaagttcaaaaactgaaggactctgaagctgaggtaatcagtccaatattccatctcttagcagacattgtgttcctttttaaatagtatcttcagtaaaatttatagataatataaccttcttatacatattttttaaaaattaataccctagcataacaaaatggagaaatttctacaagcaagcactgtttacaataaaataatatagacttcaatacataagtgcttggacatagtgtattaggtatgacagcataatagagtacttacaatgaattattaaagttataatgaacaagtgtgagttgggaaaaataaaattataagccattccatacaggtggcataagaacactaaaaatgagagtttggggtggatgtatgcacaaaaactagtgttaggataataataattgaccagacttatttgtgtatgaatgaaaaagagggaaataacctttactgaactaaagacatgcctggataaattacacacagttaaaggagagaaaattagggaatgtgatatttttgctaacaggttgggccttatttataatgtagtgtcaaggaaactcctagcgtcgcaacattgggcagggtaatgacaaaacatcccagcagacatatctactatcttgaaacccttctagatgtcgagttatacatttagtttctattagtcaaaaagaccttggagacatttccttcattaggtggcaagaaagaaaagatggagaaaaggataaacttaatataagaatccacagagcagtagtttgatagatatctgagaatagtaggaaaaaaattgggtaatcccaaaataaatcagtgatttcagtatgaagttttctcaacataaatctgctataattaaaaattacaggccttcaggaagtgtcgagtctgggacgcccagcgcgggcccgagcagggggaagggaagcgcagctcggtccgcgtgggtggaggggacgtgaagccgccctgagatgatggttgaggaagggctctacggctcccaagctaggccaaatgcctccggcggccgcgcgccgggcgccccttcccctgtggggcaaccctagcttgggacgcgtgaaccacctccgtagctgccccaccagcacccccagccgtgcgcccctgcaccatgcagctgccctgcgcatggagccgcgagggacagcaggcccagccctcagcaccacctgcctgccaggaggttcgggaaactggcgccgcagcggagagggcatctgtccaacgcctcccccggggctcagctgcgggcccccaggcataggcacccatgacccttctgtgttgtttgtctttgtatagtctgcagatgtggatcctgactcctgagagaagtagctcaccgtgacgaagctgcgtttgcttttatcgatttgcaaatcaaagaagggggacatattgggagaaggccccccaaaatctgccataaactggccacaaaactggccataaaatctctgcagcactgtgacatgctcatgatggccataacgcccacgctggaaggttttgggtttaccggaatgaaggcaaggaacacctggcctgcccagggcagaaaaccacttaaaggcattcttaaaccacaaacagtagcatgagcgatctgtgccttaagggcatgttcctgctgcagataactagccagacccacccctttatttcaggccatcccttcatttcccataagggatacttttagttaattgaatatctatagaaacaatgctaatgactggtttgctgttaataaataagtgggtaaatctctgttcggggctctcagctctgaaggctgtgagacccctgatttcccactttacacctctatatttctgtgtgtgtgtctttaattcctctagcaccactgggttagggtctccccaactgagctggtctcggcacttctctttgccttaaaaacaggtacagcggaccttcctggcatcagaaaaaggcctccagaaaaagagacacaggtactagcaattccaaattatccagagcccttctaagttgtaagatctgaaagaaatgtctgccatctatattctcagccacacttagtttcttaatctgcaagatggaattaataatagtacttactttatgatgctgttgcagaaattcactgagttgctacacgccaaacactgagaacccagctgggcatataataagcattctattgcatggcattattgcatcatttttacttctattactgctactgcttgtaactgcttgtaactgtttgtgcttttttgatatgaaagtccaccatcagggagcactgtagtggaaaaggtattaggccaggcatagctcttagttctctggccttgggtccttcatctgtgatattcagttaacaatacctagccagtaggggtgttaaagattaaataaatgtgagaatgtgcctgttgcttaatcttcctcaaagggttatggactctcagagccagaagaaggtcatctctcctttgctcctcgtatgctgggatctgccacatcaatggcaacagctgggcctccagaatttgctccagggtgtttggaagtcctgacaccctcctgatcttctctgtaacatgcacactttggcctgtgtcagtttgctggaaccacatcaggccggccctcttcctgggacaaaattctttctttttctttctttctttttctttctctttctttctttttctttctctttctttctcttttcccttccttccttccttccttccttccttccttccttccttcccttttcttttcttttctttctactgtgacataatcttggctcactgcaatctctctctcctgggttcaagtgattctactgcctcagcctccaaagtagctgggattacaggtttgcaccaccatgcccggctaattttttgtatttttagtagagacagtgtttcaccatgttggccaggctggtctccatcacctgatctcaggtgatccacccacctcagcctcccaaagtgctgggactacaggcatgagccaccacgcctggccgagagacagttaagttatactttaaatgataataggcctcccccaaaactcagctgcttttgtaaagctaatgggaggccatcaggctgggggcaaggaggagagcccggatcctgctaaggtgcagacataaacgagtatcagccattattctggaggttataagatatgcaccttccccaattacccctgcaatcacaccattattgtagattggcccttagagtatcttttcaggttttttggcatgtctgacactcatggctctacttggacccaccaaccctgctcctatggctccacccagaagccattcagcctagaggacagctctgaccccccctgtgatttcatacaatcagcagcaagtaactgttacctcaccatccccaccccttctgccagactgcctttgaaaaacctctaacctgtgagcacgagatgattccagaacaaactctgtctcccatgtggcatgaccagccttgggtctcttaaactttttctccactataatgccatggtctttatgcagcaggcaggaagaattcaggtggttataattccgtatgtgctttttgaacatttttctactgggctattgctctcttcataatgatttttttaacttctctctataaggaactgatttcatctgaaattgaagagacaatcagagaaaaactatagaccactcatgatggttgttatatgtgcttggctgggccatgggtcccagtgtttggtgaaacacagcagcagatgtccctgtgagtagatgttgctttgaaggtatcttttagatgtgatgaacatttgtcatcagtagactttgagtaaggcagatagcccgtcacaatgtggatgggccttatccaattagttgaaggcctttgaaaaaagactgagatcccaaacgaagaaggaattctgcctccagacagccttccaactcaagtagcaacattacctcctccctgcggctctagctgctggcctttcctatagacttcagacttgccagccccacaatcatgtaagccaattccttaaaataaattctctgtcctgtttttgccccctctctctttctgacagcacacacatgccctcttggttctgtttctttgaagaaccccaggaaaacacacaaaggaaaaacaactcgatagacagaagattcttcaatgacaacaatggaagccatcttcaccattcaactaaacttgaatgggatattatcaaacttaaaaaaaaattatcaactgatcgtgtaatcagtttcatcttttaagacaggaaatgaaataaagtatttacagatgaatgtaaaa

SEQ ID NO: 5786 - DNA, 105 bp, Homo sapiens
ttttttttttttgagatggagtctctctctgtcacccaggctggagtgcagtggcgtgatctcggctcactgcaagttccacttcccaggttcatgccattctcc

SEQ ID NO: 5787 - DNA, 8297 bp, Homo sapiens
ttttttttctttttttttttttttgagacggagtctcgctctgtcgcccaggctggagtgcagtggcaccatctcggctcactagaagctccacctcccgggttcacgccattctcctacctcagcctcccgagtagctgggattacaggcatctgccaccatgcccggcaaattttttttttttttttgagacggagtcttgttctgtcgcccaggctggagtgcagtggcatgatctcggctcactgcaatctccgcctcccgggttcacgccattctcctgcctcagcctctggagtagctgggactacaggcgcccgccaccgagcacggctaattttttgtatttttagtagagacggggtttcaccgtgttagccaggatggtctggatctcctgaccttgtgatccgcccgcctcggcctcccaaagtgctgggattacaggcgtgagccaccgcgcccggccgcaactctcttttttcattcagcattgttttatgagagtcatccaggtgactttgtgtcatgttcatttattttaactgctttatgaaattctcttgtgtgaatacatgaccacagtcccttctcagcaatgctaaaaatctaaacatctctgaaaccacagtttttggttttgtttttaacctatttggtggccaaaacctcaccaggtaaagtttaatagcctctaccacttagtatagatacctaacacatttcagtgaagaaataacgtctgatgatggggagtgcccccaaaccccagtgaggctgttacatggtaaattgtgccaaataatcgttgtacattgaagaattctgaattccaaaacccatctgcccaagggttttaaacatgcagttctgtgcgccacagtcccttggtccacgctgctgttgaatgaacgctcaggtgggtggcttccacattcctgccgctttgaacggtgcttctgtgaacagcgttgtctgtgtttggtgcatcctggtgagtttttctagaatataaatgtattaaaagtagaattgctgggttgtgaggagcacacatgttcagctttgtaaggagtaccagattgtttttgtagcacagtccgttctcctgataccagagtagaaaaagttgaagtgaacttattctttgctaagcattggcattctcagtctggtgggtgtcccacggcagcgttgtctttccgtacatgctcagtgtgggattctccggctcacagctcttccagcgctgccctctgcccttggaggagcatctaaacccctccctcagctgttatttttttcctgtagaaataaatcagaatgagttatgcagaaaaacccgatgaaatcacgaaagatgagtggatggaaaagctcaataacttgcatgtccagagagcagacatgaaccgcctcatcatgaactacctggtcacaggtaatggcttacagtgaggatgctgttgcatgaatgtgattctccctttttgaacacataaggagtgctgtagcactgaggtttgatgacgtagttatttgtgttcagacattatgaaaacacaatgctaacctggtaagtttggaagttatcatgtgaaagccttttctgaagatgagatttttccaggtctctgagacctaacacaaacccatttttcagcctttgacagttttacagttactcaaaataattgagactgttgtgaagtaagtatattgaaagcctaaatagttgatctcttctggccagtctgcaaaaatatgctggcctgtttctggaaagtatgcccaactcagaggatgggaatggggaagagcagaagcgtgcagagggaaataacagtcaggctgttcttgatgtcaactggaggaagggcagtgctgtatatggcaagaaaatagatgtttttaaaagacatgacatgaaaaatctccctcctgttagtccccagttccttctcccaaattaatctctgtgaaacttttttgggccaagcatggtggctcatgcttatagtcccagcactttgagagacagaggaagattgttcgcgcctaggaattccagaccagcctgggcaacatagtgagaccttgtctctacaaaaaaaaaatgttaattagctggatgtggtggcttgtgcctgtagtcccagctacttgggaggctgaggtgggaggatcacttaagcccggaaggcggaggttgcagtgagccaagattgtgccactgcactccagcctgggagagtgagtgggaccccatctcaaaaaaaatatttttggaaggtgaagaggaaatttaggcctataattatgtcaggggcaggggaaggggcacacatgctggctttgaaaaattgtagacactcttaagaggtgggagtcaacaggccactgcaggtatagctgaccatggagggcccctgtgctgtggaggctgagccagtgtgacttgcctaacctggcaccagagctgcggctgctggcgtctggacctattatctgtcctctcaaaggagcccacaccaacacactgggccagcagccattctgacctctttggctaatgggttagagtttttggatgggataacaaggaatgaagtatactcttctcattttctatatgtattttgagagcataacttgtaaattataaagatattaataccgagttcctgagaaagtgtggttcacatcagaggttattaattgaggcaattggagtttctggagatacaaagtctttgccttaattccttgctaactttcctagcagtgaagatggtttttctattcagagggctttaaggaagcagcggagaagtttcgaatggaatctggaatcgaacctagtgtggatctggaaacacttgatgaacgaatcaagatccgggagatgatactgaaaggtcagattcaggaggccatcgccttgatcaacagcctccacccagagctcttggacacaaaccggtatctttacttccatttgcaggtatgtttcaggagagagtagtctggtttgtgaatacttgataagttaaagttatttgcaatgattgagaaataactaggctaatttgctttaataatgttatttcaatgcatgtgagggggagaggtttgagtttgctcttttatgtagttcagaagcggttttttgttttaaaaatgcaaatttgataactcagagatgcaagaaaagtcttccctctgtgatgtacttttgattgggacctggtaccacctgccctaagtccctggcctgggtgtgtgggggtcaagcttgtctgtctctgcctccagcaacagcatttgatcgagctgatccgccagcgggagacagaggcggcgctggagtttgcacagactcagctggcggagcagggcgaggagagccgagagtgcctcacagagatggagcgtaccctggcactgctggcctttgacagtcccgaggagtcgcccttcggagacctcctccacaccatgcagaggcagaaggtggggcctgccagagggaagctttcttccattccccatgtgctctgagggggcttcgtgacaacgccaagtgtgtggctttgctgtgtggactgagagacaggtggcttctgtgcctgggatgctaagtggttccttcatggcttttttttttttttttggaggtgaagtcttgttctgtcgcccaggctggagtgcagtgacgagatctctgctcactgcaacccccgcctcctgtgttcaagcgattctcctgcctctgcctcccaagtagctgggactacaggagtgtgccaccacgcccagctaagttttgtatttttagtggagatggggtttcaccatattggccaggctggtcttgaacccctgacctcaggtgatccagtctcccaaagtactgggattacaggtgtgagccatcatgctcagcctctctctggcttttaatcttttatcttgtcaaactagggacaacggacttggtgatcgttacacagtattcacaccctttgctggtgtcttatatttatctgaaccttctttctgtttatgtcccaagtatttctcatttaaaatcctgtcttctgaaacttttctctcctcgctgctatgtttttgtctggcagaacatgacagctcctcgccttcccagacccaggtccctcttcccccgggtcctctcccgggggctctgtcctccctacgctgtcttggaaggatggcctgtcctagagtccacttgagatgttttcttgaggcttgtgaggagggtgctggtatgtcctgctacgctggtcttacctctctcccagtcccctcagcactttgttcaaggcttgctcatggcacttaactgccatcgaggttgcatgtgacgtttaacaaccagactgtgagcttccccaggcaaggactatgtatttcatgtcctgagagtgtctcgcagttaagagcttaatgtttgtttaaactgcctctttttaatagactctgctggtgctctgcgtgtatggtggtttttatcagatgtatttatattctaggtgtggagtgaagttaaccaagctgtgctagattatgaaaatcgcgagtcaacacccaaactggcaaaattactgaaactactactttgggctcagaacgagctggaccagaagaaagtaaaatatcccaaaatgacagacctcagcaagggtgtgattgaggagcccaagtagcgcctgcgcttgcgtggtggatccaacaccagccctgcgtcgtgggacttgcctcagatcagcctgcgactgcaagattcttactgcagtagagaactctttttctcccttgtacttttttttgacctggcatctttttatagggaaaaatggcctttgtaggcagtggaaaacttgcaaggaaagctgccgtctctttggcagtctgatgcagagcctgcactctggcactcgctgaagaatctggaaggttgcggtttgctcttccagtgttcgggggcctctggctgctgaaggattcggtctaccacggagggctgtgctgttaggctgcatcccactcaaaatacaggaaaagcacgaatcatgattctgctttctgttagcttaggcagacattgggccttcacctacaagtttttccttacccctgtggtttttgtgtttttttttttttctttttccataggaaagaatatataaatttgtaaatcctaattcaaagatggctcatgtgtgagggcattgagtttgatttgttttccctttggtctgggttgtgtggcttttgggggatgcgtgtgagggggctatgtgttttttaattttttaaatatatattttggtgctgtgtgtggtaagagacttgttcctagtggatcaatgaaccatctcttctgggcagttttgttgaaaataaaggtttctctttgatttcaagaatgaccaaaatggcctctaaaagatgttaatcatctcaaatgaccttttgtctttggggcgttcttccccctgtgatagcggcagtggctttttctggtacctgcagctggaaaggccacttggccctgtgctgagtgagcggccttcattagagcgaggcagcccttggccggtggggacgcagagccccagcaggtggtgcacgactgttggcggaaggaacgcgtgttcatcctcagtgatctgccctccagcatctcggcagcatctcatcctccatcgtcagctggctctgccgatgtcctgcttctgttcactcacagaactgtcccctgctccgtggtgggcaggagggaagtggtgcagggctgcgtgcattgcctgcgagtcgggacagttgatgggcacatggccttgtagctctgggcacagatgtgtttggattcattgcagcggaccaccgggcactgttgaccccactgagcagtgctaagtgttggtttagtggatgttcgtggaattgctgacccatccaagggcgtcctttggagccagtggagcctgccggcgcatctgaggggcagaatgctgctagcacttgaatctgggatctcgccttattctcaagtagcaaggcatctcgacaagcatggtctaggtctggtggccagcttgccagtacctgagccggtcgggtcatctgcctctgagggaccgtcctcaccgagctcctgcatcccttgagtgttgatcaggaggcgtccacagcattgttctcgcctctgaatgatgcttctttctgtgttggagcctggcgaagttgtgttttcaagccctctacttctctttccagtgggtaggagcttttggcagtgtttactttacctagatggcttatataatccagtaagagatgcaaagataaaattgctgcggttgttacagaagcatggcggcctccagactgacccattggttgccctttagattttgtaaggatgcggtgctggggaggtggtgcttccctaccccctagaaatgctgccttccaactaccactctcccagatgtgacccttgcgattatttcctctgaggtttgaggatgaagataagttggagggaaagagagtaactaataggggatgaaatatagcagaagctagaagaaagcggtgaggtgagagagatgcatctgcacgttttcttcaacagcaccaggtgattcagcatattcctaattacctttcactattcgtgtatataagatcgtttacttgcataatatatcatcaatttgacatattcttaaaactagagggtgtgagaagcacagcaataggaagtctctccacaaactaggggaacacaaatggggtcattcacgtgcctggactgtcactatgtggctgtcacgtgaagtgctggtgttgatttccatttcagccagtgggtagctgataagccagtgccagcatccagcatgagcagatgtcggggagactgggaagtctccagcgttactgctctccttcccttcatgataagccagtgccagcatccagcgtgagcagacgtcggggagactgggaagtctccgatgttactgcctgccttcctttcgtgtgaggggctgcacttgcttttcttgtgatctgttagtggacgaggtcttccaaggaagtgctttgcacactttctttgctcctttttacagtctttgtctttgcagcaagcaaatgaaattaagccactttgggataatgaacattcagtataattctactttgtctcattttggatctcactgttgtctttataaaaatggcacattttacaaagtagtttattcttattatactttctgctggagagtgccttgaaataaaatgtgagagtattctggtactctgtgttccagatgcatgaaattgggtgaggaataacccctagtctggaatctttgtgaagcatagggttattgcaaggcaaatgggaactaacacatcttgccatttgaatcagggtctccagtttctagaaaaggcagacactggttgggaccaaagtctccatggcacatgactgaagactggtggtcgtgtgtgtgcggagtccacggaagcctcggggaggtggagctgctccttccattccgtcaggacgtgatctgaaaacatgtagagaagatgagttgaggacagcttttctaaggcaatgtgatgtctttgctttcttatttctctttctctgcgttgttagttttgaagagtggaggagctaggggctccagaaagaatcttacacatgtgttgaagacattgatgtcatagggagcggggagctgcattcccttctgggctgttactgctaaatctcagtatgaacagaccaggcggaaagcttggtggccaagcagtctgtgtgcttccccgctgatggagaacgttgcgttgttcacaatagggcctcatgggtgtagccgcatggcagacccatggctggcgcagctgcctgttgccgtctgtcttcagtaactgctgctctgttaactgttctattctgatactacgcgtgttgttttttacaacaggtatgtttttgtttcagaaatatgtattgcttttctcatattttttgcaaattgtattgtcaacatgggtcatttaaagtcctgtatgaaccataacctgctgtggtacctttgtacatgtttgattctgtattctttattccagtgtggcatatgtgcccctctgtatcttttgagaagtgcggaataggttgcttctaccacctgttcttaatgtaacagtaaaagttttcacatttttctcagaa

SEQ ID NO: 5788 - DNA, 665 bp, Homo sapiens
aattcttggctttaaatatccctgtgccccagcaccgccccccccgccccttatttcactaattcatgttttcagctctgagctcaggatctgtaattcagacacctgcttgatttctccagacgcatgtctaatagtcacgtcaaacttgccctgcttctcaaacctgttcttcttccagtccttcctccttatttgtggccccatcttgcagggcctctcatgcttgaaacctgtgaccatcttctattcttccctctcttttgtccggtaatctgtctagcagcagccattgactctggccaaagcatcttgatctcaccttgctctccatctcttctgccgatgttctctctcgcttgggtgtctccctaagggactggctgctcagatctcaccaccctgcattcatcccattttcagccaagagaccaaagttttttaatttattgaaacactttagcagtacttcgtataaagtagtatgtgtaacgtatgtatcagtggcaaaagagaaagacagagtggacggtggcgtgcccctgcctgtctcaggtatccacccattctcccaaagccggaacagctgcctctggggcttcagccatttgcccctcccacaggtaaccccctcctgagtgtcagctttcatgcccttatttaaa

SEQ ID NO: 5789 - DNA, 434 bp, Homo sapiens
tttttttgcttaatgaaattttccaaacatattaaaaacagagggaatacgccagcacatcccagtatccaccagtcagcctgacacccaccaccacctgccagagccccaggcaggagataactacaggtgtctgattctgggtggctaccatgctttcagggccatgagcgtcttcatgagtggaaggcagttgtagggttcttggaaaggactcagactgaccccttcaagggcctgaggtgaaattcagaaactgcccatgcagagaagctgagcagcgggcatcatggagcgaggcgttgagagcttgcatgtttgttgggtatcagagaacagggaaggcctctcctcacctgctgctcctccctatgtggcagtggcatgtcacagtgttcttgatgttcacacacctgtgccagtccattagcctc

SEQ ID NO: 5790 - DNA, 1578 bp, Homo sapiens
cttacactccgctcggctcaccatgtgtcactctcgcagctgccacccgaccatgaccatcctgcaggccccgaccccggccccctccaccatcccgggaccccggcggggctccggtcctgagatcttcaccttcgaccctctcccggagcccgcagcggcccctgccgggcgccccagcgcctctcgcgggcaccgaaagcgcagccgcagggttctctaccctcgagtggtgagtatcgccgaagtgggcattcgcggggtgcgctgccctggagtcactggggaacgacccgactccagaggcctcgacctgacctgtctcctgttttgtctccccttaggtccggcgccagctgccagtcgaggaaccgaacccagccaaaaggcttctctttctgctgctcaccatcgtcttctgccagatcctgatggctgaagagggtgtgccggcgcccctgcctccagaggacgcccctaacgccgcatccctggcgcccacccctgtgtcccccgtcctcgagccctttaatctgacttcggagccctcggactacgctctggacctcagcactttcctccagcaacacccggccgccttctaactgtgactccccgcactccccaaaaagaatccgaaaaaccacaaagaaacaccaggcgtacctggtgcgcgagagcgtatccccaactgggacttccgaggcaacttgaactcagaacactacagcggagacgccacccggtgcttgaggcgggaccgaggcgcacagagaccgaggcgcatagagaccgaggcacagcccagctggggctaggcccggtgggaaggagagcgtcgttaatttatttcttattgctcctaattaatatttatatgtatttatgtacgtcctcctaggtgatggagatgtgtacgtaatatttattttaacttatgcaagggtgtgagatgttccccctgctgtaaatgcaggtctcttggtatttattgagctttgtgggactggtggaagcaggacacctggaactgcggcaaagtaggagaagaaatggggaggactcgggtgggggaggacgtcccggctgggatgaagtctggtggtgggtcgtaagtttaggaggtgactgcatcctccagcatctcaactccgtctgtctactgtgtgagacttcggcggaccattaggaatgagatccgtgagatccttccatcttcttgaagtcgcctttagggtggctgcgaggtagagggttgggggttggtgggctgtcacggagcgactgtcgagatcgcctagtatgttctgtgaacacaaataaaattgatttactgtctgcagtcttgagtgtatctttgcaagcgccgactccccactcctcccggccttcagatggcaaggaccggcgggaggcgccgtggccgagtccccagcccgcgcacctccctgggcccaggagccccttttcctggagtcacagaacccagcatccggttgccggatgtagtctttcattgcccagtctgcggttttcccaggtagttgccccgcggcgaatccgagatgtggcaatcac

SEQ ID NO: 5791 - DNA, 1578 bp, Homo sapiens; identical to SEQ ID NO: 5790

SEQ ID NO: 5792 - DNA, 473 bp, Homo sapiens
gccagatcctgtctcaaaacaaaaaaaaaaagttaaattctgtgtccatgagcagctgtctgtaaggaagttatggaaatgtgaatctgctttaagttgagtaattaccattactgtaacatttgtataatgtctcacaatttagaatgtttgtcccataaatttggttgtttgacttacagcaaggggcaaatctgggtggctgctaacctattgcctttgtatttgtggccctctgcaccagcctttatgtgaatatttctgcacgctcctaagagagtagttttgctgaactgtccctatacagtctttgcacctttactgtgtacatgtgtgttggtaggtgtacgtggtatgttttcctttttttccaggattgcattctttttatggctgaataatatttaattgtgtattgttgttgttgttgttgttattttatagtgacaaggtctcactatgttgcccaggct

SEQ ID NO: 5793 - DNA, 15266 bp, Homo sapiens
gcagcaacggggtgcggcagggtggggaacgcgggagcggggccagctcccaggaaagctggtctgcgagcggcccctgcccggctcccaggtccctgcgcgaccccgcccttcccgagaccccagccgggctgccgcccgcgtcccggaaggtgagtgggggaggggagatggagcctggggctgccgagaagcagggagagaggggaaaggtctgcaggcctctgggcgcgggggacctttatcaaagggagcggcgaggggaagggagggaccatacgcaggcggagaagaggtagctggggatcttaaggattttgtagggaaaagccttagcggacccatgggtgtagaagggacgggccgtggcggatgcagactgggagggcctgacgggaaagggaaaggatgggcccctgtggacgccacagcgcgccttccccatccgcaaaggctttccctccctctcctccagctccagcctgaaccatgtttttcacttgtggcccaaatgaggccatggtggtctccggtaagtactgttgttcccttcccagccagtgaccccagaacccctgtgagtctggcctctgccccttctccctctccctaccaacttcccagcaccagacttctgccccttgatggccacgaactgcccagtttgattcccaccattccaaggcccagactgcttcccctccagctcccagattctctcctgtgggttgctgtcccctcacccccgccagttcctcagtcttccacattcaagctctgccaccgttcctcactgccccacaccttgcagggttctgccgaagccccccagtcatggtggctggagggcgtgtctttgtcctgccctgcatccaacagatccagaggtaggcaagaagggaaccagggaagggggacctccgttttctctttttcctcctcttcttactgtctgtcccttctttttcccctaggatctctctcaacacactgaccctcaatgtcaagagtgaaaaggtttacactcgccatggggtccccatctcagtcactggcattgcccaggtgaagctttcagagccttttccccacagtccacttccccatcaccctctctcccagacattaagacatcttctggccacagtcttctcaacccttgcctgcagagaagttcctctgctagtctcatcttttccaggcaccccaaggcacttgcctcctcctcctttctttccctgaaatggaagaagcatttcttagagggctctcccttctctctctgctttttctctgacttcatgagacccccaccacacctttcctacccctactctggctacaggtaaaaatccaggggcagaacaaggagatgttggcggccgcctgtcagatgttcctggggaagacggaggctgagattgcccacattgccctggagacgttagagggccaccagagggccatcatggcccacatgactgtggaggttggcctaggggcagggaaccatctggaaggatgtcaaaatgaggggggcccaaggcccacactagtctgtgagagacagtggatccaagagcatacatcccggccgggcagggtggttcatgcctgtaatcccagcactttgggatgccaaggtgggcagatcacttgaggtcaggagttcgagaccagcctagccaacctggtgaaaccccttctctactacaaatacaaaaattagctgggtatggtgatgggtgtcggtaatcccagctacttgggaggctgaggcaggagaatcacttgaacccaggaggcagaggttgcagtgagcaaaaaaaaaaaaaaaaaaaaaacttacatcccttctccccaccatcctgttatcacaggagatctataaggacaggcagaaattctcagaacaggttttcaaagtggcctcctcagacctggtcaacatgggcatcagtgtggttagctacactctgaaggacattcacgatgaccaggtaaaactaggcaattgatccttccccacttccttgctcccatctcttaagccctccaaaggactaatttctacatctctcccacaggactatttgcactctttggggaaggctcgaacagctcaagtccaaaaagatgcacggattggagaagcagaggccaagagagatgctgggatccgggtgagagagatgggggttgcttagtgggaaaggggatagaagtggcacaactgagaagaagcaggggtgctgggtgagcagggaaaatacatgaggcagaaagagaaccttggtgggaagcaggctgtcaccgtggcctttctccccctgccctgacatttcctacctgatctctgcttggacaggaagctaaagccaagcaggaaaaggtgtctgctcagtacctgagtgagatcgagatggccaaggcacagagagattacgaactgaagaaggccgcctatgacatcgaggtcaacacccgccgagcacaggctgacctggcctatcagcttcaggtcagagccactgccaggccactctctgccccttccccattcctctcaggctgtccatctcaggacaccactacactatttctcatactttaactttggtcttattctggctctccatctctggaccaactcccccatatgaggagagatttaaaagactcagacgttacagctgaaaagctttaaagaaaaggccagccgggtgtggtgactcatgcctgtaatcccagcactttgggaggccaaggcgggctgattgcttgacctcaggagttcaaggccagcctgggcaacatggtgaaaccgtgtctatgcgaaaaatacaaacattagccaggcatggcagctcgggcctgtagtcacagctacttggggtatgaggcaggaggattgcttgagccaggatgcgcaggttgcagtgagtcgagatcacactactgcactccagcctgggtgacagtgaaatcctgtccaaaaaagagaaaaaaaaggccacgcgcggtggctcatgcctgtaatcccagcactttggtaggccaaggcaggtggatcacaaggtcaagagttcgagactagcctggccaacatagtgaaaccctgtttctactaaaaatacaaaaattagccaggtatggtggcacgcacctgtagtcccagctacttgggaggctgaggccggagaattgcttgaacccgggagacagaggttgcagtgagctgagaccacgccattgcactccagcctgggtgacagagtgagactccatctcaaaaaaagaaaaaaaaaaaagagaaggccaagaagggatatgatcaataaggctgatcatatgtttggagcaggctgtgcccgtgcaaaggcatctgactgagaaagtggatccgagctcagatccggcccatgcccctctaatcaagcagtgcattctgacatgggtctgcatctacacagaggaatttctgatttgcacagaggcatgctatgggctagcggcagccctggttaattaaaaaagggtatgaagaaggaaaacatggacttggacattgaatcctgcaaagtgagatatgggcagcccttgatattgccaggaagtatagttgatcttcattcttcattattcgtatctgagaatttgcctattcactaaaatgtattggtaacctcaaaaggttaccaataaagtcgcagcactttcaggatcttttgcagacacgcacagtacccaggtgaggttgatcaaggagatgctctgctgccttgtttcagctctcataccgtaagccgtgttattttcacagtatatttactgccgtgttttttgcatttttgtgctttttattggtgaattcactctttaaaatggcccccaagcatcagtgctgtagtgctgtctagtgtcctttagtgcaagcgggctatgatgtgccttatgggagaaatacatgtgttaggtaagcttcgttcatgcataagttatactgctgttagctgtgagttcagtgttaatgaatcaacaatatattttacataaggtgtctttaaacagaaacacatataaagcaaggctctatgttgatcagttgatgaaaatgttttgaccagaggctcacgggaacctagcctgtatttcttctaggaacaaattaggtattaactaattcagcattcatggctactttatagaacagaactaccaagaacaatgaaaatcaactgtactttgagacctttacccaaaggatagcaatattatgcattttgtttttgccaagagttggtacaggctgaaagcataatgaaggtaaaaacatcttttgttattatgttaaattcctgggtgacttgacaggttgaacatggcatacagctttgcaactcaaactgtgttctacccagcagcagctgcagcatcactgcgaagcttgttagaaatacaaaattgcaggccctggccctgaccagctgaatcagaacctgcattttaacaaaatctcaaggtgaattcctaggtgatttgtatgcacattggagtttgagtttgaaaagggttaccatgatggaaactgctagcttgcagtgaagctatggataaggttcttaaccttctaaacatgaccttacttgtctgcagattaagggattggactggttggactcttttcaacttttatcagtttctcgttatgcaccaggcagtgtgctaggtgttcaggaaagaaggatttattcaacaaatatctgttaagtgccttctatgtgctagacaccattttggaggtgaggctataaatatggaggtgaggcagaaaagattcctgcccttatgcagcttacattatgacacaggaaacagctagtaagcaagtaaatgaccttcccaggctataattcttgtttaggtgctgtgaaggaaataaacagggtgatgtgaaaaactgtgggaggggagttagtatattaggttagcgggtggtagagaaagtttctatgaggaagtggtgtttgagatcagacttggagataagaaggaacaatgtacagttctgagccaagaatattctagcctgtgctttttaagtagtcatacttaaaaagtggctgggcgcggtggttcatgcctgtaatcccaacactttgagaggctgagacaggaagatcacttgaggccgggagtttgagaccagtctggccaacagtgaaaccctgtctctaccaaaaatacaaaaaatattagccgggtgtggtggtttgagcctgcagttccagctacttgggaggctgaggcgtgagaatcgcttgaatccagaaggcacagtgagccgagattgcgccaccgcactccagcctgggcgacagagcgagactccttctaagatagatatatggatggatggatggacggatggacggacggacggacggacggacggacggacggacggacggacaacagacagtcagtcagtcagtcagtcatacgtggcttgtggctaggcaggggaccagtaagtgcaaaggctgtgaggtggagtcagaaaggaggtttctgatctgggggcgctggtgtgctgtgagtgaggaggaaaggcaggcagggccagatcacaaagggtttgtgtggtcacgatggagacacagaagagaactgaaagcacagtggaaagctattggagaacttcaagcagaaaggtgccatggtcttatttatatttgtatagggatcagtctggttgccttgtggagaacgggcaaagagaggaagcaaggccgggtgcggtggttcacacctgtaatcccaacactttgggaggccgaggtgggcagatcacgaggtcaggagatcgagaccatcctggctaacatggtgaaaccccgtctctactaaaaatacaaaaaattagctgggcgtggtggcaggcacctgtagtcccagctactcgggaggctgaggcagaagaatggcataaacccgggaggcggagcttgcagtgagccgagatcgcgccactgcactccagcctggatgacagagtgagactctgtctcaaaaaaaaaagcaaaagatgagttgggctctttttcagagatgatggattaaacaaatgtagctaattttactctctcctaaaacctcactaaagccaaaatgattttttttttttttgagatggagtctcgctctgtcgcccaggctggagtgcagtggcgcgatctaaaatgattttttttaaggtaaagatagaggcttgtccaaaggtagtgagttatctcaattgattgttcagtcagttacagattgaactccttgttctactctttacctacttctcactattgcacttgattagtctttctttcttcctttctttccttctcttctcttctttcttctctcctctcctctttgagaccgggtcttactcggtcccccaggctagagtgcagcggtacaatctcagctcactacagcttcaactgcctgggctcaagcaatactcccacctcagcttcctgagtagcttggtctacaaacatatgccaccacgcctggctaatttttgtatgttttgtagagacggaatttcaccatgttgcccaggctggtctcaaactcctgggctcaaaggatccttcccgcctcagcctcccaaaatgctaggattacaggcgtgagccaccatgcccagctgactaggctttaaaaaaaaaaaagatggagaaaataggaacggaaaccagagcatcattttggaaactggaagtcagtagtaattgactaagcaggtatgacacagctgagcttgaaacctgcaaaagggaaaacaatgaaatgatctgaggctcaggagctggcagcacccagtgcttctccagctgtggtagactggttaaataagaggaacatgtgaaaagcaccttctcagagcccctcactgcctctgggtaatggttcctgccctgctccaacagacatctggaggtttattatcttatttatctattttatttatgttttttttgagacagggtctctcactctgttgtccaggctggagtgcaggtgcagtggcgcagtctcggctcactgcaacctctgcctcctgggttcaaatgattctcgtgcctcaccctcccaagtaatcctcaactgggattacaagtgcccaccaccacgcccaggtaatttttgtatttttttttttttttttagtagagaggggtttcaccatgtcggccaggctggtctcgaactgctagcctcaagtgatccatccacctcagcctcacaatgtgctgggattacaggtgtgagttaccatacctgccattggaagtctattatctgaagagagtagactagaggatgtgatgggggctggcccagcacaggtgaggacctagatagtttaccagtaacaggggcatgaaatgactataactttcatgaatgctaaatactgagagccaaccccaaccccaaccccctcaaccccactcagctcccagaacttccatcttccaaaaaagagatcagaagactgctctggggaacatgaccaatccaaaaagaaataacttaaaatcctgaatcagatgtttctccgtacatggcctatccagatcaccgtagggtgaagctcaaagtcagcaagcctcacccacatactcagagcttcctttcagtgttgagaccttcttccctctgagcagatgacaaaggagtttgaaaccagcctggccaacatggtgaaaccccgtctctactaaaaacacaaaaattagctgaaatggtgactgtaatcccagctactcaggaggctgaggcaggagaatcacttgaatccgggaggcagaggttgcagtgagctgagatcgtgccatttcattccagcctgggcaacagagcaagccatcacagatttgggagcaaccaagaaagccagggacagggtatgcttggtaacctggcaagagctgacaaaggggaaaaataaaaccccacagaaagaagcagggaagtaagggaaagggactaataagagtcaagcagggccaggggtgttggctcatgcctgtaatcccagcactttgggaggccaaggtgggtggctcacgaggtcaggagatcgagaccatcctggctaacacggtgaaaccccaactctataaaaatacaaaaaattagccaggcgtggtggtacgcgcctgcagtcccagctactcgggaggctgaggcaggagaatcacttgaacctgggaggcagaggttgcagtgagatgagatcatgccactgcactccagcctgggtgacagagcgagactccatctccaaaaaaaaaaaaaaaagtcaagcacatgcaaatgtggcatgacttattgggagcagaaacattctgagaaaaattatataaaaatgaggttttagattgaaatggtctactaagtgcccaatgcaatgaatgaaaaatatatacattgaaacataacactgtgaaacttaagaatgctgaggacaaaaaatatgaaagcttctagagagagagagatctcaaagaggcaggcttcaaaatgacttcagattcctttttttttttttttttttttttttcagagacagggtcttgctctgttgtccaatacagtggcataaacaaggctcactgtaacctcaacctcccaggctcaagtgattctcccacctcagcctccccagtagttgggaccacaggggcacaccaccacgcccagctaatttttaaatttttttctagaggtgagatcttgccatattgcacaggctggtcttgaactcctgggttcaagttatcctcccaccttagcctcccaaagtgctgggattataggcatgagccactgcatcaagcccagctttcttttctttttttttttttttgagatggatttttgctcttgtcacccaggctggagtgcaatggcgtgatctcagctactgcaacctctgcctcctgggttcaagcgattctcctacctcagcttcccaagtagctgggactacaggtatgtgccaccattgctggctaatttttgtatttttagtagagacggggtttcaccacgttgaccaggctggtcatgaactcctgacctcaggtgatctgcccacctcagcctcccaaagtgctgggatgacaggcatgagccaccatgactggcccaagcccagatttcttaaaaagctagaaaaccatggaggaatgccttcagaattctgatggaaagttaatcccaacatagcagcctgctttcagcctaactggtattaaaatagaagggtagaggccgggtgcagtggctaacgcctgtaatcccagcactttgggaagccgaagcaggtggatcacctgagataaggagttcaagaccagcctggccaatgtggtggaaccccatctctattaaaaacacaaaaattagctgagcgtggtggcaggcacctataatcccagatacatgggaggctgaggcaggagaattgcttgaacctgggagatggagattgcagtgagccaagactgcgtcactgcactccagcctgggtgccaagagcgaaattccatctcaaaaaaaggtagaataaaaatctcagagaaagcaagacctcagaaaaaatattgtctttatattctttctgaggaagcttctggaggttgagtttcaccaaaaggtgggcatagacaggaaggaaaaagaaacagacaaatggttgcctaagggacacaggagagaggtgatcctgcacaccggtgtagagggcaacgaggccagtttggaacgggtttgaaaatttagggtgaaagacagtacagagtgccgtctccagagctatgcttctctctggagtgaacagatgggcccgggggaaggtaggaggcaggggaagcatcacatgtattgatgagacctacaatgatgatggtgcatggctgagcctgagcaatgggacaacgaaggcatgtgttctggctgggtgtgatggcacatgcctgtaaccccaacactttgggaagccgaggcaggtggatcacgtgagcccaggagtttgagatcagcctgggcaacatagaaaaccctgtctctacaaaaagtacaaaaaatagccgggtgtgctggttcacacctgtagtcccagctactctagagggggaggcgggaggatcatctgagcccaggcaggtcaaggctgcagtgagccatgattacgccattgaacctgggtgacagagtaagatgatgtctcaaaaagaaaaaaaaaatgtgttccttgcctggcacctctcctcactagcatcttgataagagccttctgattccctcacactgcaaggaataagaagatgaaatctaggctgggtgcgatggctcatgcctgtaatcccagcactttgggaaactgaggcgggtggatcacttgagatcaggagtttgagaccagcctggccaacatggtgaaaccccgtctctactaaaaaaaatacaaaaattagccagacatggtagcacatgcctgtagtcccagctacttgagaggctgaggcaagagattagcttgaacctgggaggtgaaggttgcactgagctgatcgtgccactgcactccagcctgggcaatagagcgaaactgcctcaaaaaaaaagaaagaaatctgcctaaataagaggaattctatgaatacacacattcttgtagatgttcagagtatccctggaaggatacacaagaagctggtcttggtggtttctctgggaaagggacccaggtggtttggagaatgaggaagaagcctcgtggttcacttttttttctgttaaatctgcaccatgtgcaaaagacaaaaaagatcacctgtccccacccccacaaaaaataagtcagctattgcagtagcctaggctagcactaaggttatcgcagcaacagtggggggatttgagcaagactggagatagcagaaagccaacatgtgctcagtgccctcaaggtatttatactctagaagggggcacacgtgggaaaaatagattaaacgggggctcatcagagaaacactggactccactggactggccaagcagacaggagggaacccaccttcatgcacctgctcctttttttttttttttttttttggagatggagtcttactctgttgcccagggtggagtgcagtggcgtgatcccagctcactgcaaccttcgcctcccaggttcaagcaattctcctgcctcagcctcccgggtggctgggactacaggcattcgccaccacacctggctaattttttgtattttagtagagacagggtttcaccatgttggccaggctggtctcgagctcctgaactcaggcaatccaccctccttggcctcccaaagcgctaggattacaggcgtgagccaccgcgcccggccaccggctcctatttttatatcccactctggagctctggttcccgggcacttgctcttcacctctgactcagagcgtgaacctgacttcaccctcctacccaggtggccaagactaagcagcagattgaggagcagcgggtgcaggtgcaggtggtggagcgggcccagcaggtggcagtgcaggagcaggagatcgcccggcgggagaaggagctggaggcccgggtgcggaagccagcggaagcggagcgctacaagctggagcgcctagccgaggcagagaagtaaatgtcccctccctgaccctgcctagctcacttgccacctaggcaccccaagatggagtgctgaagccttcaccacctggactcctatggatttcaggtttcaggagcgtctgcctctgcagcactgggcctttctcctgggagtaagggctgctgggctccaccctccacttcccttctgtccacaggtcccaactaattatgcaggcggaggcagaagccgcgtctgtgcgggtgagttaagaggcagttccatgctggcttgtggagagggtgggggttgctgcttgatcggggatttcttgttcttaatgatttccgtcaatctcacaagcatccttaaccctcagatgcgtggggaagctgaggcctttgccataggggcccgagcccgagccgaggctgagcagatggccaagaaggcagaagccttccagctgtaccaagaggctgctcagctggacatgctgctagagaagctgccccaggtctggaggtcatgtgggcaccaagaaaggaggaaatagaaccagggactaaggggtggggtgtagtgaggggcttagggagaaacagcctagggggactctaaattaggggtgggaattattagtgaccaaagtgaggaaggatgatcagtggaacgaggaccttaaaacccagagtaagttgttttatgaggaatgtggtcagatcatgggcactgagtgggtgtctctctcctgccaggtggcagaggagatcagtggtcccttgacttcagccaataagatcacactggtgtccagcggcagtgggaccatgggggcagccaaagtgactggggaagtactggacattctaactcgcctgccagagagtgtggaaagactcacaggcgtgagcatctcccaggtgaggtctcaggttggagctgaggagaattgctaggttcctgtgttgtgtgacacagtatgcctagcatttaaccagcatccaggcctgggagtcattgatgtttattaatcactttctgtgtgccagacacagtgctaagcttctacataaatgagttgttttaaatcaaactaccattagggtatataggattttacaaagtccagaaactcaacatccagcatgttcctactcattctgctagtgcagctggagtgaaatccaggtcgactgtctctgcaacctgtgcttgtggtcaccccactagtatagggaactagttgcagcctattgacagttaattaattctagggcatatcactgcttttctcagcgccccagttaattcacctgtagatcatggtagaagtcagcaaacaggctctggaaccactgttttgttgcgaatcctagctacaatgcctgctagctgtaatcttggacaagtaatcaacctctctatacctgtttcctcatcttaaaattgggttaataattagaaactaccctgttgaattgttgaggggctcgagcaaatatttgcagtgtttagaatagtgcctggtatatagtaagcattatgtgtatgttaaagaaatggggccaggtgcagtggcttacgcctgtaatcccagcactttgggaggctgaggcaggcagatcacctgaggttaggagttggagaccagcctggccaacatggtgaaacaccatctttactaaaaatacaaaaaaaaattagccaggcttggtggtgcatgcctgtaatctcagctactcgggaagctgaggcaggagaattgctggaacccaggagccgaaggttgcagtgagctgagatcacaccactgcactccagcctgggtgacagaataaggctctatctcaaaaaaaaaaaaaaattccaggcgcggtagctcatgcctgtaatcccagcactttgggaggctgaggcgggcggatcacgaggtcaggagattgagaccatcctggctaacacagtgaaaccccgtctctactaaaaatacaaaacagccgggcgtggcggtgtgtgcctgtagtcccagctgctggggaggctgaggcaggagaatggtgtgaacctgggaggcagagcttgcagtgagccgagatagcaccactgcactccatcctaggcaacagagcaagactctgtctcaaaaaaaaaaagagaaagaaatgcatattcgggctgggtgctgtggctcacacttgtaatcccagaactttgggaggccagggtggacgatcagctgaggtcagaagtttgagatcaccctggccaacatggtgataccccatctctaccaaaaatacaaaaattagctgggtatggtggcgcatacctgtaatcccagctactcgggaggctgaggcaggagaatcacttgaactcaggaggcggaggctgcagtaagccaagatcgcaccactgcattctagcctgggtgatagagtgagattccgtctcaaaaaaaaaaagaaaaaaaaaaagcgtatgtaaataaaagcactggatcataccaatgaccttcaagctgggttccttggagcctcctggaggcctgcagtagaatattcagagctaaggagagtgtgcaaacaaggctctgccccctctcctctcttcagtgatttattgtatgtgggtcctgatgtctttgtttggggaaacaggtggtagggcaccagaaagaaccctggccgtgtgtgttctgcctatagcccattcgtctaaactggggcccgggagagtaggggcctcagcctcccgaatgttcccaagtgtcatctactgttgtctttttgccaggtgaatcacaagcctttgagaacagcctgagccttcagccctcacagatgcccagcctcatagctgaagttgcctgaatgatcctcctgttgcatgtaacccactggcctccctgagcatgtccattgacagtgaggtcccacccctcatctctccttgccaaatagtttgtgccttgtcttgaagggggttgctccccttgccaacctcacactgctatgattgccaactccagcggtcccatgtcagccttctgatgatcccactccaccccacctcaacttatttaacttcctaattaaatcagactgtttgagcctgttgtctagaatattttcctgaccaagtctgagggatgggctggaggttttcaactttgctacccaaataaattgctgtaagtaagtactaataaaacagaagcaactggaaattaatgcttggcccggcacagtggctcatgcctgtaatcccagcactttgggaggccaaggcaggcagatcatctgaggtcaggagttcaagaccagcctggccaacatgacgaaaccttgtctctaccaaaaatacaaaaattagccaggcagggtgaaacatgccaagtagtagtcccagctacttgggaggctgaggcaggagaattacttgaacctgggaagcagaggttgcagtgagccaagatcgcaccactgcactctagcctaggtgacagagtgagactgtttcaaaa

SEQ ID NO: 5794 - DNA, 473 bp, Homo sapiens; identical to SEQ ID NO: 5792

SEQ ID NO: 5795 - DNA, 15271 bp, Homo sapiens
gcagcaacggggtgcggcagggtggggaacgcgggagcggggccagctcccaggaaagctggtctgcgagcggcccctgcccggctcccaggtccctgcgcgaccccgcccttcccgagaccccagccgggctgccgcccgcgtcccggaaggtgagtgggggaggggagatggagcctggggctgccgagaagcagggagagaggggaaaggtctgcaggcctctgggcgcgggggacctttatcaaagggagcggcgaggggaagggagggaccatacgcaggcggagaagaggtagctggggatcttaaggattttgtagggaaaagccttagcggacccatgggtgtagaagggacgggccgtggcggatgcagactgggagggcctgacgggaaagggaaaggatgggcccctgtggacgccacagcgcgccttccccatccgcaaaggctttccctccctctcctccagctccagcctgaaccatgtttttcacttgtggcccaaatgaggccatggtggtctccggtaagtactgttgttcccttcccagccagtgaccccagaacccctgtgagtctggcctctgccccttctccctctccctaccaacttcccagcaccagacttctgccccttgatggccacgaactgcccagtttgattcccaccattccaaggcccagactgcttcccctccagctcccagattctctcctgtgggttgctgtcccctcacccccgccagttcctcagtcttccacattcaagctctgccaccgttcctcactgccccacaccttgcagggttctgccgaagccccccagtcatggtggctggagggcgtgtctttgtcctgccctgcatccaacagatccagaggtaggcaagaagggaaccagggaagggggacctccgttttctctttttcctcctcttcttactgtctgtcccttctttttcccctaggatctctctcaacacactgaccctcaatgtcaagagtgaaaaggtttacactcgccatggggtccccatctcagtcactggcattgcccaggtgaagctttcagagccttttccccacagtccacttccccatcaccctctctcccagacattaagacatcttctggccacagtcttctcaacccttgcctgcagagaagttcctctgctagtctcatcttttccaggcaccccaaggcacttgcctcctcctcctttctttccctgaaatggaagaagcatttcttagagggctctcccttctctctctgctttttctctgacttcatgagacccccaccacacctttcctacccctactctggctacaggtaaaaatccaggggcagaacaaggagatgttggcggccgcctgtcagatgttcctggggaagacggaggctgagattgcccacattgccctggagacgttagagggccaccagagggccatcatggcccacatgactgtggaggttggcctaggggcagggaaccatctggaaggatgtcaaaatgaggggggcccaaggcccacactagtctgtgagagacagtggatccaagagcatacatcccggccgggcagggtggttcatgcctgtaatcccagcactttgggatgccaaggtgggcagatcacttgaggtcaggagttcgagaccagcctagccaacctggtgaaaccccttctctactacaaatacaaaaattagctgggtatggtgatgggtgtcggtaatcccagctacttgggaggctgaggcaggagaatcacttgaacccaggaggcagaggttgcagtgagcaaaaaaaaaaaaaaaaaaaaaacttacatcccttctccccaccatcctgttatcacaggagatctataaggacaggcagaaattctcagaacaggttttcaaagtggcctcctcagacctggtcaacatgggcatcagtgtggttagctacactctgaaggacattcacgatgaccaggtaaaactaggcaattgatccttccccacttccttgctcccatctcttaagccctccaaaggactaatttctacatctctcccacaggactatttgcactctttggggaaggctcgaacagctcaagtccaaaaagatgcacggattggagaagcagaggccaagagagatgctgggatccgggtgagagagatgggggttgcttagtgggaaaggggatagaagtggcacaactgagaagaagcaggggtgctgggtgagcagggaaaatacatgaggcagaaagagaaccttggtgggaagcaggctgtcaccgtggcctttctccccctgccctgacatttcctacctgatctctgcttggacaggaagctaaagccaagcaggaaaaggtgtctgctcagtacctgagtgagatcgagatggccaaggcacagagagattacgaactgaagaaggccgcctatgacatcgaggtcaacacccgccgagcacaggctgacctggcctatcagcttcaggtcagagccactgccaggccactctctgccccttccccattcctctcaggctgtccatctcaggacaccactacactatttctcatactttaactttggtcttattctggctctccatctctggaccaactcccccatatgaggagagatttaaaagactcagacgttacagctgaaaagctttaaagaaaaggccagccgggtgtggtgactcatgcctgtaatcccagcactttgggaggccaaggcgggctgattgcttgacctcaggagttcaaggccagcctgggcaacatggtgaaaccgtgtctatgcgaaaaatacaaacattagccaggcatggcagctcgggcctgtagtcacagctacttggggtatgaggcaggaggattgcttgagccaggatgcgcaggttgcagtgagtcgagatcacactactgcactccagcctgggtgacagtgaaatcctgtccaaaaaagagaaaaaaaaggccacgcgcggtggctcatgcctgtaatcccagcactttggtaggccaaggcaggtggatcacaaggtcaagagttcgagactagcctggccaacatagtgaaaccctgtttctactaaaaatacaaaaattagccaggtatggtggcacgcacctgtagtcccagctacttgggaggctgaggccggagaattgcttgaacccgggagacagaggttgcagtgagctgagaccacgccattgcactccagcctgggtgacagagtgagactccatctcaaaaaaagaaaaaaaaaaaagagaaggccaagaagggatatgatcaataaggctgatcatatgtttggagcaggctgtgcccgtgcaaaggcatctgactgagaaagtggatccgagctcagatccggcccatgcccctctaatcaagcagtgcattctgacatgggtctgcatctacacagaggaatttctgatttgcacagaggcatgctatgggctagcggcagccctggttaattaaaaaagggtatgaagaaggaaaacatggacttggacattgaatcctgcaaagtgagatatgggcagcccttgatattgccaggaagtatagttgatcttcattcttcattattcgtatctgagaatttgcctattcactaaaatgtattggtaacctcaaaaggttaccaataaagtcgcagcactttcaggatcttttgcagacacgcacagtacccaggtgaggttgatcaaggagatgctctgctgccttgtttcagctctcataccgtaagccgtgttattttcacagtatatttactgccgtgttttttgcatttttgtgctttttattggtgaattcactctttaaaatggcccccaagcatcagtgctgtagtgctgtctagtgtcctttagtgcaagcgggctatgatgtgccttatgggagaaatacatgtgttaggtaagcttcgttcatgcataagttatactgctgttagctgtgagttcagtgttaatgaatcaacaatatattttacataaggtgtctttaaacagaaacacatataaagcaaggctctatgttgatcagttgatgaaaatgttttgaccagaggctcacgggaacctagcctgtatttcttctaggaacaaattaggtattaactaattcagcattcatggctactttatagaacagaactaccaagaacaatgaaaatcaactgtactttgagacctttacccaaaggatagcaatattatgcattttgtttttgccaagagttggtacaggctgaaagcataatgaaggtaaaaacatcttttgttattatgttaaattcctgggtgacttgacaggttgaacatggcatacagctttgcaactcaaactgtgttctacccagcagcagctgcagcatcactgctaagcttgttagaaatacaaaattgcaggccctggccctgaccagctgaatcagaacctgcattttaacaaaatctcaaggtgaattcctaggtgatttgtatgcacattggagtttgagtttgaaaagggttaccatgatggaaactgctagcttgcagtgaagctatggataaggttcttaaccttctaaacatgaccttacttgtctgcagattaagggattggactggttggactcttttcaacttttatcagtttctcgttatgcaccaggcagtgtgctaggtgttcaggaaagaaggatttattcaacaaatatctgttaagtgccttctatgtgctagacaccattttggaggtgaggctataaatatggaggtgaggcagaaaagattcctgcccttatgcagcttacattatgacacaggaaacagctagtaagcaagtaaatgaccttcccaggctataattcttgtttaggtgctgtgaaggaaataaacagggtgatgtgaaaaactgtgggaggggagttagtatattaggttagcgggtggtagagaaagtttctatgaggaagtggtgtttgagatcagacttggagataagaaggaacaatgtacagttctgagccaagaatattctagcctgtgctttttaagtagtcatacttaaaaagtggctgggcgcggtggttcatgcctgtaatcccaacactttgagaggctgagacaggaagatcacttgaggccgggagtttgagaccagtctggccaacagtgaaaccctgtctctaccaaaaatacaaaaaatattagccgggtgtggtggtttgagcctgcagttccagctacttgggaggctgaggcgtgagaatcgcttgaatccagaaggcacagtgagccgagattgcgccaccgcactccagcctgggcgacagagcgagactccttctaagatagatatatggatggatggatggacggatggacggatggacggacggacgggcggacggacggacggacggacggacgacagacagtcagtcagtcagtcagtcatacgtggcttgtggctaggcaggggaccagtaagtgcaaaggctgtgaggtggagtcagaaaggaggtttctgatctgggggcgctggtgtgctgtgagtgaggaggaaaggcaggcagggccagatcacaaagggtttgtgtggtcacgatggagacacagaagagaactgaaagcacagtggaaagctattggagaacttcaagcagaaaggtgccatggtcttatttatatttgtatagggatcagtctggttgccttgtggagaacgggcaaagagaggaagcaaggccgggtgcggtggttcacacctgtaatcccaacactttgggaggccgaggtgggcagatcacgaggtcaggagatcgagaccatcctggctaacatggtgaaaccccgtctctactaaaaatacaaaaaattagctgggcgtggtggcaggcacctgtagtcccagctactcgggaggctgaggcagaagaatggcataaacccgggaggcggagcttgcagtgagccgagatcgcgccactgcactccagcctggatgacagagtgagactctgtctcaaaaaaaaaagcaaaagatgagttgggctctttttcagagatgatggattaaacaaatgtagctaattttactctctcctaaaacctcactaaagccaaaatgattttttttttttttgagatggagtctcgctctgtcgcccaggctggagtgcagtggcgcgatctaaaatgattttttttaaggtaaagatagaggcttgtccaaaggtagtgagttatctcaattgattgttcagtcagttacagattgaactccttgttctactctttacctacttctcactattgcacttgattagtctttctttcttcctttctttccttctcttctcttctttcttctctcctctcctctttgagaccgggtcttactcggtcccccaggctagagtgcagcggtacaatctcagctcactacagcttcaactgcctgggctcaagcaatactcccacctcagcttcctgagtagcttggtctacaaacatatgccaccacgcctggctaatttttgtatgttttgtagagacggaatttcaccatgttgcccaggctggtctcaaactcctgggctcaaaggatccttcccgcctcagcctcccaaaatgctaggattacaggcgtgagccaccatgcccagctgactaggctttaaaaaaaaaaaagatggagaaaataggaacggaaaccagagcatcattttggaaactggaagtcagtagtaattgactaagcaggtatgacacagctgagcttgaaacctgcaaaagggaaaacaatgaaatgatctgaggctcaggagctggcagcacccagtgcttctccagctgtggtagactggttaaataagaggaacatgtgaaaagcaccttctcagagcccctcactgcctctgggtaatggttcctgccctgctccaacagacatctggaggtttattatcttatttatctattttatttatgttttttttgagacagggtctctcactctgttgtccaggctggagtgcaggtgcagtggcgcagtctcggctcactgcaacctctgcctcctgggttcaaatgattctcgtgcctcaccctcccaagtaatcctcaactgggattacaagtgcccaccaccacgcccaggtaatttttgtatttttttttttttttttagtagagaggggtttcaccatgtcggccaggctggtctcgaactgctagcctcaagtgatccatccacctcagcctcacaatgtgctgggattacaggtgtgagttaccatacctgccattggaagtctattatctgaagagagtagactagaggatgtgatgggggctggcccagcacaggtgaggacctagatagtttaccagtaacaggggcatgaaatgactataactttcatgaatgctaaatactgagagccaaccccaaccccaaccccctcaaccccactcagctcccagaacttccatcttccaaaaaagagatcagaagactgctctggggaacatgaccaatccaaaaagaaataacttaaaatcctgaatcagatgtttctccgtacatggcctatccagatcaccgtagggtgaagctcaaagtcagcaagcctcacccacatactcagagcttcctttcagtgttgagaccttcttccctctgagcagatgacaaaggagtttgaaaccagcctggccaacatggtgaaaccccgtctctactaaaaacacaaaaattagctgaaatggtgactgtaatcccagctactcaggaggctgaggcaggagaatcacttgaatccgggaggcagaggttgcagtgagctgagatcgtgccatttcattccagcctgggcaacagagcaagccatcacagatttgggagcaaccaagaaagccagggacagggtatgcttggtaacctggcaagagctgacaaaggggaaaaataaaaccccacagaaagaagcagggaagtaagggaaagggactaataagagtcaagcagggccaggggtgttggctcatgcctgtaatcccagcactttgggaggccaaggtgggtggctcacgaggtcaggagatcgagaccatcctggctaacacggtgaaaccccaactctataaaaatacaaaaaattagccaggcgtggtggtacgcgcctgcagtcccagctactcgggaggctgaggcaggagaatcacttgaacctgggaggcagaggttgcagtgagatgagatcatgccactgcactccagcctgggtgacagagcgagactccatctccaaaaaaaaaaaaaaaagtcaagcacatgcaaatgtggcatgacttattgggagcagaaacattctgagaaaaattatataaaaatgaggttttagattgaaatggtctactaagtgcccaatgcaatgaatgaaaaatatatacattgaaacataacactgtgaaacttaagaatgctgaggacaaaaaatatgaaagcttctagagagagagagatctcaaagaggcaggcttcaaaatgacttcagattccttttttttttttttttttttttttttcagagacagggtcttgctctgttgtccaatacagtggcataaacaaggctcactgtaacctcaacctcccaggctcaagtgattctcccacctcagcctccccagtagttgggaccacaggggcacaccaccacgcccagctaatttttaaatttttttctagaggtgagatcttgccatattgcacaggctggtcttgaactcctgggttcaagttatcctcccaccttagcctcccaaagtgctgggattataggcatgagccactgcatcaagcccagctttcttttttttttttttttttttgagatggatttttgctcttgtcacccaggctggagtgcaatggcgtgatctcagctactgcaacctctgcctcctgggttcaagcgattctcctacctcagcttcccaagtagctgggactacaggtatgtgccaccattgctggctaatttttgtatttttagtagagacggggtttcaccacgttgaccaggctggtcatgaactcctgacctcaggtgatctgcccacctcagcctcccaaagtgctgggatgacaggcatgagccaccatgactggcccaagcccagatttcttaaaaagctagaaaaccatggaggaatgccttcagaattctgatggaaagttaatcccaacatagcagcctgctttcagcctaactggtattaaaatagaagggtagaggccgggtgcagtggctaacgcctgtaatcccagcactttgggaagccgaagcaggtggatcacctgagataaggagttcaagaccagcctggccaatgtggtggaaccccatctctattaaaaacacaaaaattagctgagcgtggtggcaggcacctataatcccagatacatgggaggctgaggcaggagaattgcttgaacctgggagatggagattgcagtgagccaagactgcgtcactgcactccagcctgggtgccaagagcgaaattccatctcaaaaaaaggtagaataaaaatctcagagaaagcaagacctcagaaaaaatattgtctttatattctttctgaggaagcttctggaggttgagtttcaccaaaaggtgggcatagacaggaaggaaaaagaaacagacaaatggttgcctaagggacacaggagagaggtgatcctgcacaccggtgtagagggcaacgaggccagtttggaacgggtttgaaaatttagggtgaaagacagtacagagtgccgtctccagagctatgcttctctctggagtgaacagatgggcccgggggaaggtaggaggcaggggaagcatcacatgtattgatgagacctacaatgatgatggtgcatggctgagcctgagcaatgggacaacgaaggcatgtgttctggctgggtgtgatggcacatgcctgtaaccccaacactttgggaagccgaggcaggtggatcacgtgagcccaggagtttgagatcagcctgggcaacatagaaaaccctgtctctacaaaaagtacaaaaaatagccgggtgtgctggttcacacctgtagtcccagctactctagagggggaggcgggaggatcatctgagcccaggcaggtcaaggctgcagtgagccatgattacgccattgaacctgggtgacagagtaagatgatgtctcaaaaagaaaaaaaaaatgtgttccttgcctggcacctctcctcactagcatcttgataagagccttctgattccctcacactgcaaggaataagaagatgaaatctaggctgggtgcgatggctcatgcctgtaatcccagcactttgggaaactgaggcggatggatcacttgagatcaggagtttgagaccagcctggccaacatggtgaaaccccgtctctactaaaaaaaatacaaaaattagccagacatggtagcacatgcctgtagtcccagctacttgagaggctgaggcaagagattagcttgaacctgggaggtgaaggttgcactgagctgatcgtgccactgcactccagcctgggcaatagagcgaaactgcctcaaaaaaaaagaaagaaatctgcctaaataagaggaattctatgaatacacacattcttgtagatgttcagagtatccctggaaggatacacaagaagctggtcttggtggtttctctgggaaagggacccaggtggtttggagaatgaggaagaagcctcgtggttcacttttttttctgttaaatctgcaccatgtgcaaaagacaaaaaagatcacctgtccccacccccacaaaaaataagtcagctattgcagtagcctaggctagcactaaggttatcgcagcaacagtggggggatttgagcaagactggagatagcagaaagccaacatgtgctcagtgccctcaaggtatttatactctagaagggggcacacgtgggaaaaatagattaaacgggggctcatcagagaaacactggactccactggactggccaagcagacaggagggaacccaccttcatgcacctgctcctttttttttttttttttttttggagatggagtcttactctgttgcccagggtggagtgcagtggcgtgatcccagctcactgcaaccttcgcctcccaggttcaagcaattctcctgcctcagcctcccgggtggctgggactacaggcattcgccaccacacctggctaattttttgtattttagtagagacagggtttcaccatgttggccaggctggtctcgagctcctgaactcaggcaatccaccctccttggcctcccaaagcgctaggattacaggcgtgagccaccgcgcccggccaccggctcctatttttatatcccactctggagctctggttcccgggcacttgctcttcacctctgactcagagcgtgaacctgacttcaccctcctacccaggtggccaagactaagcagcagattgaggagcagcgggtgcaggtgcaggtggtggagcgggcccagcaggtggcagtgcaggagcaggagatcgcccggcgggagaaggagctggaggcccgggtgcggaagccagcggaagcggagcgctacaagctggagcgcctagccgaggcagagaagtaaatgtcccctccctgaccctgcctagctcacttgccacctaggcaccccaagatggagtgctgaagccttcaccacctggactcctatggatttcaggtttcaggagcgtctgcctctgcagcactgggcctttctcctgggagtaagggctgctgggctccaccctccacttcccttctgtccacaggtcccaactaattatgcaggcggaggcagaagccgcgtctgtgcgggtgagttaagaggcagttccatgctggcttgtggagagggtgggggttgctgcttgatcggggatttcttgttcttaatgatttccgtcaatctcacaagcatccttaaccctcagatgcgtggggaagctgaggcctttgccataggggcccgagcccgagccgaggctgagcagatggccaagaaggcagaagccttccagctgtaccaagaggctgctcagctggacatgctgctagagaagctgccccaggtctggaggtcatgtgggcaccaagaaaggaggaaatagaaccagggactaaggggtggggtgtagtgaggggcttagggagaaacagcctagggggactctaaattaggggtgggaattattagtgaccaaagtgaggaaggatgatcagtggaacgaggaccttaaaacccagagtaagttgttttatgaggaatgtggtcagatcatgggcactgagtgggtgtctctctcctgccaggtggcagaggagatcagtggtcccttgacttcagccaataagatcacactggtgtccagcggcagtgggaccatgggggcagccaaagtgactggggaagtactggacattctaactcgcctgccagagagtgtggaaagactcacaggcgtgagcatctcccaggtgaggtctcaggttggagctgaggagaattgctaggttcctgtgttgtgtgacacagtatgcctagcatttaaccagcatccaggcctgggagtcattgatgtttattaatcactttctgtgtgccagacacagtgctaagcttctacataaatgagttgttttaaatcaaactaccattagggtatataggattttacaaagtccagaaactcaacatccagcatgttcctactcattctgctagtgcagctggagtgaaatccaggtcgactgtctctgcaacctgtgcttgtggtcaccccactagtatagggaactagttgcagcctattgacagttaattaattctagggcatatcactgcttttctcagcgccccagttaattcacctgtagatcatggtagaagtcagcaaacaggctctggaaccactgttttgttgcgaatcctagctacaatgcctgctagctgtaatcttggacaagtaatcaacctctctatacctgtttcctcatcttaaaattgggttaataattagaaactaccctgttgaattgttgaggggctcgagcaaatatttgcagtgtttagaatagtgcctggtatatagtaagcattatgtgtatgttaaagaaatggggccaggtgcagtggcttacgcctgtaatcccagcactttgggaggctgaggcaggcagatcacctgaggttaggagttggagaccagcctggccaacatggtgaaacaccatctttactaaaaatacaaaaaaaaattagccaggcttggtggtgcatgcctgtaatctcagctactcgggaagctgaggcaggagaattgctggaacccaggagccgaaggttgcagtgagctgagatcacaccactgcactccagcctgggtgacagaataagactctatctcaaaaaaaaaaaaaaattccaggcgcggtagctcatgcctgtaatcccagcactttgggaggctgaggcgggcggatcacgaggtcaggagattgagaccatcctggctaacacagtgaaaccccgtctctactaaaaatacaaaacagccgggcgtggcggtgtgtgcctgtagtcccagctgctggggaggctgaggcaggagaatggtgtgaacctgggaggcagagcttgcagtgagccgagatagcaccactgcactccatcctaggcaacagagcaagactctgtctcaaaaaaaaaaagagaaagaaatgcatattcgggctgggtgctgtggctcacacttgtaatcccagaactttgggaggccagggtggacgatcagctgaggtcagaagtttgagatcaccctggccaacatggtgataccccatctctaccaaaaatacaaaaattagctgggtatggtggcgcatacctgtaatcccagctactcgggaggctgaggcaggagaatcacttgaactcaggaggcggaggctgcagtaagccaagatcgcaccactgcattctagcctgggtgatagagtgagattccgtctcaaaaaaaaaaagaaaaaaaaaaagcgtatgtaaataaaagcactggatcataccaatgaccttcaagctgggttccttggagcctcctggaggcctgcagtagaatattcagagctaaggagagtgtgcaaacaaggctctgccccctctcctctcttcagtgatttattgtatgtgggtcctgatgtctttgtttggggaaacaggtggtagggcaccagaaagaaccctggccgtgtgtgttctgcctatagcccattcgtctaaactggggcccgggagagtaggggcctcagcctcccgaatgttcccaagtgtcatctactgttgtctttttgccaggtgaatcacaagcctttgagaacagcctgagccttcagccctcacagatgcccagcctcatagctgaagttgcctgaatgatcctcctgttgcatgtaacccactggcctccctgagcatgtccattgacagtgaggtcccacccctcatctctccttgccaaatagtttgtgccttgtcttgaagggggttgctccccttgccaacctcacactgctatgattgccaactccagcggtcccatgtcagccttctgatgatcccactccaccccacctcaacttatttaacttcctaattaaatcagactgtttgagcctgttgtctagaatattttcctgaccaagactgagggatgggctggaggttttcaactttgctacccaaataaattgctgtaagtaagtactaataaaacagaagcaactggaaattaatgcttggcccggcacagtggctcatgcctgtaatcccagcactttgggaggccaaggcaggcagatcatctgaggtcaggagttcaagaccagcctggccaacatgacgaaaccttgtctctaccaaaaatacaaaaattagccaggcagggtgaaacatgccaagtagtagtcccagctacttgggaggctgaggcaggagaattacttgaacctgggaagcagaggttgcagtgagccaagatcgcaccactgcactctagcctaggtgacagagtgagactgtttcaaaa

SEQ ID NO: 5796 - DNA, 2305 bp, Homo sapiens
gtcttacagtggaaactatttggtttttcaggagaatttgctcatatatttctggcttaaattacggacattttccccttcaagtgtctgactagtcacaaacatctatgtaattttttttaaaaaacagaagaaaagatgccatatatcttacatactttactccttagaaatcccttcaggctctcactccttacttttgctttacttgcaagtttgacttcttagcttgtaatggaaggggtgtaggaggtctctgtgatgctagaagctggtgtccggatagagtaaggggagacacggaaattgtttaaaaacgtgtaaaggaactcataaagcattgccaaataggggccattttgcttagaggcaaaagcagctcctttcccaggggaatcaccaaggtatcagctgaggatcctttgaagcagtggaaagaatattgtaggagttgacagacgttgtttaattctgccacactggtggcccttgctgaaatctgtccacaaaagcattttgtttggctggcatagtgttgttttatttttaaatgtaattagttgctaatatttgaaaatgggagatattacataaaacctgaattttcggcttttcttgaagaataggaaggtcttgtcatttagggcctgtattcaagcgaggcactaaactgctggagttgagtaaatggctcccttctttagacaggtcatgtatctccaccttaccacagcccccacttgtcctttttgcatatttacataaaacagcttttgactttaagttagagatacttttgcagtagaagtgataggaggaggtggaagtgtacataatctagctgatatgtaaggttcttccaattcttatttaaatagccactaacaatgattctaaacaagattgaaaatacagtatgtttcatatctggatatgctgttggtagctcaaaacctacgtttttacttgcctgctggacatttcatgtggatatctccatatcttgatttcttcctttgatttgttattgaattattcgtagatacatccgacttgtgttctcttactcttacctgaggctctttggatatgctagtcccttcatccttctttgcctggtccaacactactcatccttctagactcactcaacctgaactgtcaaatcatcagggctgagttggatattactcctttgttttctttttgcaccctgtcctagctctgtgaattttaagttcctatttacttgcctataactagattggatgctccttgagaacagggatgatatcttacccacattttattccccatacttatagtgcttgacatctggtaggcactcaatttgaataaataggtgaggggatatacaaactaaaactatcacttctctcctccacctgtcatttcagtttttcttctcgattaatggctttattgttacatttgactggtttaaaatgttggggtcatctctggcttctttgtattactgtgcacactcaggtagagcctgtatgttcatttccctttgacatgttcttctagtctattcctcctccgacttctctaattgagtctcctttgtcagactactgtgataacttcttaatggggttcactggcccccacctcaccttctgtttttcaaatctcaccagttataggacacttctgaacatgtcacactcagaattgttgatgtcttttgagttcaacctatgctaaagtgcactttttagcatagaattaacagcaattgatatttggcttcatcctgcttttctgactggattgtctaccataaccttttatctcctttttgctttagccagtccggactgctacttttcctgaatatggctggaatgtcccactgtatctgtttcaccgcatctatgagtctaagtcctatcttatctattgcacaaatatatcatgcctactatagaccaggtattgcccttgacactcaggctaaaaaggtaaatgacagggccgggcgcagtggctcacgcctgtaatccagcactttgggagagcaaggtgggcggatcacgaggtcaggaattcaagaccagcctggccaacgtggtgaaaccccatctctactaaaaaatacaaaaattagcctggcgtggtggtgggcacctgtaatcccagctactcgggaggctgaggcaggagaatagcttgaaaccggaagacggaggttgcagtggggcgagattgcaccactgcactccaacctgggcaacaagagcaaaactctgtctcaaaaaaaaaaaaaaaaagtaaa

SEQ ID NO: 5797 - DNA, 903 bp, Homo sapiens
ttgagacttgagatgtggtgacacttggatcataaacagagggcttcgattccaggatgggggttcctccagggggaaatgaaaaggagctctcactctgttcttacgtatgcacaatgctctgaattgtggcacatgggtttgcagaaggataatggagataattgaaagtaatgaaaatgaaaccaaatctccttccccaaaaacttaaaagaactgattcaaaagtaccccaagaatatgcaaagaaaagggaatcacatcaacagatgattggataaagaacatgtggtatgtatacataatggaatactattcagccactaaaaagaatgaaaccatgtcttttgcagcaacctggatggaactggaggctgttatcttaagtgaaataacttagaagtagaaagtcgaatacttcatgttctcactcataaatgggagctacataaagtgtacccatgaacatagagtgtggaacaaacattggagactcagaagggtgggaggagggtaagggatgagaaagtacctgatgggtacagtgtacacttttctggtgttggttgcaggaaaagcctggacttcaccacttcgcaatatatccgtgtaacaaaactgcacttgtacgccttatatttatacaaatttaattttttaaaagggaagagagaatcatattaatttctcaccactttttaagtaagcaaacagcagtatttcccagaggcaagaggttcagcaagaagtcaggaaatgtttttgtagataagcatctatcattctgatgggccatgactagtgtgttcacttgtaattcctttgcctttaaaaaaagagaatgatatcaaaaaataagtgccttatactgtgaaaaacgataaaaggacttcctgattctaa

SEQ ID NO: 5798 - DNA, 903 bp, Homo sapiens; identical to SEQ ID NO: 5797

SEQ ID NO: 5799 - DNA, 248 bp, Homo sapiens
ttttatcctattttgtgattttcagtattaagagattattgatcacttgcagagttacaaggcaagcactagtttaaatctgaattagactagggccattgaccttatatacctgtaaaagacactacggtgtatacaactgtagaaacaatatacacatagtagtttaatattacagtctgtattccaatgcagaatcttttgagaaaaggttgccaaaacatcatttgcatttacttgaacccttt

SEQ ID NO: 5800 - DNA, 2064 bp, Homo sapiens
ttctctgcaggtgtcaaagtcgtgttctcaggccactaccacaggaatgccgggggtacctaccagaacctcgacatggtggtgtcatctgccattggatgccagctgggcagagacccccacgggctccgagtcgtggtggtcaccgccgagaaaattgttcaccgatactacagtctagatgagctgagtgagaaaggaatagaagacgatctcatggatttgatcaagaaaaaatgacgctccttcccgttcccgttcacttttcacttgcactatttttttattttgccagaaacagcagctgcacacaacctcttgctgaaatataaaaatagcccaggcaggtttgtgaatttatgtccttttgcataaatcagagagctggggccctgtcctgaattatattcaaaatagaactgcatttcctttaaaatggagcgaatgatcctggaaatcagtttttaaaatattagactatctctgcatggatgtttgaataaattctcctaatgctgtgtttctcaactccacttttgaattggatgtattcgtggttagcatatggtcaaagtctgcctatagacctcaattccaatctgacagccaagtatgatctttgataattccttaaacaaactacacctgattgtattaaattgtggtcacgattcccaaaacgctaggcaaaacaaagttcatctcctttcctttccagcggaacgaacagctgtctcccttgttgtgagagccatgcagacttattttgacaaggagccaagtaggcaccatttactgttcaattctgagacttctgatgataggaacagaatgcagttgatacagctcggagcttaaatttgccttcctgggtgcctagaaaagtcacctttgcacataaattggccatttctgaaaatctcctccaagagactgaaaccaaagctctaaaacgccgcttcttcagtctctggggagcacgttgagttggttcacatccacattctggctgtgtagccactccacagatgggtggtctcttgggatcagaatgcccctccactcatgagactcttcattttgtccactttgacaggaaaagtgggaatgtatgcagagctctcaaaagaaacaaaaaaggccaaaacggtgccttcagccacatcctctgaattggccctgacttggactaaatgcactaatgcaaaatcccttgacaaaagcgcataggttatttcaaaccagcattgttttttatgtaacctgttttaccgcatcttctcagcagcttctgaccactgctcaattttctcctttacagccattgttctggtggacaaataacctaggtactccaaatcctggcaggaaaaatatacagcattatgaaacagcactcagtaatcctaaaatgatttccaaagctggttacacatgacctgcaaagtctattaaattaaaagactttctcattacagagtttagtcaacgtagcaaaaccatgggaaattaaatggaaagataattaaatatgtaaattcataaggaacaaaagacgagaagttaattatacaataggctggtgacaccagagttcattgttatgtgccacaagaaaattaaattttttaaaaaactagaacgctcttcttttagtgttttgctgaaatcctgttttgtatttgtttctttacaacaggtgtaggtataggaggtcaagaaaaggagttcggtaaagggcatagctaataacaaccacacattgggccaggcacagtggcttacgcctgtaatcccagcactttgggaggctgagacgggcagatcacctgagatcaggagtttgagaacagcctggccaacatggtgaaactccatctctactaaaaatacaaaaattagccaggcatgctggtgcacacctgtaatcccagctactcgggaggctgaggcaggagatcgctggaactcaggaggcagaggttgcagtgagccaagatcatgccactgcactccagcctgggcaacagagcaagactctgtctcaaaaaaaaaaaaaaaaaa

SEQ ID NO: 5801 - DNA, 2062 bp, Homo sapiens
ttctctgcaggtgtcagagtcgtgttctcaggccactaccacaggaatgccgggggtacctaccagaacctcgacatggtggtgtcatctgccattggatgccagctgggcagagacccccacgggctccgagtcgtggtggtcaccgccgagaaaattgttcaccgatactacagtctagatgagctgagtgagaaaggaatagaagacgatctcatggatttgatcaagaaaaaatgacgctccttcccgttcccgttcacttttcacttgcactatttttttattttgccagaaacagcagctgcacacaacctcttgctgaaatataaaaatagcccaggcaggtttgtgaatttatgtccttttgcataaatcagagagctggggccctgtcctgaattatattcaaaatagaactgcatttcctttaaaatggagcgaatgatcctggaaatcagtttttaaaatattagactatctctgcatggatgtttgaataaattctcctaatgctgtgtttctcaactccacttttgaattggattgtattctggttagcatatggtcaaagtctgcctatcgacctcaattccaatctgacagccaagtatgatctttgataattccttaaacaaactacacctgattgtattaaattgtggtcacgattcccaaaacgctaggcaaaacaaagttcatctcctttcctttccagcggaacgaacagctgtctgccttgttgtgagagccatgcagacttattttgacaaggagccaagtaggcaccatttactgttcaattctgagacttctgatgataggaacagaatgcagttgatacagctcggagcttaaatttgccttcctgggtgcctagaaaagtcacctttgcacataaattggccatttctgaaaatctcctccaagagactgaaaccaaagctctaaaacgccgcttcttcagtctctggggagcacgttgagttggttcacatccacattctggctgtgtagccactccacagatgggtggtctcttgggatcagaatgcccctccactcatgagactcttcattttgtccactttgacaggaaaagtgggaatgtatgcagagctctcaaaagaaacaaaaaaggccaaaacggtgccttcagccacatcctctgaattggccctgacttggactaaatgcactaatgcaaaatcccttgacaaaagcgcataggttatttcaaaccagcattgttttttatgtaacctgttttaccgcatcttctcagcagcttctgaccactgctcaattttctcctttacagccattgttctggtggacaaataacctaggtactccaaatcctggcaggaaaaatatacagcattatgaaacagcactcagtaatcctaaaatgatttccaaagctggttacacatgacctgcaaagtctattaaattaaaagactttctcattacagagtttagtcaacgtagcaaaaccatgggaaattaaatggaaagataattaaatatgtaaattcataaggaacaaaagacgagaagttaattatacaataggctggtgacaccagagttcattgttatgtgccacaagaaaattaaattttttaaaaaactagaacgctcttcttttagtgttttgctgaaatcctgttttgtatttgtttctttacaacaggtgtaggtataggaggtcaagaaaaggagttcggtaaagggcatagctaataacaaccacacattgggccaggcgcagtggcttacgcctgtaatcccagcactttgggaggctgagacgggcagatcacctgagatcaggagtttgagaacagcctggccaacatggtgaaactccatctctactaaaaatacaaaaattagccaggcatgctggtgcacacctgtaatcccagctactcgggaggctgaggcaggagatcgctggaactcaggaggcagaggttgcagtgagccaagatcatgccactgcactccagcctgggcaacagagcaagactctgtctcaaaaaaaaaaaaaaaa

SEQ ID NO: 5802 - DNA, 248 bp, Homo sapiens
ttttatcctattttgtgactttcagtattaagagattattgatcacttgcagagttacaaggcaagcactagtttaaatctgaattagactagggccattgaccttatatacctgtaaaagacactacggtgtatacaactgtagaaacaatatacacatagtagtttaatattacagtctgtattccaatgcagaatcttttgagaaaaggttgccaaaacatcatttgcatttacttgaacccttt

SEQ ID NO: 5803 - DNA, 2224 bp, Homo sapiens
gctaaagtggtattgattttaaacttgactcaccaacttcacaggggttaatacagatgtgaaaaatcttgagttataagcttcctgcatgcatgagacttgtttttattttgctgctctagtgttattggttttattacgcaaggagaaagaaggcagggaatttatggtcaggagattcctggtcaggaggttcatagtcagaagatctagactgggtcacaagaaatgacagaatttaagcatttgagccagggaataagaatgtgtgtgctctgcctgtgttttccacattcattttactcagcattgcactgtcatcttgcttaagaacaattcagtaggtcagaaacattggattccaaagctgttaatggtttattttccatttcttgccttcgcaatatctgaaataaagttatatcccagataactgatgggaaaacagggttcaaagctataggatatatgactcatttaacataaaattattcaaattaatgaattagcaaatcctcttgtgcttataataagcaaatataagttttatcttgtctattataaaagaaatgtctaaacattaagtgcaaaaccaaactaggcagcaggagaaggaaattagttatgttgtttttataataaggattgtaaaaccaatatcttagtgaaattctcagaaagcttgatttaaaaatttatcaaaattcgggagtttttttgtttcatttggtctatttgtcagtggtttgaggtcttagttctgcagcgacatcttatggagttggttagtttgcacaaccatttaataatgtctgccagaactgatcattgttctaacagatttgatgcaaataggatccctgcctgcgctttgaatgtggaagtaattaaacggatgctatgaggacttttatttttttctctgttggtgcttatctaaaatttccttatcatggcaactgtataatttttaagacactccaaaatatgtactgaggtctgaaattctcactacatattccaagttaggataggaggggagaaggaagctgttgaatagtgaaataagacagcagtaaaagatcacagtacagctggtgtttgttggcaagagtttccacttaaaaatttgcagcagtgcaagtacctcaattattattggcgcttttcactgttcgtgatcaccaggagtgaaaaaaaaagaaaagaaaagaaaagaaaattgaattctttgaagctcagagaagtaaactgaaaaatttttgagtaccgaaatttacccatttcttcttctgattgtgttcttttgaacagaacacattgcattaaactctagaaagaaaaaaagtgactgttttcatatttttatgattggagtcacattcttaagatctataatgtagattacagcaccattttgttatctgctagaagaaatatagctaatcatctctaaattagtaatgttacattttattttgcttcctatttactagtgtggcacattttaatgacagaaaatttccttgaaggcaagagctttacacacagtaggatttcactcagtttttgcatatattgaccattgcagaatacaaacaactgttaagtaatttctcccaaagacaggccataataaagaggaaaaatataaactatatgacactaaaaatcctgttaatcttgatcaatcagtgaatgaaacactaattgtgccaaacaacacattctacctgaacaaaaggaggtaattgcagtatgtttctatgaatacatagcagctgttctatgccattattatcactggtgagtaaagatcatggtgaatcattgtctaatatcttgtgatcttgctcacatataaaaattgccaggggacttcattaattatgattgcatcttaagggctctggacattttcatgagtgccacaggacacctagaaaataattgcatcttttgagaaccatgtgccagtgacaaggtaaagctcaggttgtatattccagagattctctggcaaatgagcattgcctgccttaatattctaagcccatcagttagaaaaggctgaccctatgacttaaaattgcatgctgcatgattagaaagatagataacaatatattttaaagaattatttgtacctcacacatgcccaacaagattgaatgattttaattgaattgaatattggtaaatttgctagaaacagaaaaataag

SEQ ID NO: 5804 - DNA, 2224 bp, Homo sapiens; identical to SEQ ID NO: 5803

SEQ ID NO: 5805 - DNA, 333 bp, Homo sapiens
ttactatatcttttaagtagaaggcttttaaagtgtgtcatggagacagaagcccatacttacctcctgagcatctatggaaaattaagagttggcttttattataggtctctcaagtgagctaagcataaccaagcataggctcctacttaaggtattacatttttagagagtactgaaaaggtaggcgtccttcaaactacctgggatgaaggaaaagctttggagtcccaaggaatagcagagggagaataaggatggcacctgaatgtggtgtaggggttccagggaccaacttctcagggtcttgagaagaccactgctctgcatgat

SEQ ID NO: 5806 - DNA, 333 bp, Homo sapiens; identical to SEQ ID NO: 5805

SEQ ID NO: 5807 - DNA, 26439 bp, Homo sapiens
gggactacaggtgcgtgccaccacacccagctaatttttgtatttttggtagagacagggtttcaccacgttgtccatggccaggatggtcttgatcttgaccttgtgatccgcccgcctcggcctcccaaagtgctgggattgcaggcgtgagccaccgtgcccggcctgtcctctgtggttttctgggcttatgttaaaattataactcaatcaccagtctttataaatttgcttttttatatttaaaccaaacctaatgctaattgtgatatgttatttattctcacctgatttgaatcattggattcaattaaatgagtttaattatcattaaataattctaagagaaataatgtctattcggatggtgggaattttctttctacatgcagccccattctgaatgaatgaaatcaaatcacgtgaagatcagggtcctagagtaacttaatattttgtacattggttatttgactcctcatttttatattacatgttatatcaagggagggggcataaaagaaatacaaaaattgcagaggtatctggaatgtacctatttgttaattctatttgtcatttcttttgtttcatcttttgagtaataagctgcttggaaaagtttctgttctttagctgattttttagctataaaaatgtatttgaaaagctcataaatttcaggattgaaaagataattgaaagttttaaaaaaacctaattcattgaagtaataaccaaataattttcaatcttgattcaactgtgattcaaatcttacaccatttgcccacttctatgaattttatgtataaaattttttaagagtcagagttttttttcttgattaattggatgtatttcacagaatttccaactgctcacgttagttttcttccttttagagttgatctctctaatgtattagatcttcatgcctttgatagtctctctggaataaggtatgttttgtataatttggttacttttattgttatgtaccttttttccccatagttaacaggaatgatttgcacaattgcatccatgatttaagcttcctgccattcctttggcatacaagaccatacttaatgaggtatattcttggaagttttactaactggttgtttggaaatcatattgcattttcctgtagaaattatagtgtaaatgatagttaactttagaggctaatcgttaacacttctacaccaaacactatatctagtactctttctatgagaaaatgcatgaaatacatagaaaattttagcttagcgttttcacacaaataactctcttcactttatttttttattttttattttttcttgagtttttttttaatttatttatttattattattataccttaagttttagggtacatgtgcacaatgtgcaggttagttacatatgtatacatgtgccatgctggtgcgctgcacccactgactcgtcatctagcattagttatatctcccaatgctatccctcccccctccccccaacccacaacagtccccagaatgtgatgttccccttcctgtgtccatgtgttctcattgttcaattcccacctatgagtgagaatatgcggtgtttggttttttgttcttgcgatagtttatggagaatgatgatttccaatttcatccatgtccctacaaaggacatgaacccatccttttttatggctgcatagtattccatggtgtatatgtgccacattttcttaatccagtctatcattgttggacatttgggttggttccaagtctttgctattgtgaataatgccgcaataaacatatgtgtgcatatgtctttatagcagcatgatttatagtcctttagggtatatacccagtaatgggatggctgggtcaaatggtatttctagttgtagatccctgaggaatcgccacactgacttccacaatggttgaactagtttacagttccgccaacagtgtaaaagtgttcctatttctccacatcctctccagcacctgttgtttcctgacttcttaatgattgccattctaactggtgtgagatagtatctcattgtggttttgatttgcatttctctgatggccagtgatggtgagcattttttcatgtgttctttggctgcataaatgtcttcttttgagaagtgtctgttcatgtccttcacccactttttgatggggttgtttgttttttttcttgtaaatttgtttgagttcattgtagattctggatattagccctttgtcagatgagtaggttgcgaaaattttctcccattttgtaggttgcctgttcactctgatggtagtttcttttgctgtgcagaagctgtttagtttaattagatcccatctgtcaattttggcttttgttgccattgcttttggtgttttagacatgaagtccttgcccatgcctatgtcctgaatggtaatgcctaggtcttcttctagggtttttatggttttaggttgaacgtttaagtctttaatccatgttgaattgatttttgtataaggtgtaaggaagggatccggtttcagctttctacatatggctagccagttttcccagcaccatttattaaatagggaatcctttccccactgcttgtttttctcaggtttgtcaaagatcagatagttgtagatatgcggcgttatttctgagggctctgttctgttccatgaatctatatctctgttttggtaccagtaccatgctgttttggttactgtagccttgtagtatagtttgaagtcaggtagtgtgatgcctccagctttgttcttttggcttaggattgacttggcgatgcgggctcttttttggttccatatgaactttaaagtagttttttccaattctgtgaagaaagtcactggtagcttgatggggatggcattgaatctgtaaattaccttgggcagtatggccattttcacgatattgattcttcctacccatgagcatggaatgttcttccatttgtttgtatcctcttttatttccttgagcagtggtttgtagttctccttgaagaggtccttcacatcccttgtaagtcagattcctaggtattttattctctttgaagcaattgtgaatgggagttcactcatgatttggctctctgtttgtctgttgttggtgtataagaatgcttgtgatttttgtacattgattttgtatcctgagactttgctgaagttgcttatcagcttaaggagattttgggctgagatgatggggttttctagatatataatcatgtcatctgcaaacagggacaatttgacttcctcttttcctaattgaataccctttatttccttctcctgcctaattgccctggccagaacttccaacactatgttgaataggagtggtgagagagggcatccctgtcttgtgcccattttcaaagggaatgcttccagtttttgcccattcagtatgatattggctgtgggtttgtcatagatagctcttattattttgaaatacgtcccatcaatacctaatttattgagagtttttagcatgatgggttgttgaattttgtcaaaggccttttctgcatctattgagataatcatgtggtttttgtctttggttctgtttatatgctggattacatgtattgatttgcatatattgaaccagccttgcgtcccagggatgaagcccacttgatcatggtggataagctttttgatgtgctgctggattcggtttgccagtattttactgaggatttttgcatcaatgttcatcaaggatattggtctaaaattctcttttttggttgtgtctctgcccggctttggtatcaggatgatgctggcctcataaaatgagttagggaggattccctctttttctattgattggaatagtttcagaaggaatcgtaccagttcctccttgtacctctggtagaattcggctgtgaatctatctggtcctggactctttttggttggtaagctattgattattgccacaatttcagatcctgttattggtctattcagagattcaacttcttccttgtttagtctttggagggtgtatgtgtcaaggaatttatccatttcttctagattttctagtttatttgcgtagaggtgtttgtagtattctctgatggtagtttgtatttctgtgggatcggtggtgatatcccctttatcattttttattgcgtctatttgattcttctctctttttttctttattagtcttgctagcggtctatcaattttgttgatcctttcaaaaaaccagctcctggattcattaatttttttgaagggttttttgtgtctctatttccttcagttctgctctgattttagttatttcttgccttctgctagcttttgaatgtgtttgctcttgcttttctagttcttttaattgtgatgttaggttgtcaattttggatctttcctgctttctgttgtgggcatttagtgctataaatttccctctatacactgctttgaatgcgtcccagagattctggtatgttgtgtctttgttctcgttggtttcaaagaacatctttatttctgccttcattttgttatgtacccagtagtcattcaggagcaggttgttcggtttccatgtagttgagtggttttgagtgagattcttaatcctgagttctagtttgattgtactgtggtctgagagatagtttgttataatttctgttcttttacatttgctgaggagagctttacttccaagtatgtggtcaattttggaataggtgtggtgtggtgctgaaaagaatgtatattctgttgatttggggtggagagttctgtagatgtctattaggtctgcttggtgcagagctgagttcaattcctgggtatccttgttgactttctgtctcattgatctgtctaatgttgacagtggggtgttaaagtctcccattattattgtgtgggagtctaagtctctttgtaggtcactcaggacttgctttatgaatctgggtgctcctgtattgggtgcatatatatttaggatagttagctcttcttgttgaattgatccctttaccattatgtaatggccttctttgtctcttttgatctttgttggttgaaagtctgttttatcagagactaggattgcaacccctgccttgttttgttttccatttgcttagtagattttcctccatccctttattttgagcctatgtgtgtctctgcacgtgagatgggtttcctgaatacagcacactgatgggtcttgactctttatccaatttgccagtctgtgtcttttaattggagcatttagtccatttacatttaaagttaatatcgttacgtgtgaatttgatcctgtcattatgatgttagctggttattttgctcgttagttgatgcagtttcttcctagcttggatggtctttacattttggcatgattctgcagtggctggtaccggttgttcctttccacgtttagtgcttccttcaggagctcttttagggcaggcctggtggtgacaaaatctctcagcatttgcttgtctgtaaagtattttatttctccttcacttatgaagcttagtttggctggatatgaaattctgggtcgaaaattcttttctttaagaatgttgaatattggcccccactctcttctggcttgtagagtttctgccaagagatccgctgttagtctgatgggcttccctttgagggtaacccgacctttctctctggctgcccttaacattttttccttcatttcaactttggtgaatctgacaattatgtgtcttggaattgctcttctcgaggagaatctttgtggcattctctgtatttcctgaatctgaacgttggcctgccttgctagattggggaagttctcctggataatatcctgcagagtgttttccaacttggttccattctccccgtcactttcaggtacaccaatcagacatagatttggtcttttcacatagtcccatatttcttggaggctttgtttgtttctttttattcttttttctctaaacttcccttcttgcttcatttcattcatttcatatttcatcgctgataccctttcttccagttgatcgcatcggctcctgaggcttctgcattcttcacgtagttcttgagccttggttttcagctccatcagctcctttaagcacttctctgtattggttattctagttatacattcttctaaatttttttcaaagttttcaacttctttgcctttggtttgaatgtcctcccatagctcggagtagtttgatcgtctgaagccttcttctctcagctcgtcaaagtcattctccctccagctttgttccgttgctggtgaggagctgcgttccttcggaggaggagaggcgctgcgttcctttggaggaggagaggcgctctgctttttagagtttccagtttttctgctctgttttttccccatctttgtggtttttatctacttttggtctttgatgatggtgatgtacagatcggtttttggtgtggatgtcctttctgtttgttagttttccttctaacagacaggaccttcagctgcaggtctgttggagtacccggccgtgtgaggtgtcagtctgcctctgctagggagtgcctcccagttaggctgctcgggggtcaggggtcagggtcccacttgaggaggcagtctgccagttctcagatctccagctgcgtgctgggggaaccactgctcttttcaaagctgtcagacagggacacttaagtctgcagaggttactgctgtctttttgtgtgtctgtgccctgcccccagaggtggagcctacagaggcaggcaggcttccttgagctgtggtgggctccacccagttggagcttcctggctgctttgtttacctaagcaagcctgggcaatggcgggcgcccctcccccagcctcgctgccgccttgtagtttgatctcagactgctgtgctagcaatcagcgagactccgtgggcgtgggaccctccgagccaggtgcgggatataatctcgtggtgcgcctttttttaagcccgtcggaaaagcgcagtattcgggtgggagtgacccgatcttccaggtgccgtctgtcacccctttctttgactaggaaagggaactccctgaccccctgcgcttcccaagtgaggcaatgcctcgccctgcttcggctcgcggatggtgcacgcacccactgacctgcgcccactgtctggcactccctagtgagatgaacccggtacctcagatggaaatggagaaatcgcctgtcttctgcgtctctcacgctgggagctgtagaccggagctgttcctatttggccatcttggctcctctctcctctcttcactttaataatggattagttttctgccttctcctgtggggaatctttttggtaagggagggaagaaagattagttattcttgtgcatcagtatctttttctttttttattgtagtaagaacatctaacatgagatctaccctcttaacaattttttaagtgtacaatacagtattgctaactataggcatgaggatgtgcagcagatctctggaacgtttcactctttataactgaagctttataccccttgaatagcagcttcccatttccctgtcttcatagcccctggcatccaccattctacactctttctgtggggttgactattttaattacctgacgcaagtggaatcatgcattatttgtctttctgtgactggtttatttcacgtagcataaagtcaccaaggttcatccatgtttttgcatatggcaagttttcctttttaagtctgaataatattccattttctacatataccacatttactttatccctttttctgttagtggacatttaacttgttctcacagcttggctattgcaaataatgctgcaatgaatatctcataagtctcgtatatgtccatagaagatcatgaaaatggacatgtctctgggtattttgaattggtgggacaattttgcttaagggtaggcatagtgggtggctctacatttgagagttctaattcccattcctatatatatttcttttctttttatttatttatttttttgagatggggctctctgtcactcaggctggagtgcagtggcacaaacatggcttactgcagcctcaacctcctgggctcaagtgatcctcccatctcagcctcccaagaagctggggacacaggcatgtgtcaccatgcctgactaatttttttttttaattttctgtaagcatggggtcttgctatgttgcctaggctggtctcaaactcctgggctcaagtgatcctcatgcctcagcctcccaaagtgctgggattacatgtgtaggccaccacacccagccttatatatatatttctaattttgccttagccatgcccttaaaaactaattctactttcaactagtttttttttttccaccttcagtctgtagtattgttcacattttgaaaacaatacctacagtaacctgtgaggtaggacatgatagtgttttattggaccccttttactttatgaattggaaaaattaaatttgcatgtagtttgtaaaaaaaaaataaagaaagaaagaaaaaagaaattgattgagattatttcagcagccagaagtgtgggacaggcagggcagttattcctccttctcagtttggaaactgaagctcagagagtaaacttgtcagtgatacagttattcaagaagttgtcttcagttgagagatacgtttttcacctgtagcttctggtattggaacagtacctttttagactaaacaaattacggttaaaattataagggtattttcggagtacctggaaaaaatcagcattttgcttttctagttccatttagtaggaagacaggaaagtttggtatacctgaattacatgtgagttatttctatttttctaaaaattcttataaattgtgtaaggtaaaaatgactacttcttgttttatggtaaatatagttatatcctttcaagccactgctgtacaaagttgtgaaatctccctgaggctttttccctcatgtcagcttcaggtatccagtatcacttatgcttgataatgattgtatgaaaatcattcagaattatactatgttttttcatataaagcttttgttttactaattttgaaatgactgttcctccattaagcgaatacagccctaagcataaatttggtttgttcatttaaaaatggtctttttttcccatcttagttctggctttactagggagatagattggctgaggttgtcacctaattctgggaggttaagaccctttgtcttttgctacccatttctgaaataaccagaagtctagcccatcctaacttttctctcgatgatccttttcttctttttacttcaaggttccagcccttcatttgactatcagtgctgtttcactagttagccatgatccctttcatccaccgtgtctggattagaactgtatttttaatttgatgctgtgggcagttttgatagttacagatcctgtgatacatttaaatgtgtttacaaggggaacaaatgaaacaatgctgcatgaaatttgcctttctttttttttttttttccccttggagacagggtctgggtctattgcccaggctagagtgcagtggtgcgatgtcagctccctatagcctctgtgtcctgggcttaagccgtcttcccacctcagactcatgagtagctgggactataggcacacactaccatgcctggctaattttttattttggtagaagatgaggttttgccatgttgccgaagctgatcttaaactcctgggcttaagtgatctgcccacctcagcctcccaaagtaatgggattataggcgtgagccaccacacttggccttttcttttttttatatttatttaattattttattttattgagacagagtctcactctgacacctgggctggaatgcagtggctatcatggctctctgcagtcgtgaactcctggactcaagtgatcctcccatctcagcctcctgagtagctgggactacaggcttgcacccatgcctggctaatttttttattgttacttttttgtagtgacaggctctcgctacgttgctcaggctcgtcttgaactcctggcctcaagtgattctcctacttggcctctcaaagtgctgggattataagcctgagccactgaacccagcaaaatttgcctttcttaaactaatttatctctgttgggtccaagagcttacaagttggttgtcatttaatatgttaaacactagaatattttttagttgaaattttattttttccctttacatgttgtatcctttagtgctttatttcactaataagaattatagtatgcaatcatttcccacctctatattcagtatatcaatttttgtttttcctttctacttctgtcttttgctataatttgctgtaatacaggtactttcatcaaggcatccagttctttatatcattctatatttttacttgggagaaatagaaatgttgctaattccatcttactgacaatacctaaattattgtttgttatagaacataatgatttaaatatacaaaacactaaactgtttgagattttttacattttatgcgtgcagaatttacattttatgtgtgcagagacaaaaattgttataagattacaagttaatgtgcaagatgatttccgattcatgagtttcaggttttgatagcatatccttatccactagattagtcttttaaaaatgtgtatgatagggaaaaaatcgaggccatgaaattctgagacttatgggaactaaacttaaatgttcgttgttagattttttttttttttttttttgctgcgtatgaagttctaggcagtcattgtccaacaacattaaatactgaacatatgggaaaagcatatgatttttcgaaatgtttttctaaagtaatctcattctacatacacttaagagcagttataatgctttagtgacacttgaagtagctatttaatgtgatctcaccactatagggaaggccgttgcatgacttttttgtgtgtgcttaactgctaaacaggagaatcttttcctgagcaaccagctgggaaggatttaatttgacattctccctactaggaccccccaaagagactcattccctccaatagttcctacaagttctttctctttcctaaacttgctgttactaatttacccctcactcttcttcaaggcaaagcatctgcaaggttttcagtcctttccccctcccgtcctgtccccatcagtgttgaaatgtatgctacagttattatggttgtaatttgttatgccatgttgatcttcttgtgcttttcatatcagaacaatgcatttttaacattctgactttctttttctctcaattggtaactgactatatagaaaatttatatttatggatactatttcttttttaataagttcaagggaaaacattgataaaggaaaatttatcctttcaactttctttaggtgccagcattattttcatattaggaagcaggagaaagttaaggaactctgagcaatactagaatggttatatatatttaagtttgtattaaacctgttggaatggtaaagaaatttactgacatatttaaccatacaaaatagtgttgctaaaagactagtttttctctttattctgtgcatatgtatatatatgaatgtgtgggttttttttaagaaattttaaaaaaacttaatctgccagcttttctctattggaatttgcgaacaacttgtaaaattggaattacagaatattagaatagtcagttatggaaagtcacttcattatccttgtgtcactaaataacgtataaagttaaatcagaagtgtattcatctctgaatttctaatcagttgtttttagtttgcagaaaaaacttcagcatgtgccaggaacacaacctcaccttgatcaggtaaagaaaaaaaatctaaatccaaaattcctaatcaatgtttttaaaggacctctttaactagataggctatgtttaggactattttattataaactttttctaaaatggtatttttgaactgtattgataatttttggaatcttaaatgcttttgacatagtctaattctatttcttaacacataataggaattcatcaaaccagatttgttttagaatctgaggaaatcatgctttctagcctttccattctgtagattgcttagcatattggttagttctgatagggattactccttaaaagcagcctgggggttctataggcagtctgtttttaagtatgttgaattgtttaaggaaaggtctgatataagcatggcttatttaaataaaaattgacttggagtttcaccttcaggtagcactataaatttgaactccttaagatgtttttcatgctctaaaattctaatccctaaggtaaatatctaagatgctaggaacaatttaaatataattttactgtacctgcgtttctgttaagcagatcatagatcgtagagctttaggataacttctttgttcctcttaaaaccctgaggggtggagtgggggatgtgtaagtgagcagtgtgcctaatcttccttcctctctctcaagtgatcactcagtttttgaattgctattggttgtaatagggccgagataacagctacttgcatttgtattcattttggttcacatttatgagcaggtttgccactatgtttgtggcacctttccctgtgaaacttttgttaataggatattcctcttcacttatctttaaaatgaataaatgagagaaatacaagtccttggagatagaatttatggtaaaaaaacaaaaaacccagttcttcatgatagtcggtatctgtcatatagctgaacatgaagcacatttgagcttctgggtaaagaacgtgatgccaagaatcatagggatgaaaagatgaagcaaacgcagcgctcactttccatgagcgtttggggcggccagtgtctccatccatagagcctcgaatgaacctctattgtggcggttacgatgccttgcagtttgcttgaaatgcttttgcctggcaagagtctatacattccttacgtataaaatctgtattgcttagtacagggcttggtgggtactcagtgagtatttgttacaagaatgaaaagctgcgtttctcaaatggggcataaatcagaatcgcatgtggagcctttttaaaaaaaattcgataactcagtagttctcaccctcagtctccaggattgggacttgggtatgtgtatattaatgtatatttttaacattttattatggaagatttcaaagatataaaagaataaacagaatagtaaagtgaaccccttgtatgcatcacccagtttaaatggcatcaacatttagctgattttatttcacctatcctcccaacatttcttttgcctggagtatttaaaaaaaacaaatgtattttaataggaaatttcaaacgtgcgtaagagtagaatggcataatgagcctgtatgtacctattgcccttggtgtagtgtattaaagcaaattccagacactatgtcactttactactaaatagggcatatctatatttttgtagcctctgtaggagattctgatgcactgtcctgctttagataatataaacataggggaaaatagtatcacagccaaagggctatgggattcagaggcatgaacaatttcatttggtttagtggatctggggtgtaagggaggaaatttatcttttcctcgcctatcactagattcatggctgaggtctctctaacagaagaccaactatcaagagaaatttcaacatagaaatttatttagtaagttttacttgacacaggagccttcataaaacatacctgtgtatgttttctgttagttatgatatggaagaggatagtaatggagaagcataattagataaaacagtatgatctaataataaactgggaagaacttagcaaggcctgtttgctcagatttttctctgtgacccttcatattcagacttaaggatgttcttttcctctgtgtatagagagggcacctcttaaatgagggtcttatgacctgcatcagcggaaggtcagaaaatctttcctaggttttatgacctgcttcaggagagaaggtgagagtgaccttcctgattctgccattttctcaaatattgagttgccatattttgggatagcatgtcctgaaccccatcaaatgcttcatgaggatagttttttgtttgtttgttttggttttggtttatttatttgcatacagtaaagcatgcaaatgtgtaattttagtgtacaattcgatgtttgggttttgtttttgtttttgtttttttggttttttttgagacggagtctcgctccggctggagtctcacccaggctggagtgcagtggtgtgaccttggctcactgcaacttcctccttctagattcaagtgattctcatgcctcagcctcctgagtagctgggattacaggcatgtaccaccatgcctagctaatttttgtattttttttttttttttagtagagatggggtttcaccatgttggccaagctggtctcaaactcctgacttcacctgcttcggcctcccaaagtgctgggattacaggcatgagccactgtgcccggcctcaatgtatttttacatatatttgtacctatatatctgtctatatgcacattcaaacacatatccttctaactcccactcaggtcaagatacaaaagatatccaaaattgtaaagagttcctttttgccccttcctagtcaaagaaggggtaagtgctattctgacttacttaacaaaaaataaccttgaactggtaggatttttttgacggtaggattttttttgaccggaagaagtaaggaaaagagcaatacggatgtttaaaaatgagaaggtgagaatcttatagatgagtaggtctctggtacagaagtcttagtggagagttggtactggaatcctggtctaaggtattaggttttaatttgctaaacaaagagaactcaagcagtgctgtctaggagtgttatgtaagctagattggactttagagtcaggagaccatgcgggaagatactgtgtgataagggcctgaaacatgttggttacagtgagactagaaatgggataaatccagagctgtttcaccagtagacttgcctgaatatcctgtctgactgagtatggatcagaaagaaaagaaggggtgatgggaaacgagcctagattgactagagaaacctagaaatagaaaaatcgggaaggcaaagtgatttgaatgataatgccatatattcagttgtccctggtggccagatattatagtatagatattatacaggcaaagaagaacagagggatagagtgtgaaggtacagattttgagtttaagcacattagggggcttagtgttctggatgaagaaaacctataaaagttattgtatgttaggtattgtttgcaaaaagtagaaaatggagaaataacccagtgggttaaagaagaaacagactaaataaacaaacctgagtaagttgttcctaaattttattttagagacaattcctcattttgctttagttttctcaattattgcctcacttttctgtttctttctgtgtcagcatacatggaagaaggagttaattttagattcaaaacaaaaactggaaaaaaaaagtctgaaatgggtaatacctaggacctagtatatatgtgttattaaggctctatccctgaatttttaatgcagttatctatttttcatggattctttgtttattccccataaggaacacctgggtttggagagtgggaaggtagatgagaaaacccaagtgacaaataatgtttagtttattattagaaccaactatgagttgtgacccttatcttctgcactgggaattacagatttttttcagggtttttctaacgtgaaaagagtttattggtgtaggaaaacatctggttccaaaatatagatcatccttattgagccccatgatgcgttatcttaatttttaaagccttttttgtctcatactggagtttattgtaccccttaaaaatattaagtcacatatttaacctgataaaagcaaaaatcattataaaaatctttaggctgggtgtggtggcttatgcttgtaatcctcacgctttgacaggccaaggtgggtggattgcttaaaacccaggagttgtagaccagcctgggcaacatggtgaaaccccatttctgcaaaaaatacaaaaaattagccaggcatggtggcatgtacctgtaatcccagctactcgagaggctgaagtgggaggattgctttagcttgggagttcaaagctgcagtaagccatgattgtgccactctactccagcctgggcaacagagtgagaccccatctcaaaaaaatttattaagttaaaatctttaacaataaagcaatttggagtcgtattttgcgacattctcaatatagttttccaacttgcattaaaatacattttaaacatttttgaagactaaatttatttttttttaactgacagttatgtttcatttgacaaccttttgctgtatatttttatgtggacttttaggtattgtagtgattcctttaatgaagaaataaaataattgtcatttaaaaagtgcatattattattaccttatgctataaaaatagttttaaaatagaatatgtttattaagatttaaaaataagtatagtcatgcaccgcataacagcgttttagtcagactgcataagattacgatggagctgaaaaattactgtcacacaaatacttaccattgtgttatcatttccatacactggtcagtacagtaacatatatgctgtacaggtttgtagcctaggagcaacaggctatacagcatagcttaggtgtgtagtaggttataccatctaggtttgtgtaagtacactatcatgtttgtataacaacaaaattgcccaacagctcatttctctttatgtatccatgactgtatattttttattgtggtaaaaaacacttaacatgagacctaccttcttccacaaatttttaagggtacaatatagtattgttaactgtatgtacattgttatatagcagacctctagaacttttcatcttgcatgactaaaattatacccattgaacagcccctcccaattttcgtctccctctaacccctggtaaccaccattttactttctgatttgatgagttttactgttttagacacctgatattagtggattcatgcaatatttgtccttctgtgactggcttatttcacttagtgtaatgtcctcaagattcatccatgttgtagtatatgacgggattttttttaaggatacataatatttggttgtatgtatattaccacatttattttatccattcaactgtcctggacatttaggtggttgttagtgtcttgactgctgtgacaaaataagtacttttaaaagtctcacatttgcaagttcaatttgaacctttttttagtctgcttgtacttctcttatcaagcaagaaagcacttttctgctttttgtattactagtaacagtggagattaaatatctcatgtttttgggcgttctagagcccaacacatcacctgttcctttccatactaccacaactgacactctctggaaagtgccacctccctgcagcaggccaaccagcacaaaaatagtacattaaaccagcaaagctaagaaccctcaaagagtacatttcaccctcctaccgcctccactggaacaggtgctggtatccacagctgagagacccacagatggttcacatctcccgactctgtgcagactaccccccagtaccagcctggagcctggtagacttgctgggtggctggatccagaagagagatagcaatcactacagctcagctctcaggaagccacatccataggaaaagggagagagtactacatcaagggaacaccccgtaggacgaaagaatctgaacaacaaccttcagccctagacattctctctgacagagcctacccaaatgagaaggaaccagaaaaccgaccctggtagtatgacaaaagaaggttctttaacaccccccaaaaaatcacactagctcaccagcaatggatccaaactaagaagaaatccctgacttacttgaaaaagaattcactaggttggttattaagctaaggcaccagagaaaggtgaagcccaatgtaaagatataaaaaaaaaaaaagatacaagaagtaaagggagaaatattcaatgaactagatagcataaataaaaaacaatcaaaactttaggaaataatggacatacttatagaaatataaaatgctctggaaagtcttagcaatagaattgaacaagtagaagaaggaaattcagagcctgaagacaaggtcttctaattaaccgaatccaataaagacaaagaaaaaagaataagaaaatatgaagaaagccttcaagaaatctggaattatgttaaatgaccaaacctaagaataaccggcattcctgaggaagaagagaaatctaaacgtttgttaaacatatttgggggaataattgaggaaaacttccccagctttgctagagacctagatgcaaatacaagaagcacaaagaacatctgggaaattcatcgcaaaaagatcatcatctaggcacattgtcgtcaggttatctaaagttaagatgaaagaaagagctgtgaaacaaaagcaccaggtaacctataaaggaaaacttaccagattaacagcacatttctcagcagaaaccctgcaagccagaagggattggaaccctatcttcagcctcctcaaacaaaacaattatcagccgagaattttgtattcagcaaaactaagcttcatatatgaaggcaagatacagctttttcagacaaacagagaattcaccactaccaagccaacagtgcaagaatgctaaaaggaactctaaatcttgaaacaaatcctggaaacatagcaaaacagaacctctttaaagcataaatatcacaggacctataaaacaaaaatacaattagaaaaacaacaaaaaccagaaaaacaaggtatacaggcaacaaatagcatgatgaatagagtggtacctcacatctcaatactaacattgaatataaatggcctaaatgctccacttaaaagatacagaattgcagaataggtaagaattcaccaaccatctgttgccttcaagagtctcacctaacacataaggactcacataaacttaaggtaaagggatggaccaagacatttcatgcaaacggacaccaagtgtgagcaggagtagccattcttatattagacaaaacaaactttaaagaaccagcagtttaaaaagacaaagagggacattatataatgaaaaaaggccttgtccaacaggaaagtatcacaatcctaaacatatgcacctaacactggagctcccaaatttataaaagaattactaatagacctaaaaaattagacagacagcaacacaataatagtgagggattttaatactccactgacagcactggacaggtcatcaagacagaaagtcaacaaagaaacagtggatttaaactataccttggaacaaatggagttaaaagatatatacagaatattccatccaacaaccacagaatatacgttctgttcaacagcacatgaactttctgtaagatagaccatatgatagccaacaaaatgagcctcaataaattttaagaaaattaaaattatatcaagcactctctcagaccacagtggaataaaactggaaatcaactccaaaaggaaccttcaaaaccatgccgatacgtggaataacctgctcctgaatgatcactgggtcaaagatgaaatcaagatggaaatgtaaaaattcctcaaactgaatgacaatagtgacacaacctatcaacctctgggatacagcaaaggtggtgctaagaggaaagttcatggccctcaatgcctccatcaaaaagtcggaaagagcacaatctacggtcacatctcaaagaactagagaaacaagaacaaacccagcagaagaaagaagaccagagcggaattaaatgaaattgaaacaaaacaacaaaaaaaatccaaaagataaatgaaacaaaaagctggttctttgaaaagataaataaaattgatagactgttagcaagatcagccaagaaaagagagaaaatccaaataagctcaataagaaatgaaacgggagatattacaactgacaccacagaaatacaaaagatattcaaggctactatgaacacctttacatgcataaactagaaaacctaaaatagatggagaaattcctggaaagatacaaccctcctagcttaaatcaggaagaattaccctgaacagaccagtaacaagcagggagattgaaatggtaattaaaaaattaccaacaaaaaaatgtccaggactagacggattcacaacagaattccaccagatattcaaagaagacttggtaccagtcttaaagacactattccacaagagagagaaagaaggaatcctccctaaatcattctatgaagccagtatcaccctaataccaaaaccaggaaaggacataaccaaagaagaaaactacagaccaatatccttgaacatagatgctaaaatccttaagaaaattctagctaactgattccaacaacatatcaaaaagataatccaccatgatcaaggggtttcataccagggatgcagggatggtttaacatacacatgcgcgtagccaaagcaagactaagcaaaaagaacaaatctgaaggcatcacattacctgatttcaaacttatactataaggccatagtcaccaaaacagcatggtacggttataaaaataggcacatggaccaatggaacagaatagagaacccagaaataaacccaaatacttacagccaactgatcttcaacaaagcaaacaaaaacgtaaagtggaaaaaggatacccttttcaacaaatggtgctgggataattggctagccacatgtaggagaatgaaactggatcctcctctctcactgtatacaaaaatcaacccaagataaattagagacttaaatctaagacctgaaactataaaaattctaaaagataccattggaaaaatcattctagacattggcttaggcaaggatttcatgaacccaaaagcaaatgcaataaacacaaagataaatagctgggacttaattaaactaaagaacttttgcacagcaaaaggaacagtcagcagagtaaacagacaacctacagagaaggagaaaatctttcataatatatacatctgaaaaagaacaaatatccagaatctacaatgaactccaacaaatcagcaagaaaagcagtcccatcaaaaagtgggctaaggacatgaatagacaattcttaaaagaagatatacaaatggccaataaacatatggaaaaatgctcaacatcactaatgatcagggaaatgcaaatcaaaaccacagtgcgataccaccttacttctgcaagaatggccataataaaaaaatcaaaaaaatagtagatgttggcatggatgtggtgaacacggaacacttctacactgctggtgggaatgtaaactagtacaaccactatggaaaacagtgtggagattccttaaagaactaaaagtagaactatcatttggtccagcaatcccactactaggtatccacccagaggaaaagaagtcattatacgaaaaagatacgtgcacacgcatgtttatagcagcacaattcgcaattgcaaaaacgtggaagcaacccaaatgcccatcaatcaatgcgtggataaagtaactgtgatatatatatacatacaatggaatactcctcagccataaaaaggagtgaattaatggcattcgcagtgacctggataagattggagactattattctaagtgaaagaactcaggaatggaaaaccaaacatcgctatgttctcactcataagtgggagctaagctatgaggatgcaaaggcataagaatgacacaatgaactttggggactcagggagaaagggtgggaaggggatgaggaataaaagacaaaaattgggtgcagtgtatactgctcaggtgatgggtgtaccaaaatctcacaaatcaccactaaagaagttaaccaacaccacctgttccccagtaacctatggaaagaaagaaatgtctcatatgtttctgcctaaattggtctttaatactttagcgattctcttgagtttggattataaaatagttttggtctttttgtattttctgctgtaagcctgtatgattatgtaatggtgagtaaaattgctaggccagatatgcagttctaggaagttatgcaaagatgtgctttagtatattattttctacctttttaaattcattttgagcttggcttttgagcctctgttttccaaggtggggtgtatgtttttataatgttatgcttagcccttgtgtattttcatctctgagtttgaaatttggggttatattggcaaagggaggtttgggttttaattaggtgacctgttagaggaaatgttaagcttctgtttctttagggtagacagtgagagatttatcaagataaagaagaaaaataaatcctagagttaatattcaatacatgatgatgtcacccttactaaagccaaagagggcattatcctatcattctcatcgctaagaactcttctcctcttggcacatgcttattcagttaaagataagccaagcctttcttttgtattttttttttaagagaacaaatttactttggttttgagttttattcctggccctgggtagcttatttttttgacccttattttccccaatttataaaatgaaatagttatcttcactccccaggattgttgtgaagagtaagtcaaaagataaaatgaggtgactcaggcaaaagtacctggccctgtgtagtgagtacattgtatgtgttacatatattcttattgctgagaatccacgaaagaatgaattaaataatgaggaccctttcatcagggtttttgagtgagttttttaaaatacaaggtagtagtttgtgtaaatactaaatccattggtacctgtgcagaatgtaggaaatggagttgctaattccaaaaaaacagcacatatgctgaggaaagtataatacctaatatatatggtttaagcaatgtaaaattccatgaatatgttccttttcatcttaaaatttgtgatttaaaaaacattgatattactataaagaattattgttatttcccttgatttacagagtattgttacaatcacatttgaagtaccaggaaatgcaaaggaagaacatcttaatatgtttattcaggtgaatgcaatttttaactgataaatgatttatcaatggttttgttacatagttgttgctattagcgatggttggtcttattaaaatatgtcacttgatacagaatctcctgtgggaaaagaatgtgagaaacaaggacaatcactgcatggaggtcataaggctgaaggtacagtttactgttgcagactttcggacaaagtccttttcttggctgttataaaaactatatttggttttaaacagaaacactggttttagtacaaatcatctttgtctactttcatttttctttattattttcatgactgaaaaggagctttggaaatcactgcataaggcttgatttatttgcacaactttctttagggttgcagctagaacaaacctgtgtgctttgaaatgttaccttctgctctctgttcccaagtacagagaaataatgttgcaaatctcacttctgctgaacattatgcttcctgatgcatttagcagacactaaacatttgtcatactctaaacaaagttacaaaggactagaagaattcttgttctgtatttagaaacccactcacgttacttgatatttgggtatttaagtcatgaaaggtatttcttctaggaagcagtgattctaaagtgtatgcttaaccagtcagttgagtgtctactcttgtgtgttcacaagtgtgcacaaagtttttggtaaattaagaatattatttcaaataaattaatttcatccccataggagccagtttatcagataattcatttttcatttctgcaaatcaatacacaatgagctcatattcagataaatataatagtttttctttatttcatcattgttcattgattgcaacccatttctaaaacaaattatttaatataatcaaactcctttaacttctcaacttttcccactaaaactgtgaaacattatataaaatctttaatcaataggatatgatacatatttcatcattttgtttcaggttttggttgtgataaataacactgaaaaaccatcctaatatatgtattaactttatcattagaaaaggggattgttcaaaaaaaaatcaatacacagaaaccttttttgaaaattaaaaacattaagaaacttcttgtaattcacaaataattggaattaagtaattttctcagcttaagagtttgtattttttaagtgaatatcagtaattaatccattaacattgatgctctatttctgcttttaagtttgaactgaggctgattaatgttcagtcaattctcctttgagcagggattggtgtcaatcaaagacaaatcacaacaagtgattgtccagggtgtccatgagctctatgatctggaggagactccagtgagctggaaggatgacactgagagaacaaatcgattggtcctccttggtaagtctgaaaggattcacagttttaaaacaaagtgaaaaatatatttgaaagggatatcatgtgccactcaaacagattaaccattcaggtcctcttttaaaactaaataagcttgtggtcaatgtttcatctttatcacgttacaacgttcgtaaaagcttgttaggacttttgttcttcttcagttttagaaaagtggttaatccaaggaccaatgtgactttgatgtactgacctggaaagttaaagatggaatcactcaattactattctttttgtaaatttctaaacaccataaagcatttaatgaactggaattgataggtgaactgtgtcattttaataagcataatgtaatcacgtcatattttgttttgtttgcaggcagaaatttagataaggatatccttaaacagctgtttatagctactgtgacagaaacagaaaagcagtggacaacacatttcaaagaagatcaagtttgtacataacactagaggcatttcttatcaaaaggattggataataaaaataagtttctactgggtatatttcaagcatttatttattactttagttacgaattccaatatactttaaaatggtatttgttttacagcatacataaaatgtagcaaatcggtactgtaaaacatttaacattcatacagttatatataatatccttttttttaaagaatggtatttcacaaaaatgtcttttgaaattggctttggagtttacatatactgaacatgaaagtttataataatgatgatacaactttcaacattgtcattttttcttagaacttcagctgattgcagagatataatgattacattgttattaaatttttttaacacaagtaagtgtcaccattttatgacatgaaataaaaggttatgactgttattgatgttgatgttgacgacctgatcacctggctgaaggagtgtttgtcaggtttctccattgtaaagttactcttttcccccatttcatactgtgctctttggaaggaaatcactatgcacagcccacactaaaggaatggggagttgtagtgtacttttttgggagtggtctacataattaattgaaattcttctgcaaaggacagttgtccctttcgctttattagttcgatcatttatgtttatcagtgtggacacatgaatattttatactttgggttacaatttaatactgctttattttgttgctcaaattagcccagctttgaccattgggaactctttccgttatctcctgttcccgcctttgacatgcccccatcaatgtgggttt

SEQ ID NO: 5808 - DNA, 568 bp, Homo sapiens
catatatttgtacctatatatctgtctatatgcacattcaaacacatatccttctaactcccactcaggtcaagatacaaaagatatccaaaattgtaaagagttcctttttgccccttcctagtcaaagaaggggtaagtgctattctgacttacttaacaaaaaataaacttgaactggtaggattttttttgacggtaggattttttttgacgggaagaagtaaggaaaagagcaatacggatgtttaaaaatgagaaggtgagaatcttatagatgagtaggtctctggtacagaagtcttagtggagagttggtactggaatcctggtctaaggtattaggttttaatttgctagacaaagagaactcaagcagtgctgtctaggagtgttatgtaagctagattggactttagagtcaggagaccatgcgggaagatactgtgtgataagggcctgaaacatgttggttacagtgagactagaaatgggataaatccagagctgtttcaccagtagacttgcctgaatatcctgtctgactgattatggatcagaaagaaaa

SEQ ID NO: 5809 - DNA, 567 bp, Homo sapiens
catatatttgtacctatatatctgtctatatgcacattcaaacacatatccttctaactcccactcaggtcaagatacaaaagatatccaaaattgtaaagagttcctttttgccccttcctagtcaaagaaggggtaagtgctattctgacttacttaacaaaaaataaccttgaactggtaggatttttttgacggtaggattttttttgacgggaagaagtaaggaaaagagcaatacggatgtttaaaaatgagaaggtgagaatcttatagatgagtaggtctctggtacagaagtcttagtggagagttggtactggaatcctggtctaaggtattaggttttaatttgctagacaaagagaactcaagcagtgctgtctaggagtgttatgtaagctagattggactttagagtcaggagaccatgcgggaagatactgtgtgataagggcctgaaacatgttggttacagtgagactagaaatgggataaatccagagctgtttcaccagtagacttgcctgaatatcctgtctgactgagtatggatcagaaagaaaa

SEQ ID NO: 5810 - DNA, 568 bp, Homo sapiens
catatatttgtacctatatatctgtctatatgcacattcaaacacatatccttctaactcccactcaggtcaagatacaaaagatatccaaaattgtaaagagttcctttttgccccttcctagtcaaagaaggggtaagtgctattctgacttacttaacaaaaaataaccttgaactggtaggattttttttgacggtaggattttttttgacgggaagaagtaaggaaaagagcaatactgatgtttaaaaatgagaaggtgagaatcttatagatgagtaggtctctggtacagaagtcttagtggagagttggtactggaatcctggtctaaggtattaggttttaatttgctagacaaagagaactcaagcagtgctgtctaggagtgttatgtaagctagattggactttagagtcaggagaccatgcgggaagatactgtgtgataagggcctgaaacatgttggttacagtgagactagaaatgggataaatccagagctgtttcaccagtagacttgcctgaatatcctgtctgactgattatggatcagaaagaaaa

SEQ ID NO: 5811 - DNA, 568 bp, Homo sapiens; identical to SEQ ID NO: 5810

SEQ ID NO: 5812 - DNA, 1106 bp, Homo sapiens
gctgatggaggaaatgtgcctcacatgccgggggcgctggggaggaggcgtctgggattttgtggttgaataagacacctggcctggccctcctggagcttagtttagtaggtcacacaagcagtcattggtaaatttgggattcaaacaaatctgttaggctcaaacctgtctgttatttgtcctccaagcttcatataaactgaggagccttaaagggtaaaaacttcaggagcagcaaagtttcaaaaaaagatcagcaagaaagctcttttccagattttatcctgaaggcactagctactttaagctattttttattatattttgcccttgcagttggcgtttgatttctcactgaacattcgttgtcataattatagacactatgtgactatcaagggcataatattctttcatgctgcatttttattagatggcacctcaaagttttcccaagtaggtgggttttaaattatgaatatataccgtggcatagtatcttacttagtattttaataagatccttatttatataacaaatattttttttattcctctgtagtgctactttagtctctgagctaattttcatgaagccaatctaaaaatcgtgttacttctaaggatgtggagcgagtgagatgaacagttgtgctgtcatattgcccctccccagtgcagacagtgaatgaggacccactgatttaaaggcaacactgcagccccttcttgcctcattgaagtcccaagttttattacagtaaaagcacttaatgttgacatttctgaaagaatgaagaggccgggcgcggtggctcacgcctgtaatcccagcactttgggaggctgaggcaagcggatcatgaggtcaggacatcgagaccatcctggctaacacggtgaaaccccgtctctactaaaaatacaaaaaaattagccgggcgtagtggcgggcgcctgtggtcccagctactcgggaggctgaggcgggagaatggcgtgaacccgggaggcggagcttgcagtggtccgagattgtgtcactgcactccagcctgggcgacagagcgacaacgtctcaaaaaaaaaaaaaaaaaaaaaaa

SEQ ID NO: 5813 - DNA, 595 bp, Homo sapiens
ttagtgttctggatgaagaaaacatataaaagttattgtatgttaggtattgtttgcaaaagagtagaaaatggagaaataacccagtgggttaaagaagaaacagactaaataaacaaacctgagtaagttgttcctaaattttattttagaggcaattcctcattttgctttagttttctcaattattgcctcacttttctgtttctttctctgtcagcatacatggaaaaaggagttaattttagattcaaaacaaaaactggaaaaaaaaagtctgaaatgggtaatacctaggacctagtatatatgtgttattaaggctctatccctgaatttttaatgcagttatctatttttcatggattctttgtttattccccataaggaacacctgggtttggagaatgggaaggtagatgagaaaacccaagtgacaaagaatgtttagtttattattagaaccaactatgagttgtgacccttatcttctgcactgggaattacagattttttcagggtttttctaacgtgaaaagagtttattggtgtaggaaaacatctggttccaaaatatagatcatccttcttgagc

SEQ ID NO: 5814 - DNA, 178 bp, Homo sapiens
ccaactatcaagagaaatttcaacatagaaatttatttagtaagttttacttgacacaggagccttcataaaacatacctgtgtatgttttctgttagttatgatatggaagaggatagtaatggagaagcataattagataaaacagtatgatctaataataaactgggaagaactt

SEQ ID NO: 5815 - DNA, 596 bp, Homo sapiens
ttagtgttctggatgaagaaaacctataaaagttattgtatgttaggtattgtttgcaaaaaagtagaaaatggagaaataacccagtgggttaaagaagaaacagactaaataaacaaacctgagtaagttgttcctaaattttattttagagacaattcctcattttgctttagttttctcaattattgcctcacttttctgtttctttctgtgtcagcatacatggaaaaaggagttaattttagattcaaaacaaaaactggaaaaaaaaagtctgaaatgggtaatacctaggacctagtatatatgtgttattaaggctctatccctgaatttttaatgcagttatctatttttcatggattctttgtttattccccataaggaacacctgggtttggagagtgggaaggtagatgagaaaacccaagtgacaaataatgtttagtttattattagaaccaactatgagttgtgacccttatcttctgcactgggaattacagatttttttcagggtttttctaacgtgaaaagagtttattggtgtaggaaaacatctggttccaaaatatagatcatccttattgagc

SEQ ID NO: 5816 - DNA, 595 bp, Homo sapiens
ttagtgttctggatgaagaaaacatataaaagttattgtatgttaggtattgtttgcaaaagagtagaaaatggagaaataacccagtgggttaaagaagaaacagactaaataaacaaacctgagtaagttgttcctaaattttattttagaggcaattcctcattttgcttcagttttctcaattattgcctcacttttctgtttctttctgtgtcagcatacatggaaaaaggagttaattttagattcaaaacaaaaactggaaaaaaaaagtctgaaatgggtaatacctaggacctagtatatatgtgttattaaggctctatccctgaatttttaatgtagttatctatttttcatggattctttgtttattccccataaggaacacctgggtttggagaatgggaaggtagatgagaaaacccaagtgacaaataatgtttagtttattattagaaccaactatgagttgtgacccttatcttctgcactgggaattacagattttttcagggtttttctaacgtgaaaagagtttattggtgtaggaaaacatctggttccaaaatatagatcatccttcttgagc

SEQ ID NO: 5817 - DNA, 595 bp, Homo sapiens; identical to SEQ ID NO: 5816

SEQ ID NO: 5818 - DNA, 178 bp, Homo sapiens; identical to SEQ ID NO: 5814

SEQ ID NO: 5819 - DNA, 8970 bp, Homo sapiens
acgggatgggattcttgtcacggcgcacgttctgtgggcggagtgggcggagctgccggggtcagttggtccaagtgtcccggcctgaggtgtcggccggatccctccttctcccggcgcctcaagcggaaggtgagggccgtcccgggcagcggagggcctggccccaggcgactagagctgcatcctcagtacctccgagggcctggagggcggggcgggctggacgcggccctgcgcaccgggggcccgggaggagcggtctcgggcctgggtatttggtgggcggcggaggcctggctcccggcagaacccttgcgcgacctctttttctcctgttttcgttgtcaggcccaggcgttctttgggagagggacctctcgcggtccctgacgcagacatcgtgtagctttctccccgcagctcctgggtcgggagccgctttgcagctctcggctctggaattggactgcgggaggggcgtttgggtggaatgggacctggcacgcctggaccttcccgtggctgctctgcgagagcctgagagatgggaggggaggctgaggtggggagggagcctagagagccgtaaaataaggattggaccatttttccaggcggcgaaagcggcacctgggtttgtttcctgatcgtcttctcccccagagtcctgctgaacaagttttgggaagaaaggtttggaaaggagaaagaggatacattcctgaaaggcagggcttctgttatacagtgtgtcaacctcacactattacgcaacaataaggacagatgccattccaggttgccaacacgttttctatgcccgaggacccaaagctgtgcccatgtattctggtacctctattcctgattaaaatcagtgtagctagccattctctgagagtatagcttccatttaaatcctcatttggccaaacagttccttgatcttgtggaatttgaaactggatttatttaaccaggacaagtcaaaggagaacttgaacagatctgaacagacattatattgaagttccgtagcttgaagggaatggagtttattttcagttgcttagtaaagattccagaggagtttgacatcagtggtagcaaaatgtttggcaaacttaagattagggccatattaaagttttttccattgcataatggaaaaagcatggactgtgaagttagacctgggttcaaattcttggtagagacattggctgtgaaacctctgaaacagcttttctgaaagatatatagactttctgaaatttagtgtccatatctgtaaattgcagtttccttctgttgatttgatgaaataacatatgcaaagcatttagcacattaatgcacgaagacattattttagcagtcttagtagttctccagtatgacagatggtgaaatcaattttagatgcagaaaagttgagtggctgaagatggacgggtattaggaaaaagtctcaaaatctgcaggctcagatgtgacaatagttgtggtggaatggtggaaaaaacactgggcatttgttgtagtcttggccctgttgctaactacttctgtggtcttcagtaagccattgtcatctttggccttgattttgtaaaatgaagcagctggaccagatggttttctttaaattctttctgttgcccaaattagagctaaaaggtagagaagacgatagcagacatttattgaatacctactatgtactaggtactgttgccaacacattgtatctatccactcattctcacaacaaacccatgagatacgtacggttattatccacattttacaaatgaggaaacttaaggccgaggtgttaaccttgcccagggttccagagcttataaattgcagagctaggatttgaatccaggtaatctgaatccatattgttaatcattgtgccaggctgcctcttgaggagagtgatattgtggatattgtacactattagagataactgtaaaataagataggggcatatttggtaagatgatcgtctttggtcacaggtgtgtgtgcatggcaaaaattatttaattaaatgaatcttgtcccaatgtttgccacatttcctggtttgtattctctctatgcgttctgcctcctggacttaaataatcaaaaaagtaattctagattcccttccactaaccaaggctagatacccgaatttactgtgttttttgagaaacctttgaaaggtctgacctagccatacatcagagctgaagaatctcagcgaaccatgtccatttctggggtaaggtggtttaggataggcagagcagcctcagcgccccaaattcatttcagtgttcccacgcttgagcagacttggtcttaattttctcgtttttcatcagatttgcgtttatatataggagcagaaggagttgaaagtgaactcttaagagcatatttgacatggaattagattgatgttatagcaactataggtaaaaaaggattttatagttgaaaaatttgaaaagctcagtattaagtatctgttatgatgtagtactgtgttaatgtagactttgggcagtttggggatcaatactattttaaaagaaaaaatccatggctaaaatactttgacataaagaactcagcaagtcttttgatcccatatgtcaaacaaatcagtttattgccctaaatctactgaaagactttgaatacatattaatacaatagtagcattttgagatgggtctatttgatcacatcacaataaaatacaattgcttcttgttcttttgtcgtggaaaggcagcaggtaatgctgtggtccactgtactaaagagtaatgcccttatgcgtagggctgccagatacagtgggcggttttttcactgtgcaacacttgggatgcaatcttacgtagactgtggtgtgaattgtgctctctcgcgttgtatacccttatagcactgttcttgtggcactacttttgtgctcctgcctctaccctaatcttgagtgtaagagtaatttttcctttaataagccctctccaccctgtttttctgctttttattttctttcactttttcagatgaagtcacactgttgctaaaccatgcataggttttctattgtttgaattatatgtggtcagaatttcagaaactggcttctttttctttacctcttatattggtgagtttggaatacttgtgtttttgcagactttttggtttaatttaaatattagtctgaaacataagcaaaagaagactaccctatcactgtattatatctgacttcaaaatcagctgtgtcgattttctgattatctgttgctttggcttgtatatcttataactcttcttagctatcatgaaaattcgttctagctgtagccttaacatcattggatatgagaaatttgaagcacttttaatttattatttagcaaagacagatgccaaattgcagcttactcttgctgagcactcccacgatcacttttgcttttggctgttgcctctctcatcttactcagacctcttttagctggatcagtggttgaaatggtatgaaaagagaatgactgtagtacctggttacagatgtgcttctctgtcagggaaatgtcaaatcaagttttcactgacactcttcctcttcaattatagttaaagagacatgttgattcaatggagaggaatagtttttggagtgtggtctttaaatactacagtaggctgaataacttttaaaaaaagaattgttggaaaaattttagtaatctgaaatgcagagaacctgagaattaaataatgtgaaaaagaggtcgggcagagcaactttaaatgcggtttagataaggggaaagatgctagaagacttggagtaggtttattcagcattattaaattaattgtataccatttgtagttaattatttaataatgttatacaagggatatttcgtatttttttctagactagtgagtgctatctaacttgaactataaacttgaagtttatgtatatgtacactgggcattttaatttgaagttcatgttagtatctaaagtgtaacaggatttatgtagatgtacactgggcattttcaaatttcatgttagtatctgaagtacaacaagatttgtattaacagctgtgagagaatgtgtaatacactgatatctctattgtgattctagttctagtatgtagatatccttatttaataggtctgctttctactgtttaagatacggaggcataacaatgccttgggcatagaagatattcagtaaatacttgttgaaagaataacactgacaggtctaggttgcttcaatgtagtagattagattggttaacaaatctgttttcagtaataatctggtgacattatttaatatattttgaacatattgaatgaaatgattgttagcaatggagcagaacatgttttatagaaattttttgttctaatatttagaagtcttcattgtaataataaaatgttagtatttatttacttatttacatcctgattagtctgtttttatttaaccctgactaggagctgatgaatggacattttttcatttattccatattaatattttagatggtctagtatttatcttttgaattttatttgtaaaaaattaaacagtatatgtaaagcaatactttaatgaagaagaatatttgaaacaattttatcttcatccataccgtcatccttaatatcagagcattttttcattttcatgttttttatgcatatttatatatatttcacataatttacatcagtgaatatacaattttatacacattttttcatgtagtatagtcataattattttcagtagccactccattagaaattataactgtactcaggaggctgaggaaagaggattgcttgggtccaggagtttaatacagactgggcaacttggcaagaccctcatttctaaataaataaataaaaatatgtcttcttaaaaagaaaatcacaactgtaatttaccagactttgagtgggcagttatgttgtttctgattgacttcattgtaaataaaattgaagtgatttttatgtatataactttctttgcattattgtccttagcctaaatttccaaggtaaaatactcagttaaaaaagatgtaaatgtttttatgaatcttattatcatactgctttccaaaaagattacatatttaaaatttgtgtccagtgtttgtgtatttgtttttccataactctttgctagtattgatcattatctcctttaaaaataataactgtacggtggtatttatgtattttttgattatcaagaagctcaacattttctcaaactatttatatcctttgcttatttacccattaggcatttattttattcttagtaaagcatatgaaaagtcctactatgtcatagttaacaaaatcatcctcctttgaaaaacaggcttatagtttattgctgtatgtgtctatatttctgaatttttcttattgtagaccattcctcaagaattttgtatccaaggcccaaaagtttgttacccaagatgatgaatgctgacatggatggtatgttcttcattttcttttttgtatactcctggttttgtggatgcttttgctttattaagcaatggaaagggcagagaaaccatgtttagaagactttgatcttggctaattacttatttatatctcatctagtgttagaaaggaccaaccaaagcagcttccattccttagctatgagaggttggcaagttgtttttatcttctttaccttggtggtattatctgcaatttggggatacaaaattttatttcacagggctcttgtataagtcaagtaagaatgaatataaaacattttgcagatttttaagtgctaccctacacaaatgtacctaatgctaattaatagtaaatttgaacctttatattacagcagttgatgctgaaaatcaagtggaactggaggaaaaaacaagacttattaatcaagtgttggaactccaacacacacttgaaggttggcttgcattttgtagtttatttgaatgacagccaattaattgaacttgtaaacatttatattgctaaattttgtttgttaggatgtataatttttaaaagaatgaacttcaaagtacacacatatatatatctatcttcctgctttggtagtttaaagaacagatacacttcagtcaagtcaaatgttgttattgtgcttccctctttgaagcctaacataatgctggctagtatgagacccccttttaagtccccataatgtgttactaagtccgctttaataaagcttattttaaagtaaaaacaatgtattagccttggagattaaaaaggaattcatctgaattttttcattttctaaatcttgcataaaattaatacactgaaacatcttttgagttttaatgaaattaagaggttgtgtttttggtgccacagtgagcagatcatgtcactcagaacctcccactgatttacattttacagagttaataaaagtcatctgtgacttccctattagctttctttttctttttcttttttttttttttttttttgagatggagttcactcttgttgcccaggttggagtgcaatggcgcaacctcggctccctgcaacctctgcctcccaggttcaagcgattctcctgtctcagcctcccgagtagctgggattacaggcacctgctaccatgcctagctaatttttttgtatttttagtagagatagggtttcactatgttggccaggctggtctcaaactcctgacctcatgatccacccgcctcggcctcccaaagtgctgggattacaggtgcgagccaccgtgcccagccggaattaacctcttatgtgatcatcaggaactgcatgtgttcaatgtcttgataatgttacaatacaagatgataagttgcttggaaactgactgcctgtattcagtatatgaattcagttgtgttaacctgatatatatcttaaacatttctagtaaagatgttatagttttatgttgataagacatgaaccaaaattcacattttaaaaacaaagtctttttaaaaaattactcaacattaatgctatttatgaagaatagcatttagtctaatgtgaaatatctttttaggaatttgtctactaatttgtactcagtttgtttaccttgctgtctctaaaatccgaattcttaaaatttaaggattgtattatttcttttaagaatgaatcctaagaattttgtaatatggaatcattgtcattgttttattgataatgggcatttttattttttatatagatctctctgcaagagtagatgcagttaaggaagaaaatctgaagctaaaatcagaaaaccaagttcttggacaatatatagaaaatctcatgtcagcttctagtgtttttcaaacaactgacacaaaaagcaaaagaaagtaagggattgacacccttctgttttatggaattgctgctgatcattttttctttaaaatttggatagattccaaaagttacagtacctttgtggcttcattgaatatttatgaagataatgtcagatgtagacaaaaataacacaataacaggagacttccataagtttgtgtattatgttagtctatgaaaacgtgcaaatgtattgtagagactttatgattagaattgcatatatttatgaaacttaaagatgaatgttttattgaatttgtaggtttagcactgtcttttattataggattagtaagatatacaagaaaataaccaccgtgttgtgaaaaagtgaccaaaatcatgtactaaatgcacagctttatgtaccctgtccaccatcttgtgcctcttctccatttgcctcttccttcctatttcccttccgctaaggaaaaaaattggtgtcacatttgtaaaagtaattttaatagttaatcatctctgagagtaacctgtattttaattgttgaaacttaaccaaaataagatactgtctcagctagggcttgtcatttgtgtatttagtgttaagataggaatgctagtgtctctttaattaattggaaatagatggaggctaaaaatgaaggtttttctttgaaactgaattaacttgggaatatttgttgttaaaaacttctttttgcccaaaataactcattttgtattatctgaaaatatataatttctggtcatgtgtatgttaaaatagaaaattttgaggaaaaatggaaatagggtggaaaagtactcggtaaacagtagtaaccaaatattttcactccagatttgtgttttctctggcacagagtagatcttttgggaaatatatatgaaagtggattaagtttgactacccttatgttagccacatctggatgagaacagttacaaagagtttggtctctaagttgatttgtacccagtgggtcaacttctgcaaaattccgtaatggtgtattagtattagaatagtgaataaaatgggaaagttatacatgtatacttattatcttgctcagtattttatctcacttgttctagaattttctgtaaaccctgctactgggtttgaagagttttagtcatcctttaacaatttttaaaaatttagcttctagattccatttggtaaggaaatcaatattggaagtattgctaaaatcttataatatgaaaagagatccactaatgtagcttaaggttattagatttgggcttttaatcatggaataatcttatgtattggtgtaagagttgatgaatgactttagctgtgtgaatatataatagtcaaactgcaaacattttgcatcccttttgtgacctaatttacagacatttaaattgtgttgcagttctgctttgccgtttaataaaaagctatttcagaggttg

SEQ ID NO: 5820 - DNA, 8971 bp, Homo sapiens
acgggatgggattcttctcacggcgcacgttctgtgggcggagtgggcggagctgccggggtcagttggtccaagtgtcccggcctgaggtgtcggccggatccctccttctcccggcgcctcaagcggaaggtgagggccgtcccgggcagcggagggcctggccccaggcgactagagctgcatcctcagtacctccgagggcctggagggcggggcgggctggacgcggccctgcgcaccgggggcccgggaggagcggtctcgggcctgggcatttggtgggcggcggaggcctggctcccggcagaacccttgcgcgacctctttttctcctgttttcgttgtcaggcccaggcgttctttgggagagggacctctcgcggtccctgacgcagacatcgtgtagctttctccccgcagctcctgggtcgggagccgctttgcagctctcggctctggaattggactgcgggaggggcgtttgggtggaatgggacctggcacgcctggaccttcccgtggctgctctgcgagagcctgagagatgggaggggaggctgaggtggggagggagcctagagagccgtaaaataaggattggaccatttttccaggcggcgaaagcggcacctgggtttgtttcctgatcgtcttctcccccagagtcctgctgaacaagttttgggaagaaaggtttggaaaggagaaagaggatacattcctgaaaggcagggcttctgttatacagtgtgtcaacctcacactattacgcaacaataaggacagatgccattccaggttgccaacacgttttctatgcccgaggacccaaagctgtgcccatgtattctggtacctctattcctgattaaaatcagtgtagctagccattctctgagagtatagcttccatttaaatcctcatttggccaaacagttccttgatcttgtggaatttgaaactggatttatttaaccaggacaagtcaaagcagaacttgaacagatctgaacagacattatattgaagttccgtagcttgaagggaatggagtttattttcagttgcttagtaaagattccagaggagtttgacatcagtggtagcaaaatgtttggcaaacttaagattagggccatattaaagttttttccattgcataatggaaaaagcatggactgtgaagttagacctgggttcaaattcttggtagagacattggctgtgaaacctctgaaacagcttttctgaaagatatatagactttctgaaatttagtgtccatatctgtaaattgcagtttccttctgttgatttgatgaaataacatatgcaaagcatttagcacattaatgcacgaagacattattttagcagtcttagtagttctccagtatgacagatggtgaaatcaattttagatgcagaaaagttgagtggctgaagatggacgggtattaggaaaaagtctcaaaatctgcaggctcagatgtgacaatagttgtggtggaatggtggaaaaaacactgggcatttgttgtagtcttggccctgttgctaactacttctgtggtcttcagtaagccattgtcatctttggccttgattttgtaaaatgaagcagctggaccagatggttttctttaaattctttctgttgcccaaattagagctaaaaggtagagaagacgatagcagacatttattgaatacctactatgtactaggtactgttgccaacacattgtatctatccactcattctcacaacaaacccatgagatacgtacggttattatccacattttacaaatgaggaaacttaaggccgaggtgttaaccttgcccagggttccagagcttataaattgcagagctaggatttgaatccaggtaatctgaatccatattgttaatcattgtgccaggctgcctcttgaggagagtgatattgtggatattgtacactattagagataactgtaaaataagataggggcatatttggtaagatgatcgtctttggtcacaggtgtgtgtgcatggcaaaaattatttaattaaatgaatcttgtcccaatgtttgccacatttcctggtttgtattctctctatgcgttctgcctcctggacttaaataatcaaaaaagtaattctagattcccttccactaaccaaggctagatacccgaatttactgtgttttttgagaaacctttgaaaggtctgacctagccatacatcagagctgaagaatctcagcgaaccatgtccatttctggggtaaggtggtttaggataggcagagcagcctcagcgccccaaattcatttcagtgttcccacgcttgagcagacttggtcttaattttctcgtttttcatcagatttgcgtttatatataggagcagaaggagttgaaagtgaactcttaagagcatatttgacatggaattagattgatgttatagcaactataggtaaaaaaggattttatagttgaaaaatttgaaaagctcagtattaagtatctgttatgatgtagtactgtgttaatgtagactttgggcagtttggggatcaatactattttaaaagaaaaaatccatggctaaaatactttgacataaagaactcagcaagtcttttgatcccatatgtcaaacaaatcagtttattgccctaaatctactgaaagactttgaatatatattaatacaatagtagcattttgagatgggtctatttgatcacatcacaataaaatacaattgcttcttgttcttttgtcgtggaaaggcagcaggtaatgctgtggtccactgtactaaagagtaatgcccttatgcgtagggctgccagatacagtgggcggttttttcactgtgcaacacttgggatgcaatcttacgtagactgtggtgtgaattgtgctctctcgcgttgtatacccttatagcactgttcttgtggcactacttttgtgctcctgcctctaccctaatcttgagtgtaagagtaatttttcctttaataagccctctccaccctgtttttctgctttttattttctttcactttttcagatgaagtcacactgttgctaaaccatgcataggttttctattgtttgaattatatgtggtcagaatttcagaaactggcttctttttctttacctcttatattggtgagtttggaatacttgtgtttttgcagactttttggtttaatttaaatattagtctgaaacataagcaaaagaagactaccctatcactgtattatatctgacttcaaaatcagctgtgtcgattttctgattatctgttgctttggcttgtatatcttataactcttcttagctatcatgaaaattcgttctagctgtagccttaaaatcattggatatgagaaatttgaagcacttttaatttattatttagcaaagacagatgccaaattgcagcttactcttgctgagcactcccacgatcacttttgcttttggctgttgcctctctcatcttactcagacctcttttagctggatcagtggttgaaatggtatgaaaagagaatgactgtagtacctggttacaggtgtgcttctctgtcagggaaatgtcaaatcaagttttcactgacactcttcctcttcaattatagttaaagagacatgttgattcaatggagaggaatagtttttggagtgtggtctttaaatactacagtaggctgaataacttttaaaaaaagaattgttggaaaaattttagtaatctgaaatgcagagaacctgagaattaaataatgtgaaaaagaggtcgggcagagcaactttaaatgcggtttagataaggggacagatgctagaagacttggagtaggtttattcagcattattaaattaattgtataccatttgtagttaattatttaataatgttatacaagggatatttcatatttttttctagactagtgagtgctatctaacttgaactataaacttgaagtttatgtatatgtacactgggcattttaatttgaagttcatgttagtatctaaagtgtaacaggatttatgtagatgtacactgggcattttcaaatttcatgttagtatctgaagtacaacaagatttgtattaacagctgtgagagaatgtgtaatacactgatatctctattgtgattctagttctagtatgtagatatccttatttaataggtctgctttctactgtttaagatacggaggcataacaatgccttgggcatagaagatattcagtaaatacttgttgaaagaataacactgacaggtctaggttgcttcaatgtagtagattagattggttaacaaatctgttttcagtaataatctggtgacattatttaatatattttgaacatattgaatgaaatgattgttagcaatggagcagaacatgttttatagaaattttttgttctaatatttagaagtcttcattgtaataataaaatgttagtatttatttacttatttacatcctgattagtctgttttgatttaaccctgactaggagctgatgaatggacattttttcatttattccatattaatattttagatggtctagtatttatcttttgaattttatttgtaaaaaattaaacagtatatgtaaagcaatactttaatgaagaagaatatttgaaacaattttatcttcatccataccgtcatccttaatatcagagcattttttcattttcatgttttttatgcatatttatatatatttcacataatttacatcagtgaatatacaattttatacacattttttcatgtagtatagtcataattattttcagtagccactccattagaaattataactgtactcaggaggctgaggaaagaggattgcttgggtccaggagtttaatacagactgggcaacttggcaagaccctcatttctaaataaataaataaaaatatgtcttcttaaaaagaaaatcacaactgtaatttaccagactttgagtgggcagttatgttgtttctgattgacttcattgtaaataaaattgaagtgatttttatgtatataactttctttgcattattgtccttagcctaaatttccaaggtaaaatactcagttaaaaaagatgtaaatgtttttatgaatcttattatcatactgctttccaaaaagattacatatttaaaatttgtgtccagtgtttgtgtatttgtttttccataactctttgctagtattgatcattatctcctttaaaaataataactgtacggtggtatttatgtattttttgattatcaagaagctcaacattttctcaaactatttatatcctttgcttatttacccattaggcatttattttattcttagtaaagcatatgaaaagtcctactatgtcatagttaacaaaatcatcctcctttgaaaaacaggcttatagtttattgctgtatgtgtctatatttctgaatttttcttattgtagaccattcctcaagaattttgtatccaaggcccaaaagtttgttacccaagatgatgaatgctgacatggatggtatgttcttcattttcttttttgtatactcctggttttgtggatgcttttgctttattaagcaatggaaagggcagagaaaccatgtttagaagactttgatcttggctaattacttatttatatctcatctagtgttagaaaggaccaaccaaagcagcttccattccttagctatgagaggttggcaagttgtttttatcttctttaccttggtggtattatctgcaatttggggatacaaaattttatttcacagggctcttgtataagtcaagtaagaatgaatataaaacattttgcagatttttaagtgctaccctacacaaatgtacctaatgctaattaatagtaaatttgaacctttatattacagcagttgatgctgaaaatcaagtggaactggaggaaaaaacaagacttattaatcaagtgttggaactccaacacacacttgaaggttggcttgcattttgtagtttatttgaatgacagccaattaattgaacttgtaaaaatttatattgctaaattttgtttgttaggatgtataatttttaaaagaatgaacttcaaagtacacacatatatatatctatcttcctgctttggtagtttaaagaacagatacacttcagtcaagtcaaatgttgttattgtgcttccctctttgaagcctaacataatgctggctagtatgagacccccttttaagtccccataatgtgttactaagtccgctttaataaagcttattttaaagtaaaaacaatgtattagccttggagattaaaaaggaattcatctgaattttttcattttctaaatcttgcataaaattaatacactgaaacatcttttgagttttaatgaaattaagaggttgtgtttttggtgccacagtgagcagatcatgtcactcagaacctcccactgatttacattttacagagttaataaaagtcatctgtgacttccctattagctttctttttctttttctttttttttttttttttttttgagatggagttcactcttgttgcccaggttggagtgcaatggcgcaacctcggctccctgcaacctctgcctcccaggttcaagcgattctcctgtctcagcctcccgagtagctgggattacaggcacctgctaccatgcctagctaatttttttgtatttttagtagagatagggtttcactatgttggccaggctggtctcaaactcctgacctcatgatccacccgcctcggcctcccaaagtgctgggattacaggtgcgagccaccgtgcccagccggaattaacctcttatgtgatcatcaggaactgcatgtgttcaatgtcttgataatgttacaatacaagatgataagttgcttggaaactgactgcctgtattcagtatatgaattcagttgtgttaacctgatatatatcttaaacatttctagtaaagatgttatagttttatgttgataagacatgaaccaaaattcacattttaaaaacaaagtctttttaaaaaattactcaacattaatgctatttatgaagaatagcatttagtctaatgtgaaatatctttttaggaatttgtctactaatttgtactcagtttgtttaccttgctgtctctaaaatccgaattcttaaaatttaaggattgtattatttcttttaagaatgaatcctaagaattttgtaatatggaatcattgtcattgttttattgataatgggcatttttattttttatatagatctctctgcaagagtagatgcagttaaggaagaaaatctgaagctaaaatcagaaaaccaagttcttggacaatatatagaaaatctcatgtcagcttctagtgtttttcaaacaactgacacaaaaagcaaaagaaagtaagggattgacacccttctgttttatggaattgctgctgatcattttttctttaaaacttggatagattccaaaagttacagtacctttgtggcttcattgaatatttatgaagataatgtcagatgtagacaaaaataacacaataacaggagacttccataagtttgtgtattatgttagtctatgaaaacgtgcaaatgtattgtagagactttatgattagaattgcatatatttatgaaacttaaagatgaatgttttattgaatttgtaggtttagcactgtcttttattataggattagtaagatatacaagaaaataaccaccgtgttgtgaaaaagtgaccaaaatcatgtactaaatgcacagctttatgtaccctgtccaccatcttgtgcctcttctccatttgcctcttccttcctatttcccttccgctaaggaaaaaaattggtgtcacatttgtaaaagtaattttaatagttaatcatctctgagagtaacctgtattttaattgttgaaacttaaccaaaataagatactgtctcagctagggcttgtcatttgtgtatttagtgttaagataggaatgctagtgtctctttaattaattggaaatagatggaggctaaaaatgaaggtttttctttgaaactgaattaacttgggaatatttgttgttaaaaacttctttttgcccaaaataactcattttgtattatctgaaaatatataatttctggtcatgtgtatgttaaaatagaaaattttgaggaaaaatggaaatagggtggaaaagtactcggtaaacagtagtaaccaaatattttcactccagatttgtgttttctctggcacagagtagatcttttgggaaatatatatgaaagtggattaagtttgactacccttatgttagccacatctggatgagaacagttacaaagagtttggtctctaagttgatttgtacccagtgggtcaacttctgcaaaattccgtaatggtgtattagtattagaatagtgaataaaatgggaaagttatacatgtatacttattatcttgctcagtattttatctcacttgttctagaattttctgtaaaccctgctactgggtttgaagagttttagtcatcctttaacaatttttaaaaatttagcttctagattccatttggtaaggaaatcaatattggaagtattgctaaaatcttataatatgaaaagagatccactaatgtagcttaaggttattagatttgggcttttaatcatggaataatcttatgtattggtgtaagagttgatgaatgactttagctgtgtgaatatataatagtcaaactgcaaacattttgcatcccttttgtgacctaatttacagacatttaaattgtgttgcagttctgctttgccgtttaataaaaagctatttcagaggttg

SEQ ID NO: 5821 - DNA, 1312 bp, Homo sapiens
aggtccaagccttgtcatcggccagtaagtttgaagcagagttgaaagctgagcaagatgagcggaagcgggaggaggaggagaggcggctccgccaggcagccttccagaaactcaaggccaacttcaatacatagtcctgctgaccttgccctctgcccacagctgtgcctcacagatgccccgagaagagatgactaggcatcttcatcactgctgtcggtcccctccctgagccagcatctccatccaccaccccgtgccagctcccgtgccagccttcattcctcccagtgtccaagcccctccaggagggtcctggggtgggccagatgcctgcccacctctgtctcctgcctctgctcctctgcccttcttatagccagaacttgtatcttctcagcaaccttcactttgtccttgtccctttaccattccccatcaaagagtagtctgctatatcaatttgtgtagatatgtctgtctttttgggtcctcagagaaaatgcccattttctcggagaattctctgcactcctctctgcttcacattcaacttccctgttctcatctttggtaggattctgccagttgcttgtgcatcttctgctcctgggtaagggtgggtcttaatggtggctgggtggaccactgcccgtccactcttcaacaggaggaacagcatgccaccatagtaacacacattagagaaaggacagaggtctgctccttcctgccacctttctcctggccccttagcattcccccagtccctccctcttcaccttgctccgtctatgtcttcccagctcagccttttccccactcttaaatactgtactacttcactgtaagaacgaaagaatagttaggataccaatgagtaaaagggttcctgttcactctgactctgtgcaaattgtattacagtagaccgctgacgttcccaagtgacagatccagggcctttcaaacatccccaaagtcatggccatactcaccattagccagtttctaacatctgtttcagggtatccagctgtagatgttcttatcccccatacttgtgagttcttggggttgctcacaaatactaggggtttttgttgtatttttaacaaatatatcctaatgtcatatttattctcttttgtaactgctgtctttacaataaagaaatcatctgcctttctatcttacagctatttctttttacattgtacaaataacgtggccatcacatcaatgtgcctggaattttcttgaattaaaggagagagtagagtattttctataggagccaagtcccatc

SEQ ID NO: 5822 - DNA, 1312 bp, Homo sapiens
aggtccaagccttgtcatcggccagtaagtttgaagcagagttgaaagctgagcaagatgagcggaagcgggaggaggaggagaggcggctccgccaggcagccttccagaaactcaaggccaacttcaatacatagtcctgctgaccttgccctctgcccacagctgtgcctcacagatgccccgagaagagatgactaggcatcttcatcactgctgtcggtcccctccctgagccagcatctccatccaccaccccgtgccagctcccgtgccagccttcattcctcccagtgtccaagcccctccaggagggtcctggggtgggccagatgcctgcccacctctgtctcctgcctctgctcctctgcccttcttatagccagaacttgtatcttctcagcaaccttcactttgtccttgtccctttaccattccccatcaaagagtagtctgctatatcaatttgtgtagatatgtctgtctttttgggtcctcagagaaaatgcccattttctcggagaattctctgcactcctctctgcttcacattcaacttccctgttctcatctttggtaggattctgccagttgcttttgcatcttctgttcctgggtaatggtgggtcttaatggaggctgggtggaccactgcccgtccactcttcaacaggaggaacagcatgccaccatagtaacacacattagagaaaggacagaggtctgctccttcctgccacctttctcctggccccttagcattcccccagtccctccctcttcaccttgctccgtctatgtcttcccagctcagccttttccccactcttaaatactgtactacttcactgtaagaacgaaagaatagttaggataccaatgagtaaaagggttcctgttcactctgactctgtgcaaattgtattacagtagaccgctgacgttcccaagtgacagatccagggcctttcaaacatccccaaagtcatggccatactcaccattagccagtttctaacatctgtttcagggtatccagctgtagatgttcttatcccccatacttgtgagttcttggggttgctcacaaatactaggggtttttgttgtatttttaacaaatatatcctaatgtcatatttattctcttttgtaactgctgtctttacaataaagaaatcatctgcctttctatcttacagctatttctttttacattgtacaaataacgtggccatcacatcaatgtgcctggaattttcttgaattaaaggagagagtagagtattttctataggagccaagtcccatc

SEQ ID NO: 5823 - DNA, 20337 bp, Homo sapiens
  SITE (18464): n equals a,t,g, or c
  SITE (18467): n equals a,t,g, or c
ctgtttcacagcaatgctgacccggacagagttgatggagccctcaatcagaaccttttccttctcattcctgctgatggtcacaggttgtaacaggagctctttgctactcctgaaaacataatgtgacagagtacttgtactacagagggatagaatagtcagagtgaccccacgcaggtcctggaatcactatgagaccatagagtccaaggaatagaagactcacaagcaggagtgctccaagatgggggccagtgagtgtgttcttcagcagaaagagcacaggctctgaagtcagggcgaaaaggttttgaaatccagcctcctctgttactttccttgggcaagttaccctgttgggaatctcaattttctcatctgtaaaatgactctgattcctaattcactggcgaggactgagagagatcaaaaagggtcaaatgtctaatagcgtgcctggcacatagtaggagctttacaaaagatagctattttagtaactacaagttgaacatccccaatctgcaaatctgaaatccaaaatctgaaactggctgggcacagtggctcatgcctgtaatcccagcactttgagaggctgaggctggtggatcacctgaggtcaggagttcgagaccagcctggccaacatggtgatatcccatttgtactaaaaatataaaaattagctgggcatggtggcgcactcctataatcccagatactcaggaggctgaagcacgagaattgctcgaactcaggaggtggcagttgcagtgagccaagatcataccactgtactccagcctgggtgacagaatcaaactccatctcaaaaaaaaaaaaaaacctgaaagtttccgagtgctgacaagatgctcaaaggagatcctcattggagcattttggatttggaattagggatgctcaactggttaagtatctgcaaatattccacaatctgaaatacttttggtcccaagcattttggataagagatactcaacctgtacaggcaaaccaatataccatttaggaatacagagagaacacctgtcttagaggtaaggaaaggctaaaattgaacacagtttggcttcctttaattatcaatccagaaatgattcatttgcctctgagacccctatgagttcaggttacaaagtaatgcctctgaatacctagagatctctaatagtaattaattgtggtgtggtgtctctaaactgctaaccattttcaaaggcccactggaaatcgtgtacgttacacagtataacagggcatatcctaacatctttatcagttatttttaaaattaaaaattaaatcgtatcatttaatgttgtaacccagattatctcagttatgtatgtaccagaatgaattttattttattttattttattttattttatttttgagacgaagtcttgctctgctgccaggctggagtgcggtggcacgatcttggctcactgcaacctccgcctcccaggttcaagcaattctcctgcctcagcctcccgagtagctgggactacaggtgcataccaccatgcccagcttatttttgtatttttagtagagacaaggtttcaccatgttggccaggatgctctcgatctcttgacctcataatctgtctgcctcggcctcccaaagtgctgggattacaggcgtgagccactgtgcccggcctatttacttattttttgagacagggtctcacccaggctggagtgcactgtcgcaatgttggctcattgcaacctctgcttcccaggctcaagagatcctcctgcctcagcctccagagaagtgggactacaggcatgtgccaccatgcctgactatttttgcatatttttttggtagagatggagtcttgccatgttgcccaggctggtcttgaactcctgtactcaagcgatctacccacttcagcctcctaaagtgctcggattacaggggtgaaccactgcaccaggcctccagattaaattttaaaggggaaaaagatatttatgaaatggaaactagataagagaaaatcattcaaaatatgaagtatttggattagggggtcagagtgtctaggctggtaggtaaaaaaaaaatccctgatcattacattagaaaagtatggagatgggaaaaaaaaaaaaaaaaaagaaaagtatggagatggaatctcagataacaattatctgaccattccttaaactaccagtgttttcaacaatgccacaggagagacttcatcaacagccctgctctgagaagtcataccttgtgttaaccaatcttgtcttttcccctgggttctgtcctgccaacccactgaccctattttcttaactccaaattgggaatcaccattcagctggcagcaagacaaaatgtcaactgcagctttcctgactactgcaggacataagttcatggcaccttctagacagcagccatctctgtgtgctgcacccctcatccccaccttgacttgtccttccctacctgacttccacttccggcttgttgtgtcgttccacaacctgggaggagaagttctccaggcagagggcagcctgcaatgtggcccgcacggcactcaggtaggggcggagagtggcagtctataggaaataacacagaggaaagggaagatcaaaatctgtcacgccaaacccaccgatcccctattccagctcccatgaagccaggtagcactgagggtgcaaggctcttaagacactactgtgaacagaacagactaggccttcgagacgccttccaaggtgtagagtggtagttttcaacaggagacaattttgcctgccagggtacatttggtaatgtcgagacatttcctttctttcttttttaacctggggtcagaccagaggaatgctgagacattttcaattgtcatgacttggcaagaaggggaactgcaggcattcagtggacagatatccactaaacatactacaatgcactacaaagaattatcgagactcaaatatcaatagtgctaaggttgagaaagtgatctagagacacaccagtgaatgcatgattgtcgtcaatctattaggccaacaaatgtataggtgtactgtttgccacgcactgagctaactgggaattcaaagatgattaacactgtctctaccctcaaacagctcaactggatagcaaatatacagaaaataactatgatataaagatgacatgtgaaatatttagatttacaagtaatctatatttgcagaagaaactggttttgaaggtgaaatgggattaggaggagaaaaaggagaataaggacattctttttttttttttttttttgagacagagtctcgctctgttgcccaggctggagcgcggtggcacgatctcggctcactgcaagctccacctcccgggttcatgcccttctcctgcctcagcctcccaagtagctgggactacaggcgcccaccaccacacccggctaactttttgtatttttagtagagacagggtttcacggtgttagccaggatggtctcaatctcctgaccttgtaatctgcccgccttggcctcccaaagtgctgggtttacaggcgtgagccaccacaccctgccagaataaggacattcttaggagagggattagcttctagctgcactggtcagtccttgtatcagccaaattctttcccacctcagagctttacacatgcttgaccatctatctgtaggcttttctcctctttctttgcctaagtcatcctccagatctcagcttaattaaggaaggcctcttgagagagaccttgacatccccctataaagtatttattacaattgacaaaaaaatgtctttcatgtcttcttaatatttatttttgagagggagtctcgcttctgtcaccctcgctggagtgcagtggcacgatctctgctcacggcaatcgccgcctcctgggttaaagcgattctcctgcttcagcctcccgagtagctgggattacaggcgcacatcaccatgcctggctaatttttgtatttttagtagagacggagtttcaccgtgttggtcaggcttgtcttgaaatcctgacctcaggcaatccgcccacctcggctctctcaaagtgttgggattacaggcgtgagccaacgtgcctggccttttttatttttttttgagacagagtcttactctgttgtccaggctggagcgcagtggtgcaatcttggctcactgcaacctccacctcccgggttcaagtgattcacctgcctcagccatgcgaatagctgagatgacaagtgtgcaccaccgtgcctggttaatttttgtatttttagtagagatggggtttcgccatgttggccaggctggtctcaaactcctgacctcaagtgacccgcccatctcggcctcctaaagtgctgggattacagacatgaaccactgcacctgccctccttcatgcctttgtaagtgatttctcctttactaggctgtaaacctcatggtcaacagaccatatctattttattcacagctatatagcctccaacctagctcagtacctaacatatacagtgtctcactcatttcctgtagaataaataagcgaaagaaataattaagattagagtaacacaaaaggacagcaagagttccagagtagtaatgagtacaatgtttctgtatatgagaagcattttagattcactaaatgaggctgcagcggtaggctgaggtaagatcatggggaatcttgaatgccaggctaccaagtttagcttttctcttaagggggtaaggaactactggggctttctgaggaggaagttcatgactgcagctgcatgatggctctgtggagaatgatttggagagggaagtgagacatacagcagactgtatcacaagcaaagagtatcacaagcgttggactgacattagatggagtggataatggaactgaaaaaaaacttcccaggggctcacgcctgtaatcccggcactttgggaggccgaggtgggtggaccacctcaggtcaggagttcaagaccagcctggccaacatggcaaaaccccgtctctactaaaaatacaaaaaattagctgtggcgggtgcctgtaatctcagctacttgagaggctgaggcagtagaattgcttgaacccaggagactgaggttgcagtgagccgagatcacgccactgtgctccagcctgggtgacagagcgagactgtgtcttaaaaaaaaagaaaaagaaaaaccacttccaacgaactgtggtccagccattcaattaactactacttggtaataaaaaaagagtaactattgatacacacaacatggttgactctcaaatgtattatggtaagaagccacacttaaaagcctgcatactaaagaattccatttacatgacaatctgaaaaaggcaaaactacaggggggaaaaatcagtagttgtctggggtgggaaggagaggactgattacaaaagggcttgagggaactttttggggtgacggaaatgttctgtattttggttgcagtagtggttacacaacttgactttttttttttaagacacgggatcttgctatattgtccaggctgaagtgcagtggctattcacaggagtgatcacagtgtactacggcctcgaacttctgggctcaagtgatcctcctgcctcagtgtcctgagcggatggtactacaggcgcatgccaccatacccagcaagtttttgcaacgcttttttttttgagacggagtcttactctgttgcccagtctggtgtgcagtggcacgatctcgactcactgcaagctctgctttctgggttcacgccattctcctgcctcagcctcctgagtagctgggactacaggtgcccaccaccacgcccggctaattttttgcatttttagtagagaagaggtttcaccgtgttagccaggatggtctcgatctcctgacgtcgtgatccgcccgcctctgcctcccaaagtgctgggattacaagcgtgagccaccacgcctggcctttgtcaacagttatagaaagtaaacctaaaaagggtgactggctccgtgacgcctgtcctttcatgaataaaacagatgtagtctcatgtaatacctcaataaacttgaacttttaaaaatcaagaggcatgtgccccactagaaaaaaaaaatacagatttttagcagagacatgaggtcacaaaagtttgccaggatagggaacccaggaggaagaacaaatttagaatagaatatgagttttgaactagaggtctaatttcaaggtctcttcaagatatccaggcaaaccttgaaagagagctgagaagccagattaggagtcatcagaatgaagaaagttatcgaagccaggagactagatcggtatcaccagggaaggtgtgacgaagagggagatggtcatccaaagtcacaactcccaggaatgcccacacgtatgaaaaaggcccacatgtatgaaaaaggcccacatgtatgaaaaagggaggacttccaggaagggagggatgagcagtatcacagctaacatacactaaggctgacacagttcagttctgaccaggaagggcctgaatggaagcaacacgagagatcctccaatggggtggaagcagggctggaggtaccaagaatgggataaggaagtgtggccgcctgccttaagcaactgtagggtcaggaaggcagaagaggacaaagggcgtatgtcgtgaagttccactgtggataggcaggtggacttgcttcatgcctcagaggctaagaggccgactacgtaccctcgaaatgctccaaagagcctaggagaccccacttccgggttcctacagggctcaggaaaagcccctacctgcttcgaaggctgaccgtgaagccacaaggcccacttcataccagggagtacccccactcgccccttcctcacctcgggcccccgccccgtctctttttcccaccctcatcgtgtccccacaacccccggacatccctcggccccgcgcccctgcggcaaagccacatctcccaccgacccactgccctgaggccgaacagccgggggtccctggccgggggcccggctctctcaccatcgcgggcgctggctgggccggaaagcggaagtacggaagtggccagccccgcgatgcctgccctttcgcgagaagcgcagctacggtctccgcccggacttccggacggtaccatctatgctccgagcggggtagagagcccttacgaacgcttgggccttccggaagttttccacctagggctgtctcggtatttttaaattcttgcactcgagtcactatttaagctcctccaggaatgggtgcagcttccctttgtgccttcggccttcttgtcacctttgccacagcctcccccaggtatgcaatggtacagcccagcttcagattgggcaccaaattaggacaagccgaagcggacgagcccttcgtttcttccggttctgtacccccatcctttctctcgcccctcctacccgcagctcctggcgctcggcggggctaactgcagcgcggagatctcggccgccaagctccgcctcccgccccgggctgtgccccggggctcgcctgaggccgaccacccgcaccccacctctagcggctttgctcgaggcccaccttcttcccacccccggcaaactccagtaggctcgccctcgctgactccccgcccccgcgtcaactgcaaggggcccgcccatagccagttccggggcggttgctcacatcgaccggaactccccgccccctcccgcggcccctggggccgtaggaggccgcagcgaggaggtagagggggcgggggtcgcactagggtgtccctagagaacgaggactctgaaggcgggacatttgggcgacccccgggcggggccagccattaaacagtcccacttctgtgccagacactgaactgggctcttgacgggcatcatctcttaatcctcagaacatcccagggaggtaggtactattgttatccccatttttcagattcagacttttaatggggaaacagaccgagacttcttttgtccccattttacagatggaaaaactgagactgaaaaaggtcaaataacatgttcaggggcatataagtagagaatggtaaagcctgggcttgaacccaggtctgtctggcttaccagcccacgttctaaaccactgttagtgactagagaagggagaaaggtggaatagggtaagaaaagaggccaagagtcccagagaacatggtaagaatggggtgcttggaactcaaagtcttagcagaacccaagagaaatagaagggaaggaaagagcatcagaaaggcgaggcaaggcatagcagtatagcatggtgatcagggtgcagactcaagactagcggggttcaaattgcatcttggaagcataggcacatacccacccttacagagtctcagtttctttctctgtaaaaacgagatcacaatggtccttgttcatggtgctgagtgagaaattcagtgagataaactgataaagtgctctgcacctagcttggtacccagttaagtgccctgtgagtaggaactgtgccatcaattttgtcagtaagggactgaagctgggcttccttgaggctgtccctggaggtaagaagcccttgggcttttctcagaccactttgtctcccatcaatggccctgtcctctccagctccacaggatccccatatcctgggccatgagtgagttgaaagactgccccttgcagttccacgacttcaagtctgtggatcacctgaaggtctgtccccgctacacggcagtgctggcacgctctgaggatgatggcatcggcatcgaggagctggacaccctgcagctggagctggagaccctgctgtcttctgccagccggcgcctgcgtgtgcttgaggccgaaacccaggtgataaccccagagaggggccagcaccagagatggactgcaacaagttatgggatgggtcattgagttagccccatatgctgagacttggggtacaggggtttgtggggagagggagagagacgcaaactgggtttgcatgacacaaaaaatacacaagaatatgcatgatcctcttaaattgcaagatttctaattcagtaagcttttattggcaccccactcatcccccattgtgttctgggtcctatgctagtcattagagaaaggtaattaggacagttatggctgtcagggagcttggcaactaggaaagtgagaaagtcaagtacataccaggtgatgtgatgttgtggttagcagtcctagggaactggaatggggaaacctggatttgaatcctggcataagcgcttgctagcattgctgtttcctagctatgtgactttgagaaagttgcctcatatctctgagtgtcagtttccctatctgcaaagtggggtgaataataggacctaccttagtgcttttgtgaggattaaaagagaattttttgcaaaaactcagcccaatgccagacactaagtaagtacttcagatgttatttatttgctactctgatgactttattcactgcataaagatgccttgagccttgtgtgccaggcgctatgctgtattctgcaaaatagagatggttaaggtgggctttctggtcctcagtagcttatggtctagttgaagagacaaggtgtgatggtcattccagtgtgaccaaacaacacgattgggtgcacgttggagctgtgaagtgccagagacttgtggaggaaggaggtgccaactggacctaaaaggatgaatggaattaacttgtccctgggaatccatggaccctccttgaggaaggctatgactcaagttgtattttagcatctaagaacctgggtaactgattgagagaaggcatctcagtagtggtgacatcgaagtgaaggtttgctgagaggactcttctgttaaacagtatgtgactggcatgggtgatacagaagtgaatcagtatagatgaacaagtgaatgagattatgagaagtatatgaataaagttctaggaggccaggcacagaaaatgagctgaattttgaaggatgagtaagagtttactaggtaaaaagaggatggggaaagacccaggagcctctgtagattctagatcctaatttattcactagaggaaagagatattctgtgttttcccttctccccctcagtgacactttctgtaaatttcagatcctcaccgactggcaggataagaaaggtgacagacgattcctgaagctgggtcgagaccatgaacttggagctccccccaaacatgggaagcccaagaagcagaaactggaagggaaggcaggacatgggccgggccctggcccaggacggcccaaatccaaaaaccttcagcccaagatccaggaatatgaattcactgatgaccctatcgacgtgccacggatccccaaaaatgatgcccccaacaggttctgggctagagaacatagaagggggcctcaaggttctggtggtggaggcactggtggggcaggggcgcccactcaggatctgcttctccctgcaggttctgggcttcagtggagccctactgtgctgacatcaccagcgaggaggtccgcacacttgaggagttactgaagcccccagaagatgaggctgagcattacaaggtagaaactctgggccttgatagacatgatgcggaacaagagagttcagaggtgcctgagaagtaaagctaccaaagccatgcatcatcttccttccccaaccctgcccagtctgctgtctgctccatcagtgcctccagacacctaggcccaaactcagctttctccgtgcactgcctcccctctaccccagccaaatgtcaacacgccctcaagcatctacttaagtgaagtctgcccatgttcctttatccccatcccctctgctttggtccaagccttcatcaacttctatccaaacagcctcttaactctcttcctgtttcgaggcctctggaggaacctttcttctttctttaagatataaaacttgggctgggagcagtggcttatgcctgcaatcctagcactttgggaggccggggcgggcagattgcttgagctcaggaatttgagaccagcctgggcaacatggtgaaaccccatctctaccaaaatacaaaaaattagccaggcatggcggtgtgcgcctgtagtcccagctactcgggaggctgagtcaggaggatctcttggacccgggaggtggaagttgcagtgagccgagatcacgccactgcactccagcctgggcaacagagcaagactccgtctccaaaaaaaaaaaaaagatataaaagtcacctcacgcctgtaatcccaacactttgggaggctgtggcaggcagatcatctgaggtcaggagttcaagaccagcctgaccaacatggtgaaacgccgtctctactaaaaatacaaaaattagcctggcacggtggcatgcacctgtaatcctggctactcgggaggctgagccaggaaaatcacctgaactggggaggcatcggttgcaatgagccaagatcgtgccactgtattccagcctgggtgacagaaggagattccatccattaaaaaaaaaaaagccgggtgcggtggctcaagcctgtaatcccagccctttgggaggccgaggcgggcagatcacaaggtcaggagattgagaccatcctggctaacacggtgaaaccccgtctctactaaaaatagaaaaaattagccgggcgtggtggcgggcgcctgtagtcccagctgctcgggaggctaaggcaggagaatggcgtgaacccgggaggcggagcttgcagtgagctgagattgtgccactgcactccagcctgggtgacagagcaagactctgtctcaaaaaaaaaagaagatataaaactatgttttaatgatgaaaataaataaaacatgctccattaaagaaaatttagaaaatacagaaaaatgttgagggagaatcctcccataggtgagctgtcatgatcagatgtgctcatgacatggcgctgcatccaggcctttcttcctcccgttatctacaggatcaagtccacgcatcccagtccttgctggcacagctccagtgcccctctccattttcctcggccatatccctcttcattgccgtgttgaccagtcccaccaagtatctcgccctcattccaggacaccacagcctcctcgctggtctctgggcctctggcaagctcttctctccctcttgtctccttgacagacttgactcacccttcaaggccctgatctcatgttacctccaccaaagcactctttcagattccccagcagaaagttagtcagtctctcctttgtgctgccacaacactttgatctctctctttcacttcacttatctgatttcttaaaaatttatctgaaaaagagttcatacagacagcagtaaattcaagcaatacaaaaggtaattccctgtcacccgtgacctgaaggctcctaattctctcgagaggcaattgctgtgacctgagacaatctgtgtacgtattctgcaccttctatcttgggaattatttcagattggcttctgtgtgtgtgtcttagttctttttggacctgtctcccttactagagtgtgaagtacaggttttatcttcgttgtactttcttacctacacctgacactgggcttggccttggactagggacttgagagagatataagataggtaagtgaatgaatgaatgaagcatggctggccagtgcttacccactcagggttgggtgccatcttttccacagatcccacccctggggaagcactactcccagcgctgggcccaggaggacctgctggaggagcagaaggatggggcccgggcagcggctgtggctgacaagaagaaaggcctcatggggccactgaccgaactggacactaaaggtaggcctctcacctccctgccaaccccaggtcaggacttgaattccagaacttcagcccacctcccctcctttcctgtgcccgcttagatgtggatgccctgctgaagaagtctgaggcccagcatgaacagccggaagatggatgcccctttggtgccctgacgcagcgcctcctgcaggccctggtggaggtgagcagcctaacccaaaagaggaaccatatttactttgtgttttaatgtgttatgcttattttttatcggaatttatcatacatttattaggttggtgcaaaaataggttggtgcaaaagtaaaaacctggactaatatatagcaaaagattgggaataatatataacttgtgcacctaatagaaaagtgcacagatcataaatgtacagttttcacaaatgagcttgtattaccagcctggagattacaaaatgaaacattactatatcctagaagcccctctcatgcccctgtttttctccaactttccccaaaggtagccttactccacaattacttttgctaagcatctgttggaggggctttatacacatcctcccactggaggccaggacagtggttaacgctgtgttacagataagaagattgaggctcagaaaagggaactgttcacttgaggtctcacacaccaggattcaaaccctagcttcaggggccctgtctttatacctgctggttgaccttagacacaccctcacactctttcacctcattgagactcagttttctattctggctcaaacacaagagtttatctcatggaacagtctgggtacatgttgcaggttatctaaggtaggggaaggggcaggtctctatctcatatcatcagacaggggaccccagctgacggtggccttgcagtctgcccaaggtcactctgggcgtaattgtcactccagtcccacagaataagagcaaggaggccgggcgcggtggctcacgcctgtaatcccagcactttgggaggctgaggcgggcggatcacaaggtcaggagatcgagaccatcctggctaacatgatgaaaccccgtctctactaaaaatacaaaaaaattagccgggcatagtggcagggcgcctgtagtcccaactacttgggaggctgaggcaggagaatggcatgaacccaggaggcggagcttgcagtaagccgaaattgtgccactgcactccacagcctgggtgacaaagtgagactccatctcaaaaaaaaaaaacaaaacaaaacaaggaggagtgtgtgaaggaaactttttggcccatgcctagctatggctcttatctcttctgatcactttcccctggagagaacttgtcacatgaccatacccgcctgcaagagagcctgggaagtacaactggacaggcattgcctagctgccgtggaggaaagaagagtatggcattcggacagctagcatctccgccacagcaggcctagcacactgcctggtgcgttgcagacgcttcacaaaccttagctgttcattaccatcattgagtgttaatcatttctcttctgtgttcctttttcttcacatcagtacgaaaataaaagggatttctagaatgatcaaagcaatttgggattggtatgggaaggcttcccacggtaggtgggatgggaaagataaaaggatatttctggtgtttgaagactgtcagtgtaggtcagaaaggagcaggaaagtggaacagctatttttccttccactcatttttgtggtcttctaggaaaatattatttcccctatggaggattctcctattcctgacatgtctgggaaagaatcaggggctgacggggcaagcacctcccctcgcaatcagaacaagcccttcaggtgagtggtgtcctatccacaacccacagtctggcccccgcttctgttggcttctctccatctcaacctggggaagtcctcatcagtaagaggctgggggcagttaggtgaagcctaatagcagtctcaagtgtgagtgatgacccagcgtgtctgcatgcacagactgagtgcagggttgttcagcacagaactgttcataccataaataacccaaatgtcctgctgaaggggaatggttggctaaattggcataactccatatgatgaaataacttggggctattaatcatatagctgcaagtatagagaaatatagttaaatgacatgaaaagatgtaaattatagagtgacaagtggagaaaatattagttgtagcccagtatggatggtataatactatttttacttaaaatatatttctttttttctttttctttttttttttttgagatggagtctcgctcttgtcgtttaggttggagcgcaatggcgcaatcttggctcactgcaacctccgcctcccaggttcaagcgattctcctgcctcagccaccaagtagctgtgattacaggcgcctgccaccatgtatggctcatttttgtatttttagtagagacggggtttcaccatcttggccgggctggtcttgaactcctgacctcaggtgatcctcccacctcggccttccaaagtgctgggattacaggtgtgagccaccatgcctggcttacttacaatatatttaaatatgtgcacataagggaaaaaacctggactaatatgtagcaaaagattaggaataatatataacaaaatctggaatatatataataatatataacaaaataatagtaattctctctgggttgttggcattatgggtttttccatattttttgaatagtagatacatacgttgcttgttttaaaaaccagaccagatgtgtctgtccctccctttgtatctggatagatacagagggggtgcccaaagggaaaggcaggttttcactgaccttgggaagccctgggaacctccaaggtgggcccttctccaagctggctcttgagtctgacgggcctgcctcccgctgcagtgtgccgcatactaagtccctggagagccgcatcaaggaggagctaattgcccagggccttttggagtctgaggaccgccccgcagaggactccgaggatgaggtccttgctgagcttcgcaaacggcaggctgagctgaaggcacttagtgcccacaaccgcaccaagaagcacgacctgctgaggtgagcgttagcaggatgcacagtcccgggggtggccttggaggctgtggccacggctagtcacctttcaggggttttacaacaggctttccaatcctggctggcctctaaatcacctggagagcctcgaaaaaaacagcagtggccagtccaccgggtatgtcccaaacaaattctgattccacagagtggggctcaggcatctgtgactgaccgattgatttgatttgtttttgttttgtttttttttgagagggagtctcgcactgtcacccaggctggagtgcagtggcatgatctcggctcactgcaagctccgcctcccaggttcatgccattctcctgcctcagcctcctgagtagctgatactacaggcacccaccaccacgcccagctaatttttttgtatttttagtagagacggggtttcaccgtgttagccaggatggtctcgatctcctgacctcgtgatccacccgcctcggcctcccaaagtgccgggattacaggcgtgagccactgcgcctggcctagtttggttttttaattatggtaaaggcataatataaaatgtatctccatgggaggctgaggcaggagaatcagttgaacctgggaggcggaggttgcagtgagctgagactgcaccattgcattccagcctgggcaacaagagtgaaactgcatctcaaaaaaaaaaagaaaaaaaatttacgcttcttaaccatttttaagtgtacagtttagtagtgttacccatattcacattgttgtgtgatttattttttgtcttttcatgcttcttttctttttatccccaaagttttgttattaaaaatttgatacacacagaaaatctgaaagaatcatacaataaacatcagtatattctccacctagactaattaactgttaacattttgttggagatctgtgatttttatttgctcatcacaagaaattgaccagtgttttaggacatgttcttttgggaatccatcacagtgcctgccattcatttgatgtcaactcccatccatcttgttctgcattgatcacgagggtataggtgacatcttgaggaagactgtggaatagctaccctttaggtaaagagatagggaagcaacccgaacaagtctctttgcttctcacagacaagtgctgtgtcttaacttcatagagccctgacaggacagggcacattcattcatttggccttttttttttttttttgagacggtgtctcactctgttgcccaggctggagtgcagtgccatgatctcggctcactgcaacctccgcctcccgggttcaggcagttctcctgcctcagcctcctgagtagttgggattacaggcatgcactaccatgccaggctaatcatttggccattcttactgtctcttagatattgtgctgggggccagcaagagaggcagagcaagggacttgcagattactagcagatgatcagtaaagataagtgccattaaaaggagaggtagttgctgacaagctgccagggtatttaaggataagagtgactaatgtatgctgagggcctactgtgtgtcaggggctttatgtacactctctcaagtgtcttgacaacaacccaggagggaggagctattttcgttgtttaccagatgaggaaataaaggcccagtgaagcgaaatgctctgctgaaggtcacacagtcaataaacagcaagctgagacttgaacctgtggttgaatcaaagcctctttctataatagtttgttttctctgaaaggtgagaagaagaaaacacagatggaagaggcactgagggaagcagagggagagagaggaagagagagaaaagcaggcatgtgcagttacagaagtagtgggccctagctgggcctggtggctcatgcctgtaatcccagcactttgggagactgaggtgggaggcttgtttgagctcaggagttcgaaactagcctgggcaatgtagtcagacccccttctctactaaaaatttttaaaaatcagctaggcatggtggcacatgcctatagtcctactcaggaggctgatgtgggaggattgcttgatcctgggaggtagaggctgcagtgagcttgatcaggcccctgtactccagcctgggtgacagagtgagacctgtctcaaaaaaaaaaaaaaaaaaaaanaangaagtaatgggcaatgaagaaatggcttgcagctctcaggaaaccagagcacagcccttaccctgctgcagagcagctgcaaggccttaagcagcccctgacctgagcatctccttccccttctggaaaactggcaggctggactcaatcactaagtgaccttccagctccaccatcgatgaaatgtataaatcagaccctgttcagagagattgatctggtgtctcacccacctcctgtcagcctcaggctgcctagaccttagggggctctggaatgcagatgccgacgtaagcaggccttctgctggcaccggaacacctgaaacaacagtgtttaaaaacaagagtttggccccagcctgctccagatctccccctcactaactgtgggatcctgggatcatctttgagcctcattttcctcacgggtaacatatgaataatagtacatattttgcagggttgttaggattaactgaaagacagagagagagagtgggtgtgcctgtgtgtgtgtgtttgtgtgtgtgtatgtatatatatatatattttagagacagggtcttactctgttgccgaggttggtctcaactcctggcttcaagtgatcttcctgcctccatctcccaaagcgctgggattacaggcatgagctactttgcccagcctactgtgtatatttttaagacctttttttttttgaagacacagtcacgctctgttgcccagactggagtgtagtggcatgatcatagttcactgtaaccttgaactcctggcctcaagcaatcctcagctcccttggagttgggactacaggtgtgcactaccacacccagctaattttttaaattttttgtagagacagtctcactatgttgctcagactggtctcgaactcctgggctcaagtgatccttctgccttgggctcccaaagtgctgggactgcagatgtgaacccccatgtgcagccaagactttattcttctagagcagttttaagttcacaacaaaattgagagaaaggtacagagaattcccgtatctccctgtccccacatgtgcacagcctcccccgtgatcaacatgagttaatatttttcaggagcttaagatagtgccatgtaagtgtaggtcagtaactgctttttggtcacgactgtatgacacaatccacaggcatgccagcctgggctggtgggtaggctcggtcttgaagagggaggggttgttctctggaggtgggctgaccctggcacctggctggctggtccccacaggctggcaaaggaggaggtgagccggcaggagctgaggcagcgggtgcgcatggctgacaacgaggtcatggacgcctttcgcaagatcatggctgcccggcagaagaagcggactcccaccaagaaagaaaaggaccaggcctggaagactctgaaggagcgtgagagcatcctgaagctgctggatgggtagccctcacccctgcctcaggctgattatctggcctaggggaggggaagggaggcccacttccttctttgggcacaggaaacattggcctgtggctgtccctcaaatggcggcagtctctagagggccgtggcccttcccctgaggtcttttggcctagctctgtacaaccaggacacaggaagccctgctgggctagcctgaggcctagtctctgcttggtccccgagatggggttggaggggacttcgtttctgggtcttcctcttcccctctttaccatcccccactccctaatcccctacccctgtctccccttcaaggacttctcccttgtggttttgtaaagtgcaaacttaagaataaagtgactgctgtggtttttcaaaaaaagca

SEQ ID NO: 5824 - DNA, 1708 bp, Homo sapiens
caccctgcagctggagctggagaccctgctgtcttctgccagccggcgcctgcgtgtgcttgaggccgaaacccaggtgataaccccagagaggggccagcaccagagatggactgcaacaagttatgggatgggtcattgagttagccccatatgctgagacttggggtacaggggtttgtggggagagggagagagacgcaacttgggtttgcatgacacaaaaaatacacaagaatatgcatgatcctcttaaattgcaagatttctaattcagtaagcttttattggcaccccactcatcccccattgtgttctgggtcctatgctagtcattagagaaaggtaattaggacagttatggctgtcagggagcttggcaactaggaaagtgagaaagtcaagtacataccaggtgatgtgatgttgtggttagcagtcctagggaactggaatggggaaacctggatttgaatcctggcataagcgcttgctagcattgctgtttcctagctatgtgactttgagaaagttgcctcatatctctgagtgtcagtttccctatctgcaaagtggggtgaataataggacctaccttagtgcttttgtgaggattaaaagagaattttttgcaaaaactcagcccaatgccagacactaagtaagtacttcagatgttatttatttgctactctgatgactttattcactgcataaagatgccttgagccttgtgtgccaggcgctatgctgtattctgcaaaatagagatggttaaggtgggctttctggtcctcagtagcttatggtctagttgaagagacaaggtgtgatggtcattccagtgtgaccaaacaacacgattgggtgcacgttggagctgtgaagtgccagagacttgtggaggaaggaggtgccaactggacctaaaaggatgaatggaattaacttgtccctgggaatccatggaccctccttgaggaaggctatgactcaagttgtattttagcatctaagaacctgggtaactgattgagagaaggcatctcagtagtggtgacatcgaagtgaaggtttgctgagaggactcttctgttaaacagtatgtgactggcatgggtgatacagaagtgaatcagtatagatgaacaagtgaatgagattatgagaagtatatgaataaagttctaggaggacaggcacagaaaatgagctgaattttgaaggatgagtaagagtttactaggtaaaaagaggatggggaaagacccaggagcctctgtagattctagatcctaatttattcactagaggaaagagatattctgtgttttcccttgtccccctcagtgacactttctgtaaatttcagatcctcaccgactggcaggataagaaaggtgacagacgattcctgaagctgggtcgagaccatgaacttggagctccccccaaacatgggaagcccaagaagcagaaactggaagggaaggcaggacatgggccgggccctggcccaggacggcccaaatccaaaaaccttcagcccaagatccaggaatatgaattcactgatgaccctatcgacgtgccacggatccccaaaaatgatgcccccaacaggttctgggctagagaacatagaagggggcctcaaggttctggtggtggaggcactggtggggcaggggcgcccactcaggatctg

SEQ ID NO: 5825 - DNA, 16342 bp, Homo sapiens
  SITE (12770): n equals a,t,g, or c
  SITE (12771): n equals a,t,g, or c
cctgacttccacttccggcttgttgtgtcgttccacaacctgggaggagaagttctccaggcagagggcagcctgcaatgtggcccgcacggcactcaggtaggggcggagagtggcagtctataggaaataacacagaggaaagggaagatcaaaatctgtcacgccaaacccaccgatcccctattccagctcccatgaagccaggtagcactgagggtgcaaggctcttaagacactactgtgaacagaacagactaggccttcgagacgccttccaaggtgtagagtggtagttttcaacaggagacaattttgcctgccagggtacatttggtaatgtcgagacatttcctttctttcttttttaacctggggtcagaccagaggaatgctgagacattttcaattgtcatgacttggcaagaacgggaactggaagcattcagtggacagatatccactaaacatactacaatgcactacatgcaatatcgagactcaaatatcaatagagctcacggagataaagggatctctacacccaccagtgaatgcatgattgccgtcaatctattatgccaacaaatgtataggtgtactgtttgccactcactgagctaactgggaattcaaagatgattaacactgtctctaccctcaaacagctcaactggatagcaaatatacagaaaataactatgatataaagatgacatgtgaaatatttagatttacaagtaatctatatttgcagaagaaactggttttgaaggtgaaatgggattaggaggagaaaaaggagaataaggacattctttttttttttttttttttgagacagagtctcgctctgttgcccaggctggagcgcggtggcacgatctcggctcactgcaagctccacctcccgggttcatgcccttctcctgcctcagcctcccaagtagctgggactacaggcgcccaccaccacacccggctaactttttgtatttttagtagagacagggtttcacggtgttagccaggatggtctcaatctcctgaccttgtaatctgcccgccttggcctcccaaagtgctgggtttacaggcgtgagccaccacaccctgccagaataaggacattcttaggagagggattagcttctagctgcactggtcagtccttgtatcagccaaattctttcccacctcagagctttacacatgcttgaccatctatctgtaagcttttctcctctttctttggctaagtcatctccagatctcagcttaattaaggaaggccttttgacagagaccttgaaattcccctataaagtattaattaccattgacaaaaaactgttttcatgtttccttaatattatctttgcaagggattttccttctggcaccctcctggaatcgaatggaagattcttgtctcagcaatacccgcgtcctgtgttaaacaactttctctgctcaatctcccggttaatctccttccacgcgctctcaaaccctccagcctgggtgacagagcgagactgtgtcttaaaaaaaaagaaaaagaaaaaccacttccaacgaactgtggtccagccattcaattaactactacttggtaataaaaaaagagtaactattgatacacacaacatggttgactctcaaatgtattatggtaagaagccacacttaaaagcctgcatactaaagaattccatttacatgacaatctgaaaaaggcaaaactacaggggggaaaaatcagtagttgtctggggtgggaaggagaggactgattacaaaagggcttgagggaactttttggggtgacggaaatgttctgtattttggttgcagtagtggttacacaacttgactttttttttttaagacacgggatcttgctatattgtccaggctgaagtgcagtggctattcacaggagtgatcacagtgtactacggcctcgaacttctgggctcaagtgatcctcctgcctcagtgtcctgagcggatggtactacaggcgcatgccaccatacccagcaagtttttgcaacgcttttttttttgagacggagtcttactctgttgcccagtctggtgtgcagtggcacgatctcgactcactgcaagctctgctttctgggttcacgccattctcctgcctcagcctcctgagtagctgggactacaggtgcccaccaccacgcccggctaattttttgcatttttagtagagaagaggtttcaccgtgttagccaggatggtctcgatctcctgacgtcgtgatccgcccgcctctgcctcccaaagtgctgggattacaagcgtgagccaccacgcctggcctttgtcaacagttatagaaagtaaacctaaaaagggtgactggctccgtgacgcctgtcctttcatgaataaaacagatgtagtctcatgtaatacctcaataaacttgaacttttaaaaatcaagaggcatgtgccccactagaaaaaaaaaatacagatttttagcagagacatgaggtcacaaaagtttgccaggatagggaacccaggaggaagaacaaatttagaatagaatatgagttttgaactagaggtctaatttcaaggtctcttcaagatatccaggcaaaccttgaaagagagctgagaagccagattaggagtcatcagaatgaagaaagttatcgaagccaggagactagatcggtatcaccagggaaggtgtgacgaagagggagatggtcatccaaagtcacaactcccaggaatgcccacacgtatgaaaaaggcccacatgtatgaaaaaggcccacatgtatgaaaaagggaggacttccaggaagggagggatgagcagtatcacagctaacatacactaaggctgacacagttcagttctgaccaggaagggcctgaatggaagcaacacgagagatcctccaatggggtggaagcagggctggaggtaccaagaatgggataaggaagtgtggccgcctgccttaagcaactgtagggtcaggaaggcagaagaggacaaagggcgtatgtcgtgaagttccactgtggataggcaggtggacttgcttcatgcctcagaggctaagaggccgactacgtaccctcgaaatgctccaaagagcctaggagaccccacttccgggttcctacagggctcaggaaaagcccctacctgcttcgaaggctgaccgtgaagccacaaggcccacttcataccagggagtacccccactcgccccttcctcacctcgggcccccgccccgtctctttttcccaccctcatcgtgtccccacaacccccggacatccctcggccccgcgcccctgcggcaaagccacatctcccaccgacccactgccctgaggccgaacagccgggggtccctggccgggggcccggctctctcaccatcgcgggcgctggctgggccggaaagcggaagtacggaagtggccagccccgcgatgcctgccctttcgcgagaagcgcagctacggtctccgcccggacttccggacggtaccatctatgctccgagcggggtagagagcccttacgaacgcttgggccttccggaagttttccacctagggctgtctcggtatttttaaattcttgcactcgagtcactatttaagctcctccaggaatgggtgcagcttccctttgtgccttcggccttgttgtcacctttgccacagcctcccccaggtatgcaatggtacagcccagcttcagattgggcaccaaattaggacaagccgaagcggacgagtctttcgtttcttccggttatgaacccccatctctttctctcgcccttcttacccgcagctcctggcgctcagtggggctaactgcagtgcggagatcctcggacgccaagctccgccttccgccccgggctgtgccccggggctcgcatgagcccgtccattcgcaccccacctctagcggctttgctcgtggcccaccttcttcccacccccggtaaactccagtaggctcgccctcgctgactccccgcccccgcgtcaactgcaaggggcccgcccatagccagttccggggcggttgctcacatcgaccggaactccccgccccctcccgcggcccctggggccgtaggaggccgcagcgaggaggtagagggggcgggggtcgcactagggtgtccctagagaacgaggactctgaaggcgggacatttgggcgacccccgggcggggccagccattaaacagtcccacttctgtgccagacagctgaactgggctcttgacgggcatcatctcttaatcctcagaacatcccagggaggtaggtactattgttatccccatttttcagattcagacttttaatggggaaacagaccgagacttcttttgtccccattttacagatggaaaaactgagactgaaaaaggtcaaataacatgttcaggggcatataagtagagaatggtaaagcctgggcttgaacccaggtctgtctggcttaccagcccacgttctaaaccactgttagtgactagagaagggagaaaggtggaatagggtaagaaaagaggccaagagtcccagagaacatggtaagaatggggtgcttggaactcaaagtcttagcagaacccaagagaaatagaagggaaggaaagagcatcagaaaggcgaggcaaggcatagcagtatagcatggtgatcagggtgcagactcaagactagcggggttcaaattgcatcttggaagcataggcacatacccacccttacagagtctcagtttctttctctgtaaaaacgagatcacaatggtccttgttcatggtgctgagtgagaaattcagtgagataaactgataaagtgctctgcacctagcttggtacccagttaagtgccctgtgagtaggaactgtgccatcaattttgtcagtaagggactgaagctgggcttccttgaggctgtccctggaggtaagaagcccttgggcttttctcagaccactttgtctcccatcaatggccctgtcctctccagctccacaggatccccatatcctgggccatgagtgagttgaaagactgccccttgcagttccacgacttcaagtctgtggatcacctgaaggtctgtccccgctacacggcagtgctggcacgctctgaggatgatggcatcggcatcgaggagctggacaccctgcagctggagctggagaccctgctgtcttctgccagccggcgcctgcgtgtgcttgaggccgaaacccaggtgataaccccagagaggggccagcaccagagatggactgcaacaagttatgggatgggtcattgagttagccccatatgctgagacttggggtacaggggtttgtggggagagggagagagacgcaaactgggtttgcatgacacaaaaaatacacaagaatatgcatgatcctcttaaattgcaagatttctaattcagtaagcttttattggcaccccactcatcccccattgtgttctgggtcctatgctagtcattagagaaaggtaattaggacagttatggctgtcagggagcttggcaactaggaaagtgagaaagtcaagtacataccaggtgatgtgatgttgtggttagcagtcctagggaactggaatggggaaacctggatttgaatcctggcataagcgcttgctagcattgctgtttcctagctatgtgactttgagaaagttgcctcatatctctgagtgtcagtttccctatctgcaaagtggggtgaataataggacctaccttagtgcttttgtgaggattaaaagagaattttttgcaaaaactcagcccaatgccagacactaagtaagtacttcagatgttatttatttgctactctgatgactttattcactgcataaagatgccttgagccttgtgtgccaggcgctatgctgtattctgcaaaatagagatggttaaggtgggctttctggtcctcagtagcttatggtctagttgaagagacaaggtgtgatggtcattccagtgtgaccaaacaacacgattgggtgcacgttggagctgtgaagtgccagagacttgtggaggaaggaggtgccaactggacctaaaaggatgaatggaattaacttgtccctgggaatccatggaccctccttgaggaaggctatgactcaagttgtattttagcatctaagaacctgggtaactgattgagagaaggcatctcagtagtggtgacatcgaagtgaaggtttgctgagaggactcttctgttaaacagtatgtgactggcatgggtgatacagaagtgaatcagtatagatgaacaagtgaatgagattatgagaagtatatgaataaagttctaggaggccaggcacagaaaatgagctgaattttgaaggatgagtaagagtttactaggtaaaaagaggatggggaaagacccaggagcctctgtagattctagatcctaatttattcactagaggaaagagatattctgtgttttcccttctccccctcagtgacactttctgtaaatttcagatcctcaccgactggcaggataagaaaggtgacagacgattcctgaagctgggtcgagaccatgaacttggagctccccccaaacatgggaagcccaagaagcagaaactggaagggaaggcaggacatgggccgggccctggcccaggacggcccaaatccaaaaaccttcagcccaagatccaggaatatgaattcactgatgaccctatcgacgtgccacggatccccaaaaatgatgcccccaacaggttctgggctagagaacatagaagggggcctcaaggttctggtggtggaggcactggtggggcaggggcgcccactcaggatctgcttctccctgcaggttctgggcttcagtggagccctactgtgctgacatcaccagcgaggaggtccgcacacttgaggagttactgaagcccccagaagatgaggctgagcattacaaggtagaaactctgggccttgatagacatgatgcggaacaagagagttcagaggtgcctgagaagtaaagctaccaaagccatgcatcatcttccttccccaaccctgcccaggctgctgtctgctccatcagtgcctccagacacctaggcccaaactcagctttctccgggcactgactcccctctaccccagccaaatgtcaacacgccctcaagcatctacttaagtgaagtctgcccatgttcctttatccccatcccctctgctttggtccaagccttcatcaacttctatccaaacagcctcttaactctcttcctgtttcgaggcctctggaggaacctttcttctttctttaagatataaaacttgggctgggagcagcggcttatgcctgcaatcctagcactttgggaggccggggcgggcagattgcttgagctcaggaatttgagaccagcctgagcaacatggtgaaaccccatctctaccaaaatacaaaaaattagccaggcatggcggtgcgcgcctggagtcccagctactcgggaggctgagtcaggaggatctcttggacccgggagggggaaggttgcatgagccgagaacacgccactgcactccacgctgggcacaagaacaagactctctctccaaaaaaaaaaaaaagatataaaagtcacctcacgcctgtaatcccaacactttgggaggctgtggcaggcagatcatctgaggtcaggagttcaagaccagcctgaccaacatggtgaaacgccgtctctactaaaaatacaaaaattagcctggcacggtggcatgcacctgtaatcctggctactcgggaggctgagccaggaaaatcacctgaactggggaggcatcggttgcaatgagccaagatcgtgccactgtattccagcctgggtgacagaaggagattccatccattaaaaaaaaaaaagccgggtgcggtggctcaagcctgtaatcccagccctttgggaggccgaggcgggcagatcacaaggtcaggagattgagaccatcctggctaacacggtgaaaccccgtctctactaaaaatagaaaaaattagccgggcgtggtggcgggcgcctgtagtcccagctgctcgggaggctaaggcaggagaatggcgtgaacccgggaggcggagcttgcagtgagctgagattgtgccactgcactccagcctgggtgacagagcaagactctgtctcaaaaaaaaaagaagatataaaactatgttttaatgatgaaaataaataaaacatgctccattaaagaaaatttagaaaatacagaaaaatgttgagggagaatcctcccataggtgagctgtcatgatcagatgtgctcatgacatggcgctgcatccaggcctttcttcctcccgttatctacaggatcaagtccacgcatcccagtccttgctggcacagctccagtgcccctctccattttcctcggccatatccctcttcattgccgtgttgaccagtcccaccaagtatctcgccctcattccaggacaccacagcctcctcgctggtctctgggcctctggcaagctcttctctccctcttgtctccttgacagacttgactcacccttcaaggccctgatctcatgttacctccaccaaagcactctttcagattccccagcagaaagttagtcagtctctcctttgtgctgccacaacactttgatctctctctttcacttcacttatctgatttcttaaaaatttatctgaaaaagagttcatacagacagcagtaaattcaagcaatacaaaaggtaattccctgtcacccgtgacctgaaggctcctaattctctcgagaggcaattgctgtgacctgagacaatctgtgtacgtattctgcaccttctatcttgggaattatttcagattggcttctgtgtgtgtgtcttagttctttttggacctgtctcccttactagagtgtgaagtacaggttttatcttcgttgtactttcttacctacacctgacactgggcttggccttggactagggacttgagagagatataagataggtaagtgaatgaatgaatgaagcatggctggccagtgcttacccactcagggttgggtgccatcttttccacagatcccacccctggggaagcactactcccagcgctgggcccaggaggacctgctggaggagcagaaggatggggcccgggcagcggctgtggctgacaagaagaaaggcctcatggggccactgaccgaactggacactaaaggtaggcctctcacctccctgccaaccccaggtcaggacttgaattccagaacttcagcccacctcccctcctttcctgtgcccgcttagatgtggatgccctgctgaagaagtctgaggcccagcatgaacagccggaagatggatgcccctttggtgccctgacgcagcgcctcctgcaggccctggtggaggtgagcagcctaacccaaaagaggaaccatatttactttgtgttttaatgtgttatgcttattttttatcggaatttatcatacatttattaggttggtgcaaaaataggttggtgcaaaagtaaaaacctggactaatatatagcaaaagattgggaataatatataacttgtgcacctaatagaaaagtgcacagatcataaatgtacagttttcacaaatgagcttgtattaccagcctggagattacaaaatgaaacattactatatcctagaagcccctctcatgcccctgtttttctccaactttccccaaaggtagccttactccacaattacttttgctaagcatctgttggaggggctttatacacatcctcccactggaggccaggacagtggttaacgctgtgttacagataagaagattgaggctcagaaaagggaactgttcacttgaggtctcacacaccaggattcaaaccctagcttcaggggccctgtctttatacctgctggttgaccttagacacaccctcacactctttcacctcattgagactcagttttctattctggctcaaacacaagagtttatctcatggaacagtctgggtacatgttgcaggttatctaaggtaggggaaggggcaggtctctatctcatatcatcagacagggaccccagctgacggtggccttgcagtctgcacaaggtcactctgggcgtaattgtcactccagtcccacagaataagagcaaggaggccgggcgcggtggctcacgcctgtaatcccagcactttgggaggctgaggcgggcggatcacaaggtcaggagatcgagaccatcctggctaacatgatgaaaccccgtctctactaaaaatacaaaaaaattagccgggcatagtggcaggcgcctgtagtcccaactacttgggaggctgaggcaggagaatggcatgaacccaggaggcggagcttgcagtaagccgaaattgtgccactgcactccacagcctgggtgacaaagtgagactccatctcaaaaaaaaaaaacaaaacaaaacaaggaggagtgtgtgaaggaaactttttggcccatgcctagctatggctcttatctcttctgatcactttcccctggagagaacttgtcacatgaccatacccgcctgcaagagagcctgggaagtacaactggacaggcattgcctagctgccgtggaggaaagaagagtatggcattcggacagctagcatctccgccacagcaggcctagcacactgcctggtgcgttgcagacgcttcacaaaccttagctgttcattaccatcattgagtgttaatcatttctcttctgtgttcctttttcttcacatcagtacgaaaataaaagggatttctagaatgatcaaagcaatttgggattggtatgggaaggcttcccacggtaggtgggatgggaaagataaaaggatatttctggtgtttgaagactgtcagtgtaggtcagaaaggagcaggaaagtggaacagctatttttccttccactcatttttgtggtcttctaggaaaatattatttcccctatggaggattctcctattcctgacatgtctgggaaagaatcaggggctgacggggcaagcacctcccctcgcaatcagaacaagcccttcaggtgagtggtgtcctatccacaacccacagtctggcccccgcttctgttggcttctctccatctcaacctggggaagtcctcatcagtaagaggctgggggcagttaggtgaagcctaatagcagtctcaagtgtgagtgatgacccagcgtgtctgcatgcacagactgagtgcagggttggtcagcacaaaactgttcataccataaattaaccaaaaggtcctgttgaaggggaatgttggctaaattggcataactccatatgatgaaataacttggggctataaatcatatatctgcaagtatatagaaatatagttaaatgacatgaaaagatgtaaattatagagtgacaagtggagaaaatattagttgtagcccagtatggatggtataatactatttttacttaaaatatatttctttttttctttttctttttttttttttgagatggagtctcgctcttgtcgtttaggttggagcgcaatggcgcaatcttggctcactgcaacctccgcctcccaggttcaagcgattctcctgcctcagccaccaagtagctgtgattacaggcgcctgccaccatgtatggctcatttttgtatttttagtagagacggggtttcaccatcttggccgggctggtcttgaactcctgacctcaggtgatcctcccacctcggccttccaaagtgctgggattacaggtgtgagccaccatgcctggcttacttacaatatatttaaatatgtgcacataagggaaaaaacctggactaatatgtagcaaaagattaggaataatatataacaaaatctggaatatatataataatatataacaaaataatagtaattctctctgggttgttggcattatgggtttttccatattttttgaatagtagatacatacgttgcttgttttaaaaaccagaccagatgtgtctgtccctccctttgtatctggatagatacagagggggtgcccaaagggaaaggcaggttttcactgaccttgggaagccctgggaacctccaaggtgggcccttctccaagctggctcttgagtctgacgggcctgcctcccgctgcagtgtgccgcatactaagtccctggagagccgcatcaaggaggagctaattgcccagggccttttggagtctgaggaccgccccgcagaggactccgaggatgaggtccttgctgagcttcgcaaacggcaggctgagctgaaggcacttagtgcccacaaccgcaccaagaagcacgacctgctgaggtgagcgttagcaggatgcacagtcccgggggtggccttggaggctgtggccacggctagtcacctttcaggggttttacaacaggctttccaatcctggctggcctctaaatcacctggagagcctcgaaaaaaacagcagtggccagtccaccgggtatgtcccaaacaaattctgattccacagagtggggctcaggcatctgtgactgaccgattgattnngattgttttttttttttttttttttgaggcggagtctcgctctgtcgcccaaggctggagtgtagtcgtgcgatctcggctcactgcaagctccgcctcccgggttcacgccattctcctgcctcagcctcccgagtagctgggactacaggcgcccgccaccacgcccggctaattttttgtatttttagtagagaccgggtttcaccgtgttagccaggatggtctcgatcttctgacctcgtgatccacccgcctcggcctcccaaagtgccgggattacaggcgtgagccactgcgcccggcctagtttggttttttaattatggtaaaggcataatataaaatgtatctccatgggaggctgaggcaggagaatcagttgaacctgggaggcggaggttgcagtgagctgagactgcaccattgcattccagcctgggcaacaagagtgaaactgcatctcaaaaaaaaaaagaaaaaaaatttacgcttcttaaccatttttaagtgtacagtttagtagtgttacccatattcacattgttgtgtgatttattttttgtcttttcatgcttcttttctttttatccccaaagttttgttattaaaaatttgatacacacagaaaatctgaaagaatcatacaataaacatcagtatattctccacctagactaattaactgttaacattttgttggagatctgtgatttttatttgctcatcacaagaaattgaccagtgttttaggacatgttcttttgggaatccatcacagtgcctgccattcatttgatgtcaactcccatccatcttgttctgcattgatcacgagggtataggtgacatcttgaggaagactgtggaatagctaccctttaggtaaagagatagggaagcaacccgaacaagtctctttgcttctcacagacaagtgctgtgtcttaacttcatagagccctgacaggacagggcacattcattcatttggccttttttttttttttttgagacggtgtctcactctgttgcccaggctggagtgcagtgccatgatctcggctcactgcaacctccgcctcccgggttcaggcagttctcctgcctcagcctcctgagtagttgggattacaggcatgcactaccatgccaggctaatcatttggccattcttactgtctcttagatattgtgctgggggccagcaagagaggcagagcaagggacttgcagattactagcagatgatcagtaaagataagtgccattaaaaggagaggtagttgctgacaagctgtcagggtatttaaggataagagtgactaatgtatgctgagggcctactgtgtgtcaggggctttatgtacactctctcaagtgtcttgacaacaacccaggagggaggagctattttcgttgtttaccagatgaggaaataaaggcccagtgaagcgaaatgctctgctgaaggtcacacagtcaataaacagcaagctgagacttgaacctgtggttgaatcaaagcctctttctataatagtttgttttctctgaaaggtgagaagaagaaaacacagatggaagaggcactgagggaagcagagggagagagaggaagagagagaaaagcaggcatgtgcagttacagaagtagtgggccctagctgggcctggtggctcatgcctgtaatcccagcactttgggagactgaggtgggaggcttgtttgagctcaggagttcgaaactagcctgggcaatgtagtcagacccccttctctactaaaaatttttaaaaatcagctaggcatggtggcacatgcctatagtcctactcaggaggctgatgtgggaggattgcttgatcctgggaggtagaggctgcagtgagcttgatcaggccactgtactccagcctgggtgacagagtgagacctgtctcaaaaaaaaaaaaaaaaaaaaaaaaagaagtaatgggcaatgaagaaatggcttgcagctctcaggaaaccagagcacagcccttaccctgctgcagagcagctgcaaggccttaagcagcccctgacctgagcatctccttccccttctggaaaactggcaggctggactcaatcactaagtgaccttccagctccaccatcgatgaaatgtataaatcagaccctgttcagagagattgatctggtgtctcacccacctcctgtcagcctcaggctgcctagaccttagggggctctggaatgcagatgccgacgtaagcaggccttctgctggcaccggaacacctgaaacaacagtgtttaaaaacaagagtttggccccagcctgctccagatctccccctcactaactgtgggatcctgggatcatctttgagcctcattttcctcacgggtaacatatgaataatagtacatattttgcagggttgttaggattaactgaaagacagagagagagagtgggtgtgcctgtgtgtgtgtgtttgtgtgtgtgtatgtatatatatatatattttagagacagggtcttactctgttgccgaggttggtctcaactcctggcttcaagtgatcttcctgcctccatctcccaaagcgctgggattacaggcatgagctactttgcccagcctactgtgtatatttttaagacctttttttttttgaagacacagtcacgctctgttgcccagactggagtgtagtggcatgatcatagttcactgtaaccttgaactcctggcctcaagcaatcctcagctcccttggagttgggactacaggtgtgcactaccacacccagctaattttttaaattttttgtagagacagtctcactatgttgctcagactggtctcgaactcctgggctcaagtgatccttctgccttgggctcccaaagtgctgggactgcagatgtgaacccccatgtgcagccaagactttattcttctagagcagttttaagttcacaacaaaattgagagaaaggtacagagaattcccgtatctccctgtccccacatgtgcacagcctcccccgtgatcaacatgagttaatatttttcaggagcttaagatagtgccatgtaagtgtaggtcagtaactgctttttggtcacgactgtatgacacaatccacaggcatgccagcctgggctggtgggtaggctcggtcttgaagagggaggggttgttctctggaggtgggctgaccctggcacctggctggctggtccccacaggctggcaaaggaggaggtgagccggcaggagctgaggcagcgggtgcgcatggctgacaacgaggtcatggacgcctttcgcaagatcatggctgcccggcagaagaagcggactcccaccaagaaagaaaaggaccaggcctggaagactctgaaggagcgtgagagcatcctgaagctgctggatgggtagccctcacccctgcctcaggctgattatctggcctaggggaggggaagggaggcccacttccttctttgggcacaggaaacattggcctgtggctgtccctcaaatggcggcagtctctagagggg

SEQ ID NO: 5826 - DNA, 22129 bp, Homo sapiens
aatttttgtatttttaatagagatggggtttcaccatgttggccaggctggtcttgaactcctgacctcatgatccacccacctcggcctcccaaagtgttgggattagaggcatgagccaccacgcccggctcttttttgccttttctatggctgaggtagacccaacttttcctaagcttctaatcctctttgctcccactccaagatgaaggccaactctcaattcaggcagtgggtgccaaacagctggagtagctggttctagaaacaatcccaggccattctgtaacagggtcctgggtatcgcaaactcatgggtcacagggtctcacctccacaggcttccttcgaaggataaagaagttctctgctcgcatcatcatgaagcgcatgaacttgtggcacaaaatcttctcgatctcatcagcctggggagtgcaagagagaaatgtttctctaaagctgacacccaaggccaaaaacaccttgtagcctggtcttctgactccagttttttcaaggctcccaggagacagtgaggtttggtactcggaaggatcactgaagtgggggacctggctgtcaactgaaacaagggtctaccttggggcatctcttaatgacgacccattccagagaggtaattctgacaggcttctattgcttctttcagagtctacagctgtactccaagctgccctttccattctcatttcactagtgtcacatttcccagggtgttttgcagcatcacctgggctatcagagataaccttaggtggtctctgctttaataacactgaacatccaacaatccctgaagtttctcccttctgaatgctcaacatttctttttttttttttttttttttttttctgagatggaatctcgctctgtcacccaggctggagtgcagtggtacgattttgactcactgtaagctctgcctcccgggttcaagcgattctcctgcctcagcctcccaagtagctgggattacaggcgcgtgccaccacgcctggctaatttctgtatttttagtagagacagggttttaccatgttggccaggctggtcttgaactcctgacatcaagtgatccacccgccttggtctcccaaagtgctgggattacaggcatgagccactgtgcctggccctgaactctcaacatttctaaaggaagattattgctgctggttgctagcatgcccttaacacctctcaacacttgttaacctcccattttagcaaggaaagcaggccccaggtttataagtttctgtagaaaacagtgtgtagtctgcatttaataacagtgcttcgttttcatcctgttgaaagtttagagttgccctctactggccaggcatggtggctcatgactgtaatcccagtactttgggaggttgaggcgggcccatcacctgcggtcaggagatggagaccatcctggcaaacatggtgaaactctgtctctactaaaaatacaaaaattaactgggcgtggtggcggatgcctgtaatcccagctacttgggagactgagacagaagaactgcttgaacccgggaggcagaggttgcagtgagctgagatcatgctgctgcactccagcctgggcgacaagagtgagaatccgtgtcaaaaaaaaaggaagcagaggctaggtttcctgcactctgaatctggaatctggcacactgatctctcagatggggaccccggactgaaagaggctgaaaggactgaaagaggccttacgttgggcctcctccatggtgaacttacctgtttcacagcaatgctgacccggacagagttgatggagccctcaatcagaaccttttccttctcattcctgctgatggtcacaggttgtaacaggagctctttgctactcctgaaaacataatgtgacagagtacttgtactacagagggatagaatagtcagagtgaccccacgcaggtcctggaatcactatgagaccatagagtccaaggaatagaagactcacaagcaggagtgctccaagatgggggccagtgagtgtgttcttcagcagaaagagcacaggctctgaagtcagggcgaaaaggttttgaaatccagcctcctctgttactttccttgggcaagttaccctgttggaatctcaattttctcatctgtaaaatgactctgattcctaattcactggcgaggactgagagagatcaaaaagggtcaaatgtctaatagcgtgcctggcacatagtaggagctttacaaaagatagctattttagtaactacaagttgaacatccccaatctgcaaatctgaaatccaaaatctgaaactggctgggcacagtggctcatgcctgtaatcccagcactttgagaggctgaggctggtggatcacctgaggtcaggagttcgagaccagcctggccaacatggtgatatcccatttgtactaaaaatataaaaattagctgggcatggtggcgcactcctataatcccagatactcaggaggctgaagcacgagaattgctcgaactcaggaggtggcagttgcagtgagccaagatcataccactgtactccagcctgggtgacagaatcaaactccatctcaaaaaaaaaaaaaaacctgaaagtttccgagtgctgacaagatgctcaaaggagatcctcattggagcattttggatttggaattagggatgctcaactggttaagtatctgcaaatattccacaatctgaaatacttttggtcccaagcattttggataagagatactcaacctgtacaggcaaaccaatataccatttaggaatacagagagaacacctgtcttagaggtaaggaaaggctaaaattgaacacagtttggcttcctttaattatcaatccagaaatgattcatttgcctctgagacccctatgagttcaggttacaaagtaatgcctctgaatacctagagatctctaatagtaattaattgtggtgtggtgtctctaaactgctaaccattttcaaaggcccactggaaatcgtgtacgttacacagtataacagggcatatcctaacatctttatcagttatttttaaaattaaaaattaaatcgtatcatttaatgttgtaacccagattatctcagttatgtatgtaccagaatgaattttattttattttattttattttattttatttttgagacgaagtcttgctctgctgccaggctggagtgcggtggcacgatcttggctcactgcaacctccgcctcccaggttcaagcaattctcctgcctcagcctcccgagtagctgggactacaggtgcataccaccatgcccagcttatttttgtatttttagtagagacaaggtttcaccatgttggccaggatgctctcgatctcttgacctcataatctgtctgcctcggcctcccaaagtgctgggattacaggcgtgagccactgtgcccggcctatttacttattttttgagacagggtctcacccaggctggagtgcactgtcgcaatgttggctcattgcaacctctgcttcccaggctcaagagatcctcctgcctcagcctccagagaagtgggactacaggcatgtgccaccatgcctgactatttttgcatatttttttggtagagatggagtcttgccatgttgcccaggctggtcttgaactcctgtactcaagcgatctacccacttcagcctcctaaagtgctcggattacaggggtgaaccactgcaccaggcctccagattaaattttaaaggggaaaaagatatttatgaaatggaaactagataagagaaaatcattcaaaatatgaagtatttggattagggggtcagagtgtctaggctggtaggtaaaaaaaaaatccctgatcattacattagaaaagtatggagatgggaaaaaaaaaaaaaaaaaagaaaagtatggagatggaatctcagataacaattatctgaccattccttaaactaccagtgttttcaacaatgccacaggagagacttcatcaacagccctgctctgagaagtcataccttgtgttaaccaatcttgtcttttcccctgggttctgtcctgccaacccactgaccctattttcttaactccaaattgggaatcaccattcagctggcagcaagacaaaatgtcaactgcagctttcctgactactgcaggacataagttcatggcaccttctagacagcagccatctctgtgtgctgcacccctcatccccaccttgacttgtccttccctacctgacttccacttccggcttgttgtgtcgttccacaacctgggaggagaagttctccaggcagagggcagcctgcaatgtggcccgcacggcactcaggtaggggcggagagtggcagtctataggaaataacacagaggaaagggaagatcaaaatctgtcacgccaaacccaccgatcccctattccagctcccatgaagccaggtagcactgagggtgcaaggctcttaagacactactgtgaacagaacagactaggccttcgagacgccttccaaggtgtagagtggtagttttcaacaggagacaattttgcctgccagggtacatttggtaatgtcgagacatttcctttctttcttttttaacctggggtcagaccagaggaatgctgagacattttcaattgtcatgacttggcaagaaggggaactgcaggcattcagtggacagatatccactaaacatactacaatgcactacaaagaattatcgagactcaaatatcaatagtgctaaggttgagaaagtgatctagagacacaccagtgaatgcatgattgtcgtcaatctattaggccaacaaatgtataggtgtactgtttgccacgcactgagctaactgggaattcaaagatgattaacactgtctctaccctcaaacagctcaactggatagcaaatatacagaaaataactatgatataaagatgacatgtgaaatatttagatttacaagtaatctatatttgcagaagaaactggttttgaaggtgaaatgggattaggaggagaaaaaggagaataaggacattctttttttttttttttttttgagacagagtctcgctctgttgcccaggctggagcgcggtggcacgatctcggctcactgcaagctccacctcccgggttcatgcccttctcctgcctcagcctcccaagtagctgggactacaggcgcccaccaccacacccggctaactttttgtatttttagtagagacagggtttcacggtgttagccaggatggtgctcaatctcctgaccttgtaatctgcccgccttggcctcccaaagtgctgggtttacaggcgtgagccaccacaccctgccagaataaggacattcttaggagagggattagcttctagctgcactggtcagtccttgtatcagccaaattctttcccacctcagagctttacacatgcttgaccatctatctgtaggcttttctcctctttctttgcctaagtcatcctccagatctcagcttaattaaggaaggcctcttgagagagaccttgacatccccctataaagtatttattacaattgacaaaaaaatgtctttcatgtcttcttaatatttatttttgagagggagtctcgcttctgtcaccctcgctggagtgcagtggcacgatctctgctcacggcaatcgccgcctcctgggttaaagcgattctcctgcttcagcctcccgagtagctgggattacaggcgcacatcaccatgcctggctaatttttgtatttttagtagagacggagtttcaccgtgttggtcaggcttgtcttgaaatcctgacctcaggcaatccgcccacctcggcctctcaaagtgttgggattacaggcgtgagccaacgtgcctggccttttttatttttttttgagacagagtcttactctgttgtccaggctggagcgcagtggtgcaatcttggctcactgcaacctccacctcccgggttcaagtgattcacctgcctcagccatgcgaatagctgagatgacaagtgtgcaccaccgtgcctggttaatttttgtatttttagtagagatggggtttcgccatgttggccaggctggtctcaaactcctgacctcaagtgacccgcccatctcggcctcctaaagtgctgggattacagacatgaaccactgcacctgccctccttcatgcctttgtaagtgatttctcctttactaggctgtaaacctcatggtcaacagaccatatctattttattcacagctatatagcctccaacctagctcagtacctaacatatacagtgtctcactcatttcctgtagaataaataagcgaaaggtataattaagatcagagtaacacaaaaggtcagcaagagttccagagtagtaatgagtacaatgtttctgtatatgagaagcattttagattcactaaatgaggctgcagcggtaggctgaggtaagatcatggggaatcttgaatgccaggctaccaagtttagcttttctcttaagggggtaaggaactactggggctttctgaggaggaagttcatgactgcagctgcatgatggctctgtggagaatgatttggagagggaagtgagacatacagcagactgtatcacaagcaaagagtatcacaagcgttggactgacattagatggagtggataatggaactgaaaaaaaacttcccaggggctcacgcctgtaatcccggcactttgggaggccgaggtgggtggaccacctcaggtcaggagttcaagaccagcctggccaacatggcaaaaccccgtctctactaaaaatacaaaaaattagctgtggcgggtgcctgtaatctcagctacttgagaggctgaggcagtagaattgcttgaacccaggagactgaggttgcagtgagccgagatcacgccactgtgctccagcctgggtgacagagcgagactgtgtcttaaaaaaaaagaaaaagaaaaaccacttccaacgaactgtggtccagccattcaattaactactacttggtaataaaaaaagagtaactattgatacacacaacatggttgactctcaaatgtattatggtaagaagccacacttaaaagcctgcatactaaagaattccatttacatgacaatctgaaaaaggcaaaactacaggggggaaaaatcagtagttgtctggggtgggaaggagaggactgattacaaaagggcttgagggaactttttggggtgacggaaatgttctgtattttggttgcagtagtggttacacaacttgactttttttttttaagacacgggatcttgctatattgtccaggctgaagtgcagtggctattcacaggagtgatcacagtgtactacggcctcgaacttctgggctcaagtgatcctcctgcctcagtgtcctgagcggatggtactacaggcgcatgccaccatacccagcaagtttttgcaacgcttttttttttgagacggagtcttactctgttgcccagtctggtgtgcagtggcacgatctcgactcactgcaagctctgctttctgggttcacgccattctcctgcctcagcctcctgagtagctgggactacaggtgcccaccaccacgcccggctaattttttgcatttttagtagagaagaggtttcaccgtgttagccaggatggtctcgatctcctgacgtcgtgatccgcccgcctctgcctcccaaagtgctgggattacaagcgtgagccaccacgcctggcctttgtcaacagttatagaaagtaaacctaaaaagggtgactggctccgtgacgcctgtcctttcatgaataaaacagatgtagtctcatgtaatacctcaataaacttgaacttttaaaaatcaagaggcatgtgccccactagaaaaaaaaaatacagatttttagcagagacatgaggtcacaaaagtttgccaggatagggaacccaggaggaagaacaaatttagaatagaatatgagttttgaactagaggtctaatttcaaggtctcttcaagatatccaggcaaaccttgaaagagagctgagaagccagattaggagtcatcagaatgaagaaagttatcgaagccaggagactagatcggtatcaccagggaaggtgtgacgaagagggagatggtcatccaaagtcacaactcccaggaatgcccacacgtatgaaaaaggcccacatgtatgaaaaaggcccacatgtatgaaaaagggaggacttccaggaagggagggatgagcagtatcacagctaacatacactaaggctgacacagttcagttctgaccaggaagggcctgaatggaagcaacacgagagatcctccaatggggtggaagcagggctggaggtaccaagaatgggataaggaagtgtggccgcctgccttaagcaactgtagggtcaggaaggcagaagaggacaaagggcgtatgtcgtgaagttccactgtggataggcaggtggacttgcttcatgcctcagaggctaagaggccgactacgtaccctcgaaatgctccaaagagcctaggagaccccacttccgggttcctacagggctcaggaaaagcccctacctgcttcgaaggctgaccgtgaagccacaaggcccacttcataccagggagtacccccactcgccccttcctcacctcgggcccccgccccgtctctttttcccaccctcatcgtgtccccacaacccccggacatccctcggccccgcgcccctgcggcaaagccacatctcccaccgacccactgccctgaggccgaacagccgggggtccctggccgggggcccggctctctcaccatcgcgggcgctggctgggccggaaagcggaagtacggaagtggccagccccgcgatgcctgccctttcgcgagaagcgcagctacggtctccgcccggacttccggacggtaccatctatgctccgagcggggtagagagcccttacgaacgcttgggccttccggaagttttccacctagggctgtctcggtatttttaaattcttgcactcgagtcactatttaagctcctccaggaatgggtgcagcttccctttgtgccttcggccttcttgtcacctttgccacagcctcccccaggtatgcaatggtacagcccagcttcagattgggcaccaaattaggacaagccgaagcggacgagcccttcgtttcttccggttctgtacccccatcctttctctcgcccctcctacccgcagctcctggcgctcggcggggctaactgcagcgcggagatctcggccgccaagctccgcctcccgccccgggctgtgccccggggctcgcctgaggccgaccacccgcaccccacctctagcggctttgctcgaggcccaccttcttcccacccccggcaaactccagtaggctcgccctcgctgactccccgcccccgcgtcaactgcaaggggcccgcccatagccagttccggggcggttgctcacatcgaccggaactccccgccccctcccgcggcccctggggccgtaggaggccgcagcgaggaggtagagggggcgggggtcgcactagggtgtccctagagaacgaggactctgaaggcgggacatttgggcgacccccgggcggggccagccattaaacagtcccacttctgtgccagacactgaactgggctcttgacgggcatcatctcttaatcctcagaacatcccagggaggtaggtactattgttatccccatttttcagattcagacttttaatggggaaacagaccgagacttcttttgtccccattttacagatggaaaaactgagactgaaaaaggtcaaataacatgttcaggggcatataagtagagaatggtaaagcctgggcttgaacccaggtctgtctggcttaccagcccacgttctaaaccactgttagtgactagagaagggagaaaggtggaatagggtaagaaaagaggccaagagtcccagagaacatggtaagaatggggtgcttggaactcaaagtcttagcagaacccaagagaaatagaagggaaggaaagagcatcagaaaggcgaggcaaggcatagcagtatagcatggtgatcagggtgcagactcaagactagcggggttcaaattgcatcttggaagcataggcacatacccacccttacagagtctcagtttctttctctgtaaaaacgagatcacaatggtccttgttcatggtgctgagtgagaaattcagtgagataaactgataaagtgctctgcacctagcttggtacccagttaagtgccctgtgagtaggaactgtgccatcaattttgtcagtaagggactgaagctgggcttccttgaggctgtccctggaggtaagaagcccttgggcttttctcagaccactttgtctcccatcaatggccctgtcctctccagctccacaggatccccatatcctgggccatgagtgagttgaaagactgccccttgcagttccacgacttcaagtctgtggatcacctgaaggtctgtccccgctacacggcagtgctggcacgctctgaggatgatggcatcggcatcgaggagctggacaccctgcagctggagctggagaccctgctgtcttctgccagccggcgcctgcgtgtgcttgaggccgaaacccaggtgataaccccagagaggggccagcaccagagatggactgcaacaagttatgggatgggtcattgagttagccccatatgctgagacttggggtacaggggtttgtggggagagggagagagacgcaaactgggtttgcatgacacaaaaaatacacaagaatatgcatgatcctcttaaattgcaagatttctaattcagtaagcttttattggcaccccactcatcccccattgtgttctgggtcctatgctagtcattagagaaaggtaattaggacagttatggctgtcagggagcttggcaactaggaaagtgagaaagtcaagtacataccaggtgatgtgatgttgtggttagcagtcctagggaactggaatggggaaacctggatttgaatcctggcataagcgcttgctagcattgctgtttcctagctatgtgactttgagaaagttgcctcatatctctgagtgtcagtttccctatctgcaaagtggggtgaataataggacctaccttagtgcttttgtgaggattaaaagagaattttttgcaaaaactcagcccaatgccagacactaagtaagtacttcagatgttatttatttgctactctgatgactttattcactgcataaagatgccttgagccttgtgtgccaggcgctatgctgtattctgcaaaatagagatggttaaggtgggctttctggtcctcagtagcttatggtctagttgaagagacaaggtgtgatggtcattccagtgtgaccaaacaacacgattgggtgcacgttggagctgtgaagtgccagagacttgtggaggaaggaggtgccaactggacctaaaaggatgaatggaattaacttgtccctgggaatccatggaccctccttgaggaaggctatgactcaagttgtattttagcatctaagaacctgggtaactgattgagagaaggcatctcagtagtggtgacatcgaagtgaaggtttgctgagaggactcttctgttaaacagtatgtgactggcatgggtgatacagaagtgaatcagtatagatgaacaagtgaatgagattatgagaagtatatgaataaagttctaggaggccaggcacagaaaatgagctgaattttgaaggatgagtaagagtttactaggtaaaaagaggatggggaaagacccaggagcctctgtagattctagatcctaatttattcactagaggaaagagatattctgtgttttcccttctccccctcagtgacactttctgtaaatttcagatcctcaccgactggcaggataagaaaggtgacagacgattcctgaagctgggtcgagaccatgaacttggagctccccccaaacatgggaagcccaagaagcagaaactggaagggaaggcaggacatgggccgggccctggcccaggacggcccaaatccaaaaaccttcagcccaagatccaggaatatgaattcactgatgaccctatcgacgtgccacggatccccaaaaatgatgcccccaacaggttctgggctagagaacatagaagggggcctcaaggttctggtggtggaggcactggtggggcaggggcgcccactcaggatctgcttctccctgcaggttctgggcttcagtggagccctactgtgctgacatcaccagcgaggaggtccgcacacttgaggagttactgaagcccccagaagatgaggctgagcattacaaggtagaaactctgggccttgatagacatgatgcggaacaagagagttcagaggtgcctgagaagtaaagctaccaaagccatgcatcatcttccttccccaaccctgcccagtctgctgtctgctccatcagtgcctccagacacctaggcccaaactcagctttctccgtgcactgcctcccctctaccccagccaaatgtcaacacgccctcaagcatctacttaagtgaagtctgcccatgttcctttatccccatcccctctgctttggtccaagccttcatcaacttctatccaaacagcctcttaactctcttcctgtttcgaggcctctggaggaacctttcttctttctttaagatataaaacttgggctgggagcagtggcttatgcctgcaatcctagcactttgggaggccggggcgggcagattgcttgagctcaggaatttgagaccagcctgggcaacatggtgaaaccccatctctaccaaaatacaaaaaattagccaggcatggcggtgtgcgcctgtagtcccagctactcgggaggctgagtcaggaggatctcttggacccgggaggtggaagttgcagtgagccgagatcacgccactgcactccagcctgggcaacagagcaagactccgtctccaaaaaaaaaaaaaagatataaaagtcacctcacgcctgtaatcccaacactttgggaggctgtggcaggcagatcatctgaggtcaggagttcaagaccagcctgaccaacatggtgaaacgccgtctctactaaaaatacaaaaattagcctggcacggtggcatgcacctgtaatcctggctactcgggaggctgagccaggaaaatcacctgaactggggaggcatcggttgcaatgagccaagatcgtgccactgtattccagcctgggtgacagaaggagattccatccattaaaaaaaaaaaagccgggtgcggtggctcaagcctgtaatcccagccctttgggaggccgaggcgggcagatcacaaggtcaggagattgagaccatcctggctaacacggtgaaaccccgtctctactaaaaatagaaaaaattagccgggcgtggtggcgggcgcctgtagtcccagctgctcgggaggctaaggcaggagaatggcgtgaacccgggaggcggagcttgcagtgagctgagattgtgccactgcactccagcctgggtgacagagcaagactctgtctcaaaaaaaaaagaagatataaaactatgttttaatgatgaaaataaataaaacatgctccattaaagaaaatttagaaaatacagaaaaatgttgagggagaatcctcccataggtgagctgtcatgatcagatgtgctcatgacatggcgctgcatccaggcctttcttcctcccgttatctacaggatcaagtccacgcatcccagtccttgctggcacagctccagtgcccctctccattttcctcggccatatccctcttcattgccgtgttgaccagtcccaccaagtatctcgccctcattccaggacaccacagcctcctcgctggtctctgggcctctggcaagctcttctctccctcttgtctccttgacagacttgactcacccttcaaggccctgatctcatgttacctccaccaaagcactctttcagattccccagcagaaagttagtcagtctctcctttgtgctgccacaacactttgatctctctctttcacttcacttatctgatttcttaaaaatttatctgaaaaagagttcatacagacagcagtaaattcaagcaatacaaaaggtaattccctgtcacccgtgacctgaaggctcctaattctctcgagaggcaattgctgtgacctgagacaatctgtgtacgtattctgcaccttctatcttgggaattatttcagattggcttctgtgtgtgtgtcttagttctttttggacctgtctcccttactagagtgtgaagtacaggttttatcttcgttgtactttcttacctacacctgacactgggcttggccttggactagggacttgagagagatataagataggtaagtgaatgaatgaatgaagcatggctggccagtgcttacccactcagggttgggtgccatcttttccacagatcccacccctggggaagcactactcccagcgctgggcccaggaggacctgctggaggagcagaaggatggggcccgggcagcggctgtggctgacaagaagaaaggcctcatggggccactgaccgaactggacactaaaggtaggcctctcacctccctgccaaccccaggtcaggacttgaattccagaacttcagcccacctcccctcctttcctgtgcccgcttagatgtggatgccctgctgaagaagtctgaggcccagcatgaacagccggaagatggatgcccctttggtgccctgacgcagcgcctcctgcaggccctggtggaggtgagcagcctaacccaaaagaggaaccatatttactttgtgttttaatgtgttatgcttattttttatcggaatttatcatacatttattaggttggtgcaaaaataggttggtgcaaaagtaaaaacctggactaatatatagcaaaagattgggaataatatataacttgtgcacctaatagaaaagtgcacagatcataaatgtacagttttcacaaatgagcttgtattaccagcctggagattacaaaatgaaacattactatatcctagaagcccctctcatgcccctgtttttctccaactttccccaaaggtagccttactccacaattacttttgctaagcatctgttggaggggctttatacacatcctcccactggaggccaggacagtggttaacgctgtgttacagataagaagattgaggctcagaaaagggaactgttcacttgaggtctcacacaccaggattcaaaccctagcttcaggggccctgtctttatacctgctggttgaccttagacacaccctcacactctttcacctcattgagactcagttttctattctggctcaaacacaagagtttatctcatggaacagtctgggtacatgttgcaggttatctaaggtaggggaaggggcaggtctctatctcatatcatcagacagggaccccagctgacggtggccttgcagtctgcacaaggtcactctgggcgtaattgtcactccagtcccacagaataagagcaaggaggccgggcgcggtggctcacgcctgtaatcccagcactttgggaggctgaggcgggcggatcacaaggtcaggagatcgagaccatcctggctaacatgatgaaaccccgtctctactaaaaatacaaaaaaattagccgggcatagtggcaggcgcctgtagtcccaactacttgggaggctgaggcaggagaatggcatgaacccaggaggcggagcttgcagtaagccgaaattgtgccactgcactccacagcctgggtgacaaagtgagactccatctcaaaaaaaaaaaacaaaacaaaacaaggaggagtgtgtgaaggaaactttttggcccatgcctagctatggctcttatctcttctgatcactttcccctggagagaacttgtcacatgaccatacccgcctgcaagagagcctgggaagtacaactggacaggcattgcctagctgccgtggaggaaagaagagtatggcattcggacagctagcatctccgccacagcaggcctagcacactgcctggtgcgttgcagacgcttcacaaaccttagctgttcattaccatcattgagtgttaatcatttctcttctgtgttcctttttcttcacatcagtacgaaaataaaagggatttctagaatgatcaaagcaatttgggattggtatgggaaggcttcccacggtaggtgggatgggaaagataaaaggatatttctggtgtttgaagactgtcagtgtaggtcagaaaggagcaggaaagtggaacagctatttttccttccactcatttttgtggtcttctaggaaaatattatttcccctatggaggattctcctattcctgacatgtctgggaaagaatcaggggctgacggggcaagcacctcccctcgcaatcagaacaagcccttcaggtgagtggtgtcctatccacaacccacagtctggcccccgcttctgttggcttctctccatctcaacctggggaagtcctcatcagtaagaggctgggggcagttaggtgaagcctaatagcagtctcaagtgtgagtgatgacccagcgtgtctgcatgcacagactgagtgcagggttgttcagcacagaactgttcataccataaataacccaaatgtcctgctgaaggggaatggttggctaaattggcataactccatatgatgaaataacttggggctattaatcatatagctgcaagtatagagaaatatagttaaatgacatgaaaagatgtaaattatagagtgacaagtggagaaaatattagttgtagcccagtatggatggtataatactatttttacttaaaatatatttctttttttctttttctttttttttttttgagatggagtctcgctcttgtcgtttaggttggagcgcaatggcgcaatcttggctcactgcaacctccgcctcccaggttcaagcgattctcctgcctcagccaccaagtagctgtgattacaggcgcctgccaccatgtatggctcatttttgtatttttagtagagacggggtttcaccatcttggccgggctggtcttgaactcctgacctcaggtgatcctcccacctcggccttccaaagtgctgggattacaggtgtgagccaccatgcctggcttacttacaatatatttaaatatgtgcacataagggaaaaaacctggactaatatgtagcaaaagattaggaataatatataacaaaatctggaatatatataataatatataacaaaataatagtaattctctctgggttgttggcattatgggtttttccatattttttgaatagtagatacatacgttgcttgttttaaaaaccagaccagatgtgtctgtccctccctttgtatctggatagatacagagggggtgcccaaagggaaaggcaggttttcactgaccttgggaagccctgggaacctccaaggtgggcccttctccaagctggctcttgagtctgacgggcctgcctcccgctgcagtgtgccgcatactaagtccctggagagccgcatcaaggaggagctaattgcccagggccttttggagtctgaggaccgccccgcagaggactccgaggatgaggtccttgctgagcttcgcaaacggcaggctgagctgaaggcacttagtgcccacaaccgcaccaagaagcacgacctgctgaggtgagcgttagcaggatgcacagtcccgggggtggccttggaggctgtggccacggctagtcacctttcaggggttttacaacaggctttccaatcctggctggcctctaaatcacctggagagcctcgaaaaaaacagcagtggccagtccaccgggtatgtcccaaacaaattctgattccacagagtggggctcaggcatctgtgactgaccgattgatttgatttgtttttgttttgtttttttttgagagggagtctcgcactgtcacccaggctggagtgcagtggcatgatctcggctcactgcaagctccgcctcccaggttcatgccattctcctgcctcagcctcctgagtagctgatactacaggcacccaccaccacgcccagctaatttttttgtatttttagtagagacggggtttcaccgtgttagccaggatggtctcgatctcctgacctcgtgatccacccgcctcggcctcccaaagtgccgggattacaggcgtgagccactgcgcctggcctagtttggttttttaattatggtaaaggcataatataaaatgtatctccatgggaggctgaggcaggagaatcagttgaacctgggaggcggaggttgcagtgagctgagactgcaccattgcattccagcctgggcaacaagagtgaaactgcatctcaaaaaaaaaaagaaaaaaaatttacgcttcttaaccatttttaagtgtacagtttagtagtgttacccatattcacattgttgtgtgatttattttttgtcttttcatgcttcttttctttttatccccaaagttttgttattaaaaatttgatacacacagaaaatctgaaagaatcatacaataaacatcagtatattctccacctagactaattaactgttaacattttgttggagatctgtgatttttatttgctcatcacaagaaattgaccagtgttttaggacatgttcttttgggaatccatcacagtgcctgccattcatttgatgtcaactcccatccatcttgttctgcattgatcacgagggtataggtgacatcttgaggaagactgtggaatagctaccctttaggtaaagagatagggaagcaacccgaacaagtctctttgcttctcacagacaagtgctgtgtcttaacttcatagagccctgacaggacagggcacattcattcatttggccttttttttttttttttgagacggtgtctcactctgttgcccaggctggagtgcagtgccatgatctcggctcactgcaacctccgcctcccgggttcaggcagttctcctgcctcagcctcctgagtagttgggattacaggcatgcactaccatgccaggctaatcatttggccattcttactgtctcttagatattgtgctgggggccagcaagagaggcagagcaagggacttgcagattactagcagatgatcagtaaagataagtgccattaaaaggagaggtagttgctgacaagctgccagggtatttaaggataagagtgactaatgtatgctgagggcctactgtgtgtcaggggctttatgtacactctctcaagtgtcttgacaacaacccaggagggaggagctattttcgttgtttaccagatgaggaaataaaggcccagtgaagcgaaatgctctgctgaaggtcacacagtcaataaacagcaagctgagacttgaacctgtggttgaatcaaagcctctttctataatagtttgttttctctgaaaggtgagaagaagaaaacacagatggaagaggcactgagggaagcagagggagagagaggaagagagagaaaagcaggcatgtgcagttacagaagtagtgggccctagctgggcctggtggctcatgcctgtaatcccagcactttgggagactgaggtgggaggcttgtttgagctcaggagttcgaaactagcctgggcaatgtagtcagacccccttctctactaaaaatttttaaaaatcagctaggcatggtggcacatgcctatagtcctactcaggaggctgatgtgggaggattgcttgatcctgggaggtagaggctgcagtgagcttgatcaggccactgtactccagcctgggtgacagagtgagacctgtctcaaaaaaaaaaaaaaaaaaaaaaaaagaagtaatgggcaatgaagaaatggcttgcagctctcaggaaaccagagcacagcccttaccctgctgcagagcagctgcaaggccttaagcagcccctgacctgagcatctccttccccttctggaaaactggcaggctggactcaatcactaagtgaccttccagctccaccatcgatgaaatgtataaatcagaccctgttcagagagattgatctggtgtctcacccacctcctgtcagcctcaggctgcctagaccttagggggctctggaatgcagatgccgacgtaagcaggccttctgctggcaccggaacacctgaaacaacagtgtttaaaaacaagagtttggccccagcctgctccagatctccccctcactaactgtgggatcctgggatcatctttgagcctcattttcctcacgggtaacatatgaataatagtacatattttgcagggttgttaggattaactgaaagacagagagagagagtgggtgtgcctgtgtgtgtgtgtttgtgtgtgtgtatgtatatatatatatattttagagacagggtcttactctgttgccgaggttggtctcaactcctggcttcaagtgatcttcctgcctccatctcccaaagcgctgggattacaggcatgagctactttgcccagcctactgtgtatatttttaagacctttttttttttgaagacacagtcacgctctgttgcccagactggagtgtagtggcatgatcatagttcactgtaaccttgaactcctggcctcaagcaatcctcagctcccttggagttgggactacaggtgtgcactaccacacccagctaattttttaaattttttgtagagacagtctcactatgttgctcagactggtctcgaactcctgggctcaagtgatccttctgccttgggctcccaaagtgctgggactgcagatgtgaacccccatgtgcagccaagactttattcttctagagcagttttaagttcacaacaaaattgagagaaaggtacagagaattcccgtatctccctgtccccacatgtgcacagcctcccccgtgatcaacatgagttaatatttttcaggagcttaagatagtgccatgtaagtgtaggtcagtaactgctttttggtcacgactgtatgacacaatccacaggcatgccagcctgggctggtgggtaggctcggtcttgaagagggaggggttgttctctggaggtgggctgaccctggcacctggctggctggtccccacaggctggcaaaggaggaggtgagccggcaggagctgaggcagcgggtgcgcatggctgacaacgaggtcatggacgcctttcgcaagatcatggctgcccggcagaagaagcggactcccaccaagaaagaaaaggaccaggcctggaagactctgaaggagcgtgagagcatcctgaagctgctggatgggtagccctcacccctgcctcaggctgattatctggcctaggggaggggaagggaggcccacttccttctttgggcacaggaaacattggcctgtggctgtccctcaaatggcggcagtctctagagggccgtggcccttcccctgaggtcttttggcctagctctgtacaaccaggacacaggaagccctgctgggctagcctgaggcctagtctctgcttggtccccgagatggggttggaggggacttcgtttctgggtcttcctcttcccctctttaccatcccccactccctaatcccctacccctgtctccccttcaaggacttctcccttgtggttttgtaaagtgcaaacttaagaataaagtgactgctgtggtttttcaaaaaaagca

SEQ ID NO: 5827 - DNA, 690 bp, Homo sapiens
cagtggggaggaaggaaccagtgtgggtggtaaggtttgtggggggtatgcttggtggctctcagcccatggccactaacccatggcattcagtcagggagaactttctgagtacctctttctgaggatacttgtggctgcacgtaacaatgcccccccagctcaaagtggattcacagtaaggaaatgtgttggctgcaggatgggcagtcctgggacagagtggccttcacggttagccaatctagcaattcttcagggtcatcaagggtccaggtttcttttttttttaatttaagttctagggtacatgtgtacaacgtgcaggtttgttacatatgtatacatgtgccatgttggtgtgctgcacccattaactcgtcatttacattaggtatatctcctaatgctttccctcccccctcccccaagggtccaggtttcttaggggtcaccacactgccctccacagtgtcgacctctgcctaaggtgagtccttctctggctgtagtgtggcagtggagcagttggggccagatgcttcctcatttacatccagcacaggagggagccggagccagcgggcttccatggcccatctacagaagcaagaagccttttcccagataccatcatgtttcagtggcccaaactcagtctcacatgcccattcctcagtcactgtggca

SEQ ID NO: 5828 - DNA, 627 bp, Homo sapiens
acagagcaagactccgtctccaaaaaaaaaaaaaagatataaaagtcacctcacgcctgtaatcccaacactttgggaggctgtggcaggcagatcatctgaggtcaggagttcaagaccagcctgaccaacatggtgaaacgccgtctctactaaaaatacaaaaattagcctggcacggtggcatgcacctgtaatcctggctactcgggaggctgagccaggaaaatcacctgaactggggaggcatcggttgcaatgagccaagatcgtgccactgtattccagcctgggtgacagaaggagattccatccattaaaaaaaaaaaagccgggtgcagtggctcaagcctgtaatcccagccctttgggaggccgaggcgggcagatcacaaggtcaggagattgagaccatcctggctaacacggtgaaaccccgtctctactaaaaatagaaaaaattagccgggcgtggtggcgggcgcctgtagtcccagctgctcgggaggctacggcaggagaatggcgtgaacccgggaggcggagcttgcagtgagctgagattgcgccactgcactccagcctgggtgacagagcaagactctgtctcaaaaaaaaaagaagata

SEQ ID NO: 5829 - DNA, 423 bp, Homo sapiens
ggctggagtgcactgtcgcaatgttggctcattgcaacctctgcttcccaggctcaagagatcctcctgcctcagcctccagagaagtgggactacaggcatgtgccaccatgcctgactatttttgcatatttttttggtagagatggagtcttgccatgttgcccaggctggtcttgaactcctgtactcaagcgatctacccacttcagcctcctaaagtgctcggattacaggggtgaaccactgcaccaggcctccagattaaattttaaaggggaaaaagatatttatgaaatggaaactagataagagaaaatcattcaaaatatgaagtatttggattagggggtcagagtgtctaggctggtaggtaaaaaaaaaatccctgatcattacattagaaaagtatggagatgggaa

SEQ ID NO: 5830 - DNA, 690 bp, Homo sapiens; identical to SEQ ID NO: 5827

SEQ ID NO: 5831 - DNA, 13646 bp, Homo sapiens
gaggagagcgtctgcctgaatctcatcctgcagaaggtatggggtgggatgggtggggctgcggattggccctgtgggatggctgacccctccctgcacgctgacccgtgctctcttccagctggactacatggtgacctgtgcggtgtgcacacgtgctgacggcggggacattcacatccataagaagaaatctcaggtgagccctggcacgagagcccccagcctcctaactgccagttcaggctgggcgtggcagagagagacaagtcctcctgcttgcttctctgccctggaggtgaggggtctgactccagaaatctgctcagctcctgggatcccgtatcccattcgaggagcacagaaccagcttatcccccacatctcctggtaggtctctggctttggactggctctgggccgggtggcctccctatactggcttggactggctctgggcctgtgtgccgggtggggcctcacttgtcctccaaatctgctttcttccagcaagtgttcgcgtcccccagtaaacaccccatggacagcaagggggaggagtccaagatcagctaccccaacatcttcttcatgattgacagcttcgaggaggtgagctctgcacagggcctctctccttagcttccccttctcgtgagatgggtgttaggcgcttctccccgcggccttagccttgcagaaaggcatgggtggcttggagccgggaagagtccggctgaggcagatgtggctctctctcttcccagtgtttgcttgtgggcaggtgaatttccccggcgcagcctccgtttcctcctctgtaaaatcagtgtcatgatcatctgtcctacttactgtcagggctgaagactaaaaggctcctgagtgggaggacgcctcataaactcttgcaagaagcactgcccgggcgggaggagccattattaatgctagtaaatgataaagaagcgcctccacgcctgcactgacttggaatcctaggatgtcaaagagggatggggtttccggagttatctgggccaagcctttgttttaaggtttgggaaacgggcttgggcagaaggagactcaccgagaaacacagggcactgggagggcggggagggagccggtcgcagctcactccctgctctgcccatttgtgtctctcctctgttgaggccctggtcggggtccttgtgcgcatccaaggtgctcagggccctgaggacttaggaggaaggcgtgggcgtctgcaggaaaatcgcaggctcagggaggtcatgtcccctccccaggcacacgtagctcctagagggcagagctgagatttgcgtctaagtctttgtggcctcggagctcacagtctgtgcaccaggtcctgggagcaatgactcgggaaggtggcaggatggggcctgtggcaccttagtctggtgttgtcaccccaggtgggcagtcaccctgccaccacactgagcctttggccacacaggagcctcaaagatgtggcaggcagggctgggcacccctaggcggtgtggaggggcccagacggtggctgacggtcctggtgaaccgtgatgagggtgtgcgtcttctgccagtcccagagtctccgtaagcgtccctgtcctcccctgctgctcagcccctgccccagtgtgaggctgttcttgtcctgtggggctcggagggcatggggccacaggagtgtgtgacagccggttgtcccctgcaaaatggggttttctgagcagccctccctgccagttgggccaggctgtggtgtgggcggtgggagctgatggtcacgtccctgtctctttgtgtcctggcccaggtgttcagcgacatgaccgtaggggaaggagagatggtctgtgtggagctggtggctagtgacaaaaccaacacgttccagggggtcatctttcagggctccatccgctacgaggcgctcaagaaggtgtatgacaaccgggtgagtgcggggcggcctcacgggtgttcttctgggcccggggacggcggctccacagcccaccgtggtccataccatggggccccccagcctgcttgtgcatggtagcggccgccaggggtacctgcagcccctccgggctccttctaggcgctccctggtcctcttaacgtcattcttcatggtcggcctcagcccatgcgggccacttgccttcatctgaaatgtgagcgggaacttcctcctcagtctctagttccctgggaagtgatggctgatggtgtcgctgtcacctcctcactgtcacttgcttcctgcgactggccctgggagtgctccgagtcgcccccaactaagcaagcagatgtgggcaggcccctctcccccagcgggcaccatccgcagccagccttgctgccagcctggggccctgtcctcagcctggtccgtggttcatggggcggtgggaggggcaccaggaggggcaccaggcagagatgtgggtccattccagctgccccgcctgccagctcagacgctccctcccgggcagcccccgctccttgagggatggtcgccctggctgttcatgtcctggggaggggccccatggagccatcgccacctccctgactcaggctgccccgcgccggcccccaggtgagcgtggccgcccgcatggcacagaagatgtcgtttggcttctacaagtacagcaacatggagtttgtgcgcatgaagggcccccagggcaagggccacgccgagatggcggtcagccgagtgtctacaggtgacacatccccctgtgggactgaagaggactccagcccagcttcgcccatgcacgagcgggtaagggctgcacagctgggggcgggggctcccatccgtcaagttcactttccaccgtctcccccgtgctcacggccccctggggacataggtgttgtcatccccaaccaccagtgcgcaggccgaggtgccgagcgtgcggaggcccggaccacccagcccttctctttgcctagcggtttgtaggaggcactgccgcaggggaggcgttcctgccttgcagacctggagggctgtgcctggccaaggtcacaccgcaggctggtgctgggccagagctctttctgcctccctgagatgccacaaagccaggctgagtccacagagccagtgggcagaagagactggctggggacccaggcccggccctggcgcctgcctgggtggacctgctgggtgagcgtgggcacgtggccggccttccccggtgagtcagatggggatgatggtgactgagggtcagccagcgcatgcagaggcctaggccacccagctctttgccccgcggtttgtaggaggttctgctgcaggagaggcgttcctgcctcgcacagccggaaaccagacttgccagcttgccccaggtcacaaggtctcttgggatagcactgggcttggggccctgctctgcctaggccactctccttccccagggcgggaggctgaggtcagcagcagctttgttcccagaagcctttggtggggcacaggcaggagaaggtctccagcccactggctgctttgctctacctggttcttccagagggactgcccagagctgtagttcttggaagagtacaggtgtgctgggcaggggggtgcccttggcacaggtccaggggcagtcttgcccagccattgtccaggagagacgccacccacagccagaatcctgctctgctgctctcataaccttgggtgtgtctcttttcctctccaagcctcagttttctcatctagaaacagggcacgaggatacctgctccttcagtatttgggaggctttgaggaatccggggcttggccctcaggaggattcccaggtggcagctgcagtagttgctgttgacctacttggaaagcagaggcgtgggaatgtaaacgatgcattaccgcaggcatgcctgagatgagggagtgtgcgtttgttatacttttagttcgagaaagatctgaatcatgcatatctccgggtggtcagatgttggttttctttctcttctgtatatctttttttgggggggaggtatcttctgcaatgaatgtgttttgcaagccaaagacagcaagtgctattttttgcaaagatgggtgagaattccaggcaggggcctctcttgtctttggaatgaggtggtttatatttctgagtttgtttccgagataaagggcctggttcttctccctggtcctaaattatgccctgggactctgacaaaatgtgtgtgtgaaagtccttacgaagatgtggcccgagctctgggctggacaaacccgggtgccacctccagccacagcctgagggctgagtgactacaggtcactagacctgcctgagccttggttttcccatctgtccagcgggagtggctgtgaggggtgtgaaagtccctggtgccttagcagctgggcagccctgggattcaggaggagggatgtgctagggtcacacagggtcagcagcagggctggcccctggggactgccgcctgtgcgcctgctattacctgtctccttctctggcggggtcgtctggagccagtgcgtgacacatgctgactctgtgtattgtggttgctgctgtttgtttcttttatcttttaaaaaccttccccggcttgtgggaacaccgtctggagcccagcagctgccaggactttggtggatgtcggagccgtgacgaggaggctgacggggctcccgaagtctcagtcccagctcatcctgctcctcagattattgttggcatggggaggagggaggagatgggccaagttccctctggctggaacgcccttcccccccttcttcacctggcgaactcctactcgtccttcaagacccagctccagcggcatctcctccaggaagccttccctgatttcccaggctgtggatcccttttgcctctgtgcttcatgtatcctgtgcttctctttctctgtctccacagccagcatgctgtctatggttgtcactctctgagtctgtcaccccagcagactgtgagctccttgagggcagggacctgcaatgtgcctgtctgtccttagtgctgtgcctgcctggccctgagtgggtgtgaatgtttggtgaacagaaccaaacgtgattagaagtggggagaagacagaggcatagagctacttagcacagtatttcctgtgaagggtgctgggaatgagagggatggggccacgtcagccctgagaagtaggatgaggagcgtggccctgggggacagaagacagggctgctgccgtcctgcttggtgaccacaggcaagccagggtctcggtccctgccttagtttccccatgtgtcagatgggctgacgctagcccctgtctcacggagctggaggctcagagggtctgtgtgtggggccagtgctcactcagcgtcagcagctgttgttactttgtgcttgaacaccccctacccactgtttgaggcccagaggaggggggtctttctgccatttgcggcagcagcctggcccctcctcgggtagcactggtggccaggtgtcctgctggcccctgggctggaacgcatcttccagtctctaggccccacctagcacgggccggctgggcctgggtcctcctgggccagcggcctcttccctgggagctgtgtcaggttgtttgagggtgggataggaggggcgttgggacccccggggagggggctgttctgctactctggtgactttggctgcttgttcccaggtgacctccttcagcacaccccccaccccagaacggaacaaccggcctgccttcttctccccatccctcaagaggaaggtgccccggaaccggatcgctgagatgaagaagtcgcactcggccaacgacagcgaggagttcttccgggaggacgacggtggaggtgaccccccactccgtgccctagggtccccgtgcccttcagtctcttcttgatccagaccagtcattcattcatttattcattcattcatttgttcattcagcagcacttagagagtgggtgccatgtgccaggcagccctccaggagctgaggggtagagctggggacaggcagaaatggctgcctctgggggtcccgtcctggtgggctcaggcgtctccttggcagagtgcttggagcgcagatgtgcagcagttggtcagtttcaggggatttcccacctttctaaggcttttcagcctgcttaaggaagaaagcggatgggtgatctgatggctccgcacacacggggtgtggcgggagagaggagggcttccctcccttgcgctgccttgggccagctcgccctcagggtgaggcctggccctcctggctctgtgcagcctcccagaaccacgtgctctttggtgacacagtcgccacctcgtgcagcctacccccggggccttcctgtgcccctgtcccctggactccggttgtctgtatctgggtgttaccatgccccttagtcctgcccaggcacagtctgcactctctcctgagcacccgtgcctgctccctgtcctcgctcagtgaccttccagaatacaggagttgttcccagagcccccagggaggcctctgaggggttttaagcaagggagtgacacaatcagattagcatatttaaaatgccactcagcagtctctgtgggaaatggctcctggggacaggcgtggccgtcacagacaggttgggaagttctgccatgctctgctggcatggaccacgtgccttcctcactgtcatcctcaggacccagcgggcgcctggctccgcactgtgtgcgtgtctgttgagtgtatggaagtgaaggattggccaggcacagtggctcacccctgtaattccagcacttagcgagaccgaggcgggtggatcacctgaggtcaggagttcgagaccagcctggccaacatggtgaaaccctgtctctactaaaaatacaaaaaattagccgggcatggtggtgggcgcctgtaatcccagctactcaggaggctgaggcaggagaatctcttgaacctgggaggcagaggttgcggtgagccgagatcgtgccactgcactcgagcctgggcaagagtgagattccatctcaaaacaaacaaaaaaaaacgacgtgaaggattcgctgacaactcccactgagcacctcccccagcagggagcagggctgcagcattgatcagaagaggtggcagtctttgtcctgaccactgggaccaagaagcaggggtgtcccacctgctcaaggccctggcctgggtcagggactccagcactggcctcgacctgctcttgtgtgaacttgggcaagccccttccccacctgggcccgttcccgaatcagtaagaagtactgatcactgccctagtctgcctctctggggcaggttcccccagcctggaccgcaggactgggtaatggtgcaggtcggctcagccttgctgctcccatgctctgcaggtggcggtgcctagttccagggacagggcctgcagaagcagagaattacacagtgtgtgtgccagaacccccggaggagactaagcttgtgacagagaagagagagatgaggggggtggccaaagtcttcctggagttggaggcctgggtctgggccagaggaagcagggaggggtgttacaggcgaggaggcagcagctctggagcgtgtgggtgctggtgtgggggtgttggtaaggagcgtcctggcctcagcagagtttggcctcagcctggactgggagctggcctcctgctgctcccgccgcgtcccatgctgtgggggccttgacctggccttctttcctccagccgatctgcacaatgcaaccaacctgcggtctcggtccctgtcgggcacaggacggtccctggtcgggtcctggctgaagctgaacagagcagatggaaacttccttctctatgcacacttaacctacgtcacgttgccgctgcatcggattttaacaggtaatgctggcggatgtggggaagcagccgcaccttctcacagccagctctgcctccagggccttggtacttgtgagccacccggagtcatcccgccctgtcctgtcggttggttgggtttctttgcagggctcttggcctctttgtctcagactttgggtggagccgtagctttcccagagctgaagtcctccctttgttcacctttctggcgcacctgctgtcccctcttgagtggccacagatgcccaggtgtgtgttactcacgggcgaggggaggctctcaggccacctcgctgacccaggcctgcagcagctgtgacaggcagtggctctggcccccacaccagcttgcacctgaggccctgcagggtgtgccgttgctgcgagcccatttcccagtctgcagggtgaggatggtggagacacgtctcctctgcagtctgtgaggcctggagaggagatgcatgagtggctgaggcgggcttccttcagaagtggcactgccgtgaccatagcactcaccgctgttgagggttactgtttcacctgcttccctcctgccggccctagacatcctggaagttcggcagaagcccatcctgatgacctagccgcgtgcggagcctgcgcagagccccggccgggcccagccctcggagtgctgccaagtgcctacctgtccaccgccaccggggtctgcgatggcacgccagtgctggagccgcagccaggcgaggccactcgactcccggggccggggccgactccacgaacaccagcccaaactgaagtgcctcttccctcccctgctggcgctgctccgccctgtgccccccgcccatcgccccccacccatctctggagagccctctgcacccaaagaggactagagatgccgagcggccatgagagagagcggaaggagcagctgatgcccagagcggggccagagcggcgggtctatgttcacgtccccccagcagcaggcggaaccacccagccagggcactcagtgcattggactgtccacatgttcttgaggaaagccggtggaagattctggaatgccgtgcggatgaacttcagcacccgagtcagtcccagctcatcctccccagtttaccactttgttctaataggagatgggaacacgagaagtttgatggctttgccctgggctgggaatacctcacccacgcccagttccagaaaggcctccagctgagcagacggccccgatcccgccagaacggccttttgcttccagccaaagaacaccgccaacacgcacacctccaacctgggacatcccacgctgggcctcgcacggaggaacctgcagaatttggattctgagggtagtcgggaggcctcggtagccaggcagaacaggatatctgccaaagggtgtctgatgtggggtggggctggcatcctcccaggaaggttctaggtgggaccccgtcttctgggggcgggggtgtcttttcatcttccctggtttcctagaactcacttcctttgacggcgtgtgttggtcccatctctcagaccagctcactgaggcagaggagttgctcagaggctcacatgggcacccccattggttcgtgtgagcagctgcccagccccaggcctgccctcggcctggtccagcatgaaggcgtttccatctgcaaggatgcacggtaccctccccgagagcaggcctgtcccctacccaactgggaataaactggaagctgggtctctttgttgctatgtttttttgtttgaagttcccaggaatatttgaggggttccggtgatgtgtttagggatcttctctgtgggggaaaaggaagaggagggtcttgttctcccatctgtttattctttgggctctgggaacaggggactactttggggctttctccagacttttgtatgttgttattaaaagcgagctattgcatttcattctgcctcagtttgcccacctgtgaaatggggctgataccacctacctcactgaagtcccagggttcaagtgtgtggctgggtcagggcgtggtcacccgtcattctgcataggtcgggttggatgttagactcctgggatgccctcctccccctcgccctttgtaataacctaatctgagaccgtgcttggtggggggatgtgaactttctctctcccccagcagtgtctgctcaggcctgacagctcagctctgcacgatttcatgttcctaaacccatgtcttagggcagcacagagccaggtcatgtcatgccccaaagtgtggggacagagcctcagggagccccgagcatggtccagccccatttgagtgctctccggggatgccaaatgctgcttccaagtttgagtccatgtggctaaaatacacccatttcttcaggaactcttcccctggttgttctggggatcttgggagaaacacagccctgacagctcgtccgtgggaagatgaggcagtccaggttgtgaggagcacagcggcccgccctctgttctcagaggtgaggggcgggagaaggttgtctcctctggggccagcatttggccaagctcggaggcttggccagcactgctggatggctcagagcaagctgggctccccgtctgtaagatggcaaaaatgctgcccccctcacagggtgaccatgaggaccagtcacagtgatgtgtgaaagggctcgctggtcacagaaacgtgtacaaatcatgctattttagagatcagccctcaatttgtaaggcatgtgaacagggcacgcggtgggctggtggtttcatagccgacacacagcgcctaccatgtgcagctgcctgtccgaccccatcttacagacgagaaaaccagcacacaggcaccaaggaactgtccggaactaacagcaggggccggcgatgggagtcaaacccaggcacgcggcctggcctgcatgctgagccacatggtgctgtccggacagatggacagacactcggtggagtctgcctttctcaggccctaaatccctctccaaagggtacttgcgatgccggatttaaaacttgctcagagccacttagccacttgagaaccagacagtaaggtgttactcccaggtttgtttttccaaagtaacagatgacatgtggaataaagtaatagagtaacaagtggcagggccagaaccagggtccccaaagtcctggtgttggcacatttgtacttcttgtaagaccatctttaatttttctgggaacacacctgccttttgtgtaatgcggggaagactaatgcatggtgacacctagttttcctcaacaggacacttgatcccaaaacccctttaagaccttaggtttcctcagcggaaaactgtactttaatcccaaaccccctttaagacatattggggctgggcgcagtggctcacgcctgtaatcccagcactttgggaggctgagatgggtggatcacctgagatcaggagttcaagaccagcctgactaacatgctgaaaccccatgtctactaaagatagaaaaattagctggacatggtggcaggcacctgtaatcccagctactcggaaggctgaggaaggagaatcacttgaacctagtaggcagaggttgcagtgagccgagatcacgccattgcattctagcctgggcaacgagagcgaaactctgtctcaaaaaaaaaaaaaaaaaaaaaaaaaaaaaaaaaaaaaaagatacattggtctttaaacccaaaccccctttaaggcatgttggtctcaaggggatttgggattgaagcacagctttctgttgaggaaacctaggtgtcactttttagaacattaaaaagaaagttgtagggtgggcttttccatttaaaggaatgtgatgatcctaggttctgatgagtgataggtggtctccgtttataccctttcttcttttggcacctgtaagttccggtagtggccatcttacattctcatgtcctgctggaagtgcctagttgcctgcaaagccagctaaggcttattatttcaaaagaagattatttaaaacatgagtgacaggtagtcagaagagaacaaaaggacgcaagatactctatagccaagtcagcttggaggcaggatgggttgctgagtgaagtcgccgctcacttttggattcttatggactgtgagttagtcttccctctacacggagtcacaggaagggtataaatgcatgttcctgaggtgccctcccccaaagaatgtacctgcactcaaaccaggatctgtttttgctgttttaatcataaatagactagttagtagaagacttttgaagaacaaagtaaaacttttttttttcattaaaagatgtcccagaggaaaggccctgtgcagccagtatattctaatgactgcctggaccatgtcctaatatggtggttttaagttgttggccaaaatcctttaaagacatacgaaacatctgccaactttttagcgaacttaacaggtttcactgacgttttcctcaatttttgaatttaggtgggatttgctttcatgtcctgtttcaaaaaccaagtgtctcttgacagcccactggttcttcctgtcctcttgctctagtctgtatcagaaagcagaatgactgtacttttgttttacaaacaaccacctgataggacggacactccacgagataaggaaaggcacgtgcccttgagcttgaatggaagcagcctctggagggggcagccactgcccttcgagggagagcagctcttcagcagtggccagagtgccacgtgactctgcagatgacccctgggagccgggtgatgggcacctgctggggcttttgttttttctttttcactggctggcttgatcctcagtggcaaaaggacccctgagccccttctccgagccctggagcactcctcgggacaccgagtggcctcagggctgggttcagagctcctcccgcagggggagcctcagaagtggaggcagctgctgatgggtgagtttacaacttcttatcctgcctaaggcgagtaggcgtttttattccgtttccagtccttgagctcagcagatcaaaataacagtgaccctgcaaccccacagagcccgcgacacgctcgctttcttccccgccctgcccctttagtccccgctctggaaggccaggcagtttaggtgtaaataggtatcttttatggtttccaaatgaattatttgtgtgagagtaattaaatctgtaagaaaacctgttgagattcttcactatgaattatgacttctacaacatgtattttagcaaaaacacgatgctggcctccactggatagctcagtatgctgattgccagtgatagttctgtacgcgttaccaacagcgtctttattaaccctcttccacatccagtggaaatcattgctaggcggtatttgttggttggctgttagctttgctttatgatttcatgtttcttttaaaggttgttttgcatgttgaatattaaattttttttttctgtgtcttcctctaatctttttctgtaatgggaatttcagggtaaatacagatattatagcaaag

SEQ ID NO: 5832 - DNA, 7770 bp, Homo sapiens
ccggaaccggatcgctgagatgaagaagtcgcactcggccaacgacagcgaggagttcttccgggaggacgacggtggaggtgaccccccactccgtgccctagggtccccgtgcccttcagtctcttcttgatccagaccagtcattcattcatttattcattcattcatttgttcattcagcagcacttagagagtgggtgccatgtgccaggcagccctccaggagctgaggggtagagctggggacaggcagaaatggctgcctctgggggtcccgtcctggtgggctcaggcgtctccttggcagagtgcttggagcgcagatgtgcagcagttggtcagtttcaggggatttcccacctttctaaggcttttcagcctgcttaaggaagaaagcggatgggtgatctgatggctccgcacacacggggtgtggcgggagagaggagggcttccctcccttgcgctgccttgggccagctcgccctcagggtgaggcctggccctcctggctctgtgcagcctcccagaaccacgtgctctttggtgacacagtcgccacctcgtgcagcctacccccggggccttcctgtgcccctgtcccctggactccggttgtctgtatctgggtgttaccatgccccttagtcctgcccaggcacagtctgcactctctcctgagcacccgtgcctgctccctgtcctcgctcagtgaccttccagaatacaggagttgttcccagagcccccagggaggcctctgaggggttttaagcaagggagtgacacaatcagattagcatatttaaaatgccactcagcagtctctgtgggaaatggctcctggggacaggcgtggccgtcacagacaggttgggaagttctgccatgctctgctggcatggaccacgtgccttcctcactgtcatcctcaggacccagcgggcgcctggctccgcactgtgtgcgtgtctgttgagtgtatggaagtgaaggattggccaggcacagtggctcacccctgtaattccagcacttagcgagaccgaggcgggtggatcacctgaggtcaggagttcgagaccagcctggccaacatggtgaaaccctgtctctactaaaaatacaaaaaattagccgggcatggtggtgggcgcctgtaatcccagctactcaggaggctgaggcaggagaatctcttgaacctgggaggcagaggttgcggtgagccgagatcgtgccactgcactcgagcctgggcaagagtgagattccatctcaaaacaaacaaaaaaaaacgacgtgaaggattcgctgacaactcccactgagcacctcccccagcagggagcagggctgcagcattgatcagaagaggtggcagtctttgtcctgaccactgggaccaagaacaggggtgtcccacctgctcaaggccctggcctgggtcagggactccagcactggcctcgacctgctcttgtgtgaacttgggcaagccccttccccacctgggcccgttcccgaatcagtaagaagtactgatcactgccctagtctgcctctctggggcaggttcccccaggcctagactgcaggactgggtaatggtgcaggtcggctcagccttgctgctcccatgctctgcaggtggcggtgcctagttccagggacagggcctgcagaagcagagaattacacagtgtgtgtgccagaacccccggaggagactaagcttgtgacagagaagagagagatgaggggggtggccaaagtcttcctggagttggaggcctgggtctgggccagaggaagcagggaggggtgttacaggcgaggaggcagcagctctggagcgtgtgggtgctggtgtgggggtgttggtaaggagcgtcctggcctcagcagagtttggcctcagcctggactgggagctggcctcctgctgctcccgccgcgtcccatgctgtgggggccttgacctggccttctttcctccagccgatctgcacaatgcaaccaacctgcggtctcggtccctgtcgggcacaggacggtccctggtcgggtcctggctgaagctgaacagagcagatggaaacttccttctctatgcacacttaacctacgtcacgttgccgctgcatcggattttaacaggtaatgctggcggatgtggggaagcagccgcaccttctcacagccagctctgcctccagggccttggtacttgtgagccacccggagtcatcccgccctgtcctgtcggttggttgggtttctttgcagggctcttggcctctttgtctcagactttgggtggagccgtagctttcccagagctgaagtcctccctttgttcacctttctggcgcacctgctgtcccctcttgagtggccacagatgcccaggtgtgtgttactcacgggcgaggggaggctctcaggccacctcgctgacccaggcctgcagcagctgtgacaggcagtggctctggcccccacaccagcttgcacctgaggccctgcagggtgtgccgttgctgcgagcccatttcccagtctgcagggtgaggatggtggagacacgtctcctctgcagtctgtgaggcctggagaggagatgcatgagtggctgaggcgggcttccttcagaagtggcactgccgtgaccatagcactcaccgctgttgagggttactgtttcacctgcttccctcctgccggccctagacatcctggaagttcggcagaagcccatcctgatgacctagccgcgtgcggagcctgcgcagagccccggccgggcccagccctcggagtgctgccaagtgcctacctgtccaccgccaccggggtctgcgatggcacgccagtgctggagccgcagccaggcgaggccactcgactcccggggccggggccgactccacgaacaccagcccaaactgaagtgcctcttccctcccctgctggcgctgctccgccctgtgccccccgcccatcgccccccacccatctctggagagccctctgcacccaaagaggactagagatgccgagcggccatgagagagagcggaaggagcagctgatgcccagagcggggccagagcggcgggtctatgttcacgtccccccagcagcaggcggaaccacccagccagggcactcagtgcattggactgtccacatgttcttgaggaaagccggtggaagattctggaatgccgtgcggatgaacttcagcacccgagtcagtcccagctcatcctccccagtttaccactttgttctaataggagatgggaacacgagaagtttgatggctttgccctgggctgggaatacctcacccacgcccagttccagaaaggcctccagctgagcagacggccccgatcccgccagaacggccttttgcttccagccaaagaacaccgccaacacgcacacctccaacctgggacatcccacgctgggcctcgcacggaggaacctgcagaatttggattctgagggtagtcgggaggcctcggtagccaggcagaacaggatatctgccaaagggtgtctgatgtggggtggggctggcatcctcccaggaaggttctaggtgggaccccgtcttctgggggcgggggtgtcttttcatcttccctggtttcctagaactcacttcctttgacggcgtgtgttggtcccatctctcagaccagctcactgaggcagaggagttgctcagaggctcacatgggcacccccattggttcgtgtgagcagctgcccagccccaggcctgccctcggcctggtccagcatgaaggcgtttccatctgcaaggatgcacggtaccctccccgagagcaggcctgtcccctacccaactgggaataaactggaagctgggtctctttgttgctatgtttttttgtttgaagttcccaggaatatttgaggggttccggtgatgtgtttagggatcttctctgtgggggaaaaggaagaggagggtcttgttctcccatctgtttattctttgggctctgggaacaggggactactttggggctttctccagacttttgtatgttgttattaaaagcgagctattgcatttcattctgcctcagtttgcccacctgtgaaatggggctgataccacctacctcactgaagtcccagggttcaagtgtgtggctgggtcagggcgtggtcacccgtcattctgcataggtcgggttggatgttagactcctgggatgccctcctccccctcgccctttgtaataacctaatctgagaccgtgcttggtggggggatgtgaactttctctctcccccagcagtgtctgctcaggcctgacagctcagctctgcacgatttcatgttcctaaacccatgtcttagggcagcacagagccaggtcatgtcatgccccaaagtgtggggacagagcctcagggagccccgagcatggtccagccccatttgagtgctctccggggatgccaaatgctgcttccaagtttgagtccatgtggctaaaatacacccatttcttcaggaactcttcccctggttgttctggggatcttgggagaaacacagccctgacagctcgtccgtgggaagatgaggcagtccaggttgtgaggagcacagcggcccgccctctgttctcagaggtgaggggcgggagaaggttgtctcctctggggccagcatttggccaagctcggaggcttggccagcactgctggatggctcagagcaagctgggctccccgtctgtaagatggcaaaaatgctgcccccctcacagggtgaccatgaggaccagtcacagtgatgtgtgaaagggctcgctggtcacagaaacgtgtacaaatcatgctattttagagatcagccctcaatttgtaaggcatgtgaacagggcacgcggtgggctggtggtttcatagccgacacacagcgcctaccatgtgcagctgcctgtccgaccccatcttacagacgagaaaaccagcacacaggcaccaaggaactgtccggaactaacagcaggggccggcgatgggagtcaaacccaggcacgcggcctggcctgcatgctgagccacatggtgctgtccggacagatggacagacactcggtggagtctgcctttctcaggccctaaatccctctccaaagggtacttgcgatgccggatttaaaacttgctcagagccacttagccacttgagaaccagacagtaaggtgttactcccaggtttgtttttccaaagtaacagatgacatgtggaataaagtaatagagtaacaagtggcagggccagaaccagggtccccaaagtcctggtgttggcacatttgtacttcttgtaagaccatctttaatttttctgggaacacacctgccttttgtgtaatgcggggaagactaatgcatggtgacacctagttttcctcaacaggacacttgatcccaaaacccctttaagaccttaggtttcctcagcggaaaactgtactttaatcccaaaccccctttaagacatattggggctgggcgcagtggctcacgcctgtaatcccagcactttgggaggctgagatgggtggatcacctgagatcaggagttcaagaccagcctgactaacatgctgaaaccccatgtctactaaagatagaaaaattagctggacatggtggcaggcacctgtaatcccagctactcggaaggctgaggaaggagaatcacttgaacctagtaggcagaggttgcagtgagccgagatccccccattgcattttagcctgggcaacgagagcgaaattttgtctcaaaaaaaaaaaaaaaaaaaaaaaaaaaaaaaaaaaaaaagatacattggtctttaaacccaaaccccctttaaggcatgttggtctcaaggggatttgggattgaagcacagctttctgttgaggaaacctaggtgtcactttttagaacattaaaaagaaagttgtagggtgggcttttccatttaaaggaatgtgatgatcctaggttctgatgagtgataggtggtctccgtttataccctttcttcttttggcacctgtaagttccggtagtggccatcttacattctcatgtcctgctggaagtgcctagttgcctgcaaagccagctaaggcttattatttcaaaagaagattatttaaaacatgagtgacaggtagtcagaagagaacaaaaggacgcaagatactctatagccaagtcagcttggaggcaggatgggttgctgagtgaagtcgccgctcacttttggattcttatggactgtgagttagtcttccctctacacggagtcacaggaagggtataaatgcatgttcctgaggtgccctcccccaaagaatgtacctgcactcaaaccaggatctgtttttgctgttttaatcataaatagactagttagtagaagacttttgaagaacaaagtaaaacttttttttttcattaaaagatgtcccagaggaaaggccctgtgcagccagtatattctaatgactgcctggaccatgtcctaatatggtggttttaagttgttggccaaaatcctttaaagacatacgaaacatctgccaactttttagcgaacttaacaggtttcactgacgttttcctcaatttttgaatttaggtgggatttgctttcatgtcctgtttcaaaaaccaagtgtctcttgacagcccactggttcttcctgtcctcttgctctagtctgtatcagaaagcagaatgactgtacttttgttttacaaacaaccacctgataggacggacactccacgagataaggaaaggcacgtgcccttgagcttgaatggaagcagcctctggagggggcagccactgcccttcgagggagagcagctcttcagcagtggccagagtgccacgtgactctgcagatgacccctgggagccgggtgatgggcacctgctggggcttttgttttttctttttcactggctggcttgatcctcagtggcaaaaggacccctgagccccttctccgagccctggagcactcctcgggacaccgagtggcctcagggctgggttcagagctcctcccgcagggggagcctcagaagtggaggcagctgctgatgggtgagtttacaacttcttatcctgcctaaggcgagtaggcgtttttattccgtttccagtccttgagctcagcagatcaaaataacagtgaccctgcaaccccacagagcccgcgacacgctcgctttcttccccgccctgcccctttagtccccgctctggaaggccaggcagtttaggtgtaaataggtatcttttatggtttccaaatgaattatttgtgtgagagtaattaaatctgtaagaaaacctgttgagattcttcactatgaattatgacttctacaacatgtattttagcaaaaacacgatgctggcctccactggatagctcagtatgctgattgccagtgatagttctgtacgcgttaccaacagcgtctttattaaccctctcccacatccagtggaaatcattgctaggcggtatttgttggttggctgttagctttgctttatgatttcatgtttcttttaaaggttgttttgcatgttgaatattaaattttttttttctgtgtcttcctctaatctttttctgtaatgggaatttcagggtaaatacagatattatagcaaag

SEQ ID NO: 5833 - DNA, 139 bp, Homo sapiens
tcacacaaactacttttttgaactagagtgtgttggaggcagagaaaaatcaccctgtgtgctggctttgcctgccgtgagccagtgaggagtccgagaagaggtgggcaggtcagtgatgggtttggccagagatgcc

SEQ ID NO: 5834 - DNA, 661 bp, Homo sapiens
ccagtctcccaggagaggtgtagacatgctttggtttctctctgatatgtatttattattgatcttcagtaaatttgactctgatctgttaacatggggctaatgatacctgcattgcagggttgctttaaaaggattaataatttgtaaaatgtgtagcccagaccccgccgtccactaagagctcagtaggtgtcactattatcattgatgccacttagcaaatatgagctctttaaatcattatgacaactttgaggggaagatgcccttagtccattgtacagatgaagaaactgaggcttagtgaggagaatggatggcccctgggtcccatctcccgtcgctagagaactggggagcaagaattggagttctggccgggcatggtggctcacacctgtaatcccagtactttgggaggtcgaggcaggaggatcacctgagcccaggagttcaagaccagcctggacaacatggcgaaacgccacatctacaaaaagttttaaaaattagccgggtgtggtagcacgtgcctgtggtccctgttgcttgggaggctgaagtgagaggatcatttgagcccaggaggttgaggctacagtgagctgtcattgcaccactgctctctagcctgggcagcggtgtgagaccctgtctc

SEQ ID NO: 5835 - DNA, 139 bp, Homo sapiens; identical to SEQ ID NO: 5833

SEQ ID NO: 5836 - DNA, 86 bp, Homo sapiens
  SITE (21): n equals a,t,g, or c
  SITE (65): n equals a,t,g, or c
  SITE (74): n equals a,t,g, or c
  SITE (76): n equals a,t,g, or c
  SITE (85): n equals a,t,g, or c
taaaaaaaaaaaaaaaaaaanaaaaaaaaaaaaaaaaaaaaaaaaaaaaaaaaaaaaaaaaaaanaaaaaaaananaaaaaaaana

SEQ ID NO: 5837 - DNA, 130 bp, Homo sapiens
aaaaaaaaaaaaaaaaacaaaaagaaaaaaaaaaaaaaaaaaaaaaaaaaaaaaaaaaaaaagaaaaaataaaaaaaaaaaaataaaaaaaaaaaaaaaaaaacaagaaagacaaaaaaaaataaaaaga

SEQ ID NO: 5838 - DNA, 165 bp, Homo sapiens
gggggggttggtttaacaaaaaaaaaaaaaaaaaaaaaaaaaaaaaaaaaaaaaaaaaaaaaaaaaaaaaaaaaaaaaaaaaaaaaaaaaaaaaaaaaaaaaaaaaaaaaaaaaaaaaaaaaaaaaaaaaaaaaaaaaaaaaaaaaaaaaaaaaaaaaaataaaa

SEQ ID NO: 5839 - DNA, 143 bp, Homo sapiens
aagaaaagaaaaaaaaaaaaaaaaaaaaaaagaaaaaacaaaaaaaaaaaaaaaaaaaaaaaaaaaaaaataaaaaaaaaaaaaaaaaaaaagagaaacaaaaaaaaaaaaatagaaaaaaaaaaaaaaaaacaaaaaaggag

SEQ ID NO: 5840 - DNA, 116 bp, Homo sapiens
aaaaaaaataaaaaaaaaaaaaaaaataaaaaaaaaaaaaaaaaacaaaaaaaaaaaaaaaaaaaaaaaaaaaaaaaaaaacaacacaaaaaaaaaaaaaaaccaaaaacaaacag

SEQ ID NO: 5841 - DNA, 151 bp, Homo sapiens
aaaaaaaaaaaaaaaaaaaagaaaaaaaaaaaaaaaaaaaaaaaaaaaaaaaaaaaacaaaaaaaacaaaaaaaaaaaaaaaaaaaaaaataaataaaaaaaaaagagaaaaaaataaaaataaagaaataaataaaaaaaaaaaaaaaaa

SEQ ID NO: 5842 - DNA, 125 bp, Homo sapiens
  SITE (33): n equals a,t,g, or c
  SITE (49): n equals a,t,g, or c
  SITE (61): n equals a,t,g, or c
  SITE (90): n equals a,t,g, or c
  SITE (91): n equals a,t,g, or c
  SITE (116): n equals a,t,g, or c
  SITE (117): n equals a,t,g, or c
gttgtggaaaaaaaaaaaaaaaaaaaaaaaaanaaaaaaaaaaaaaaanaaaaaaaaaaanaaaaaaaaaaaaaaaaaaaaaaaaaaaannaaaaaaaaaaaaaaaaaaaaaaaannaaaaaaaa

SEQ ID NO: 5843 - DNA, 151 bp, Homo sapiens
  SITE (4): n equals a,t,g, or c
  SITE (45): n equals a,t,g, or c
  SITE (89): n equals a,t,g, or c
aaanaaaaaaaaaaaaaaaaaaaaaaaaaaaaaaaaaggaaaaanaaagaaaaaaaaaaaaaaaaaaaaaagaaaaaaaaaaaaaaaanaaaaaaaaaaaagaaaaaaaaaaaaaaaaaaaaaaaaagaaaaagggaaaaaaaaaaaaaaa

SEQ ID NO: 5844 - DNA, 118 bp, Homo sapiens
ggattacatactgttgccaactgaaggttggaataaacttgtcagctggtacacattgatggaaggtcaagagccaatagcacgaaaggtactgtttaataataactgactataaata

SEQ ID NO: 5845 - DNA, 195 bp, Homo sapiens
  SITE (3): n equals a,t,g, or c
  SITE (30): n equals a,t,g, or c
  SITE (32): n equals a,t,g, or c
  SITE (37): n equals a,t,g, or c
gcncccaatacgcaaaccgcctctccccgngngttgnccaattcattaatgcagctggcacgacaggtttcccgactggaaagcgggcagtgagcgcaacgcaattaatgtgagttagctcactcattaggcaccccaggctttacactttatgcttccggctcgtatgttgtgtggaattgtgaacggataaca

SEQ ID NO: 5846 - DNA, 1276 bp, Homo sapiens
ttttttttttttttgttgttgttgagatggagtctcgctctgtcacccaggctggagtacagtggcatgatctcggctcactgcaacctccgcctcccaggttcaagcgattctcctacctcagcctcctgattagctgagattacaggcgcccaccaccacgcctggctaatttttgtatttttagtagagatggggtttcaccatgttgaccaggctgttctcaaactcctgacctcaggtgatctgctcaccttggcctcccaaagtgctgggattacaggcatgagccaccatgcctggccaggcactgtgggttctacaggatgggtctgtaatgtcacggtgagggctctctctagtagtagatctggagtgaggtgtgtcttgggttgaggaggtggcttgactttcgaatgtaaaactgactgtgccttagcatcaccctgtccagtgcccctggggcagctggtagtgtccagaagaatggacacctgctccagatttagatgcccatctgggcttttgtttgatttgcggcgttcctgtcttctgtaaagctagtgagttgtcccaagagactgatgccacagcttgttcgcagtttacacaaactcagctttaaaattccaaatagaatctgacttgcaaactctagctgcagcatgtggagcttctagatgtttactaccttgaatggttgtcagtgtcactgaaccacaggggagaggagtatggggtagagcaatggtctgggccaaggaatggtgagcttagggtcttcctctgactccttactcctcaaggaggcagttagggtccctcttaagcaggcttctatttcttaccactaaattggtttcctttttcatccagaagttagaactccccagatattcacactataggatctgaattccgagattctaaaatatcttaaaccacaagagagaaaatctagttctgcctcagccccagtcagcaggccatctgtcccttcctctcctctgagtcagacagctctggcaagcaaggctccttggctagttcctaatgcactgacaggagccctcccattaaggacgacttctactcaaaatgcgactctccctctgaacttcagatgcctctgttagcaggaaaaggcattgattggattggatatatttatgtgactgcgggcatttgtggctgtagaatccgtgaccgtaatgttatatgtaatgggaactatcttataaacttgaaaaaaataaagtttttattttctatagtt

SEQ ID NO: 5847 - DNA, 487 bp, Homo sapiens
gagtggtacccccaccatgcacgcaagcacacacacacagatacttccctctccacccttttgggagctctttattttagaatgtaacttgaactcacttttatcattggcctttttcctcttactctgacttcctagcttagctctttccaaaaggaacttgaacttggccaagagaggtaaggaggctgagcagagcagtctttgctcattcctggttgttgccaccctcatttaaatggaagagagaaaacaggagcttcttggctgtttgccaaaatgaattgtccagggaacacagtgctctctgtaattaccctgcctttttctccaccccaacacaaaaatctggaaaggaaaataagtgggtaggattaagagctgttagaagctgaggaccaaaggacactgtgggtccattcatcaagggggagaccctcttcattagagtcctcatgaaattagccaaatgatgagtccttcccta

SEQ ID NO: 5848 - DNA, 8093 bp, Homo sapiens
caaaggcataagttgggagcgactgagccactccaggaggaggtgtgggcccacggcgtgttggaggtggagccacaggacctgtccataggttggatgctgtgtgggtgacagagagaaaccggggctcacggcctgggcagcgggacgggcggagtcgtcctcacctgtgctggggaccctgtgggagcagcaggcttccgagcacgtgctggaccccggcgtctccggctgcaccgagtggtcaggacattgaggccgggtcagggagcgtgagataccgggacgagcgggcccagggctgagcccagcggcgtccgggtgggcggtggcgttgagatgggaattgggaattgcaccggtggtctcaggaggatggaaaacccaagcagcagctgcaccaggaccgaggcaaagggaccgcagtttaacagaaaacccaaaacgagagcgagaaaacggccaaacacccgtgcgagtgagacgtccatgagccttcccggcaaaacgcccaataagggagaaggggcaggcgcggcgggggccggggttccctgaagtccccttcgtttccagaatccctaaagatcattccgccccccagggaggaaacccaagctccgccgagcgcggcgggtctgtgccttcgcttcgcttccagcctctcgcttccttctgacccgaccccgagttctttctccggacggtgtcgagaacccgggcgccggctggggctggagtctcgctggcctcggagcgcccccgagccctcgggcgacagcgaggcgaggacccaggtggaggcggccgggggcgcgggcggagggaggaggcgcgggagggaacccccggcccgcgggccccacccacagccgccccgggacgcagctcggggtccaggctcgagctttgctcactcagggcgcttcgtgcagggaacgccaggcccccggacgcgacccacgcggccgctgccagcggggaccgaggggagccggggccgcggccgcgagtccacgtcccgcccccgggcccggcccagcgaccgcccccgccgcccagggaccgcccccgcctcccagcgaccgcccgggccctcggggcggggaccgcggaccttcctggtggcgcggcagccgggcggctcctccttcctcccggccctggcgtggagcagagggacacaggttcccacgctggcgcccggcgaccgggtggggctgcggtgagtcccataggcccccgccccgcagctcccggccgccccggcccgtccccccagcccccggtcgccccatcctccctcccccacccgcgcctgccccagccgcctacacccccgagacccccacccgcccggcgccccggcagccccggactccctcccccatcccgcccagcgctccccccaccctccacacacgcccgcccccacgtgccaccaacagacgcaggtcccgaccacagagggtgggggcaagaccggggttgtggggggtgcgtttggaaagcagggttaggactggaattctaaggtagcaggagggagagacacactcaggggctcagctgggttcctggagatcaacctttggggtctgagcccctctgagagtcgagctcctttcctgcgaggccccgtctaggaggggcctcaggaaaatcggggctgcccagctggttccgcaactccccccagttctgagggaggcttcaggggattacagacggtctcaagagggaggcccagccagtcccgcggcccctgacaccccatcaggccgctcaggcccagcagctccatggaggacgccggcgaggaccccaccacgtttgctgcccactctctgcccagtgacccccgtctcttggccactgtgaccaacgcatacctgggcacacgagtgtttcacgacacgctgcacgtgagcggcgtgtacaatggggctggcggggacacgcaccgggccatgctgcccagccccctcaacgtccggctggaggcccctgcagggatgggggagcagctgaccgagaccttcgccctggacaccaacacaggtagcgccacctggcctgcctcacccctgccccaggcattgttccaggtcggtggggcaaccacagcatcgaatcccaccagcacctcctgagtttacacaggaagtctcactaagacaggaggccccagaggcccgcagggtccccccttccctccacctggaggcctcctgtgcagctgtagcgggaacgagcagccgagggcccagagggatccgcctcattgtggggagaggcagcggtcgggtggtccactcctgccccagagaggccatagcttggcaacccacctgccttcgcttctgcctccccaggctcctttcttcacaccctggagggcccccgcttccgggcctcccagtgcatctatgcgcatcgcacgctgccccacgtgctggctttccgagtgtccatcgcccgcctggccccggggagcgggcccatcacgctgctcctgcggtcagccttctccccagaaagcccagacctggacctgcatcagggtcctgacttccagggagcccggtaaggagggggctggatttgcagccagggagtccagggagggagctcatccctgaggcatggccacgctctcacaggtacctgtatggccacaccctcacccctgagcagcccggggggccacagcaagaggtacacatgctgtggacaccagcacccccagacctgacccttggggaaggtgaggaggctaggacgtgggacttcctgacagcagtgggcggcagccaggctgaggctcaggcctgcctcactgaggccctgcagctgcaggccaggggagctctgtatacggctcacgcacaggcctgggcccagctctgggtagaatgtggcttggacgtggtggggcccctgcagctgcgccaggccctgcgtggctccctctactacctgctcagtgccctgccccagcccaaggccccaggatacatctgccatggcctcagtcctgggggcctctccaatgggagccgtgaggaatgctactggggccacgtcttctgggaccaggtgagcactgtacacccagcaccagccacacagcaggcgacacatggaggtccacggtctctgccctccctgggaccagggctatggttggggaagcacagggactgtggcaaaagggaagaggcctggaaggtgtgcaggagtttggtagaggagtgatctaggtgaggggaatggaaggtgcagagaccagagctgagagggcctgaggcactttccagagcgtggggaggggcctccaccaaggcgagaagggctgcaggtccagatcaccagcgtttgtagacagtagtgtggcgcttggagtttacctgagggccagtggagctccagggacctatcaggacggggacctgtggggactgggaaggcctgtggggctgcgtggagcccggtactggaggccgacgggggtgacggggacgctgagggcacagagcggaggggcatgatggctgctgggcgtggaggtgtcgagagtgactgtgctggggctgctccatcgttgtctgagcctcccggtgctgccgctgtggccgtttctttgatgaggctctcagaggccgagtcattcactgccagcctgaagctgcccatgcgcatattcgggctggagcctctgaggccacacaaacgccggctggggaggcgaagtgtggggctgagcaccagaactccaggagcgtctgggctggagacagaactgggtgggcaggtggggagggcctgcagatctgagtgggcagccgaggaggaacccagaagacgccagcgatggagctctgccggggcggaatgtggccaggaggggcgggagcagtgacggcctgtccggcgctagaacgagggaccgtgctctcaggacctctggatgttcccgagtatcctgatgttccacccagaagccgccagggccatcctggagtaccgcatccgcacgctggacggggccctggagaacgcccagaacctgggctaccaggtgaggggacctggggcactggcccgtagggccctgcagggcctgcagcccccacacccctcccaggcctgtatccctctccccaggccccctctggacaaagctgggacatcctagattccccaccctgaggcttgtggggcctcagcagtgccctgcagcccgcacctgagagagaggaggtgggaaccgcagcgggctgggaccctgctttggcccaggaccccctggggtgcccttgctgccctgcaccagggtcagcactcggtgagaactgggcagaagccacctggccccgtgaggacgtgcagtgggccttctagcagtagcacccgccagggtacctggcgcaggccgagccccccctcctccagggcgagggcacgggaaagttggggggccaccgctcccctccaacaaggtcaagtctgccccctcccaacccctcagggagccaagtttgcctgggagagtgcagactccggcctagaggtttgccctgaggacatttacggagtccaggaggtccacgtcaacggggccgtggtgttggccttcgagctgtactaccataccacccaggtgaggtgctgcgtgcccaccattcctgcaagtgtggccaggcagctggtgtagcccccactcctcgtggcttcctgtttggggctggtcctgggaagctggctgaggacaggtgtctcaatgccaggccttgcttctgggcacagacaggccactaggaatgagagtgactggggccctggcctctgtgcctcctcctgctccccaggacctgcagctatttcgagaggctggtggctgggacgtggtcagggctgtggccgagttttggtgcagtcgtgttgagtggagccccagggaggaaaagtaccacctgaggggtgaggccatggtggggaggggctcggggaggaatggtggatgctcccagactcagcagatgattttcagacacctcacgtgtgccagccccacgctgaccaccggcgtggagggaaggcctctgagactctgcactgagcaccatcttggacttgtgtgtccaggagtcatgtcccccgacgagtaccattcaggggtcaacaactctgtgtacaccaacgtcctggtccagaacaggtcagacacaagatcccctcacctcaccccacccccgccccagctggagacctgccccggtgcccccactaggcaggcagcagctggaagtgtaggggttgcagcctcccccacctacctccacctccagcctgcgctttgctgctgccctggcccaggacctgggtcttcccatccccagccagtggctggcggtggctgacaagatcaaggtaccctttgacgtggagcagaacttccacccggagttcgatgggtatgagcctggtgagtggaccccttcaagggctcctcccctgccgtcgagaccctcgagtctgtcctggaacaccttccagtcagcggcacctccctgtaggagaggtggtgaagcaggcagacgtcgtgctcctgggatacccagtccccttctccctgagtcctgatgttcgcaggaaaaatctggagatttacgaggctgtgacgtccccccagggccccgccatgacctgggtgagcaccctggggctgtggagttcctaccccattggcctcagtcttctctgcccacgcagtgggcctcacccctgtgtgtcctcttacctctgaccccagagcatgtttgctgtgggctggatggagctgaaggacgcagtgcgggcccggggcctcctggacaggagctttgccaacatggctgaacccttcaaggtcagcctggccacacctgcctcccactgggccccttgtggtgggagtggagcccagcctcagagcaggcacagcagggtgcacccctggagcttcctgccggatcttgggacagcagcccagagaggacggtgacctgggggtcctggtgtcagctgcccttgcccctgcaggtgtggacggagaatgcagacgggtcaggcgctgtgaacttcctgacaggcatggggggcttcctgcaggcggtggtcttcgggtgcacggggttcaggtaagtgcagaggctggcagagggcagcccatgcccccacctgccacctcacaagcctctcctcccacagggtcacccgagcgggtgtgacctttgaccctgtgtgtctgtcggggatctccagagtgagcgtctccggcatcttctaccaggggaacaagctcaacttctctttttccgaggactccgtgaccgtggaggtcacagctcgagcagggccctgggctcctcacctggaggctgagctgtggccatcccagtcccggctctccctgttgccaggtagaacagcccccaacagcccaggtgcctgcgaccccaggctgcccctcacccccaggctgcctctctccctgcaggacacaaggtctcctttccccgctcggctggccggatacaaatgtcacccccgaagctgcctggaagttccagctccgagttccctgggaggactttttcagatgttagggacccgctccagagccccctctgggtcaccctgggttcctccagccccaccgagtcactcactgtggaccctgcctctgaataatcaggaacggtggcttcagagacgtctcttgggccttccctctggccacgtctgcacccacccctcctgggcaccctcctagcctgccatccctcacctgcagccaggctctcagggaaggtccatgctgcttggcctgagttcaaggctttctgcctgtagcctggactcccgtggacccccgtgggcaggtggcttccccgtggcatctccacaccgcctctgcctgcccctgtggactgatgctatcgcgcaccgtcccacgaccccaccccgagctcctgaagccggggtctgagcctgcatcacctctggcctctcatcccccactctcctgagagcagtggtcacagcggccggccgctctgctgagaaggcagagaggcaggctcaggcctcagcgtggacagcagggataaggggcacgaaggacggggactcggccccttcagaattcctcaggactctcaggtgcagctttgccaaaaaggaacttttcatgtcatgcagttgaggggacttagtctcaatcccaggctcctcttgactctgggcagctttaatcaggttgggcagcctctgctacagcgtggggtgggatggctctcttccctcagccacgccgcttgtgaggacagaggtgggggagtgggaagtgggaagtcaccagagaacaggagagggatttgagggcgagaccccagcgctctccacggaccagccagagggactggagccaggtgtgcatgggttcaaggccctggccctgcccagcctttgtcttgggagctcagccccagggttcggtcgtcagcagtttcccaagaacaagatgtgatggcatctgctgctgaaaccctgatgaggaccaggccccctgcaccgctgtcagcctgaggaattaaagctttggtgctggggagagcattattcctctgaggagccgctgtgcttccttctgaagtgagggccgtgccccgggtcccatttctcctttcacttgagtcgggaagcacagcaactttaaggctcgcgcccagcaacatggctcccctcgcatctgcatctccctcctgctctggtgttgccgctgcaccctgtcctcggaggacagcagaggtttggacggagactcagggagggagggaaggaggcaaggacgcctgtggaaacatctttcaggcagctctagggtctgggggccaggatgcctgggtctcccaaggcctgtctgctgtctctgccaccctcagcggctgccagaagcagcgtgtgggggaggcatgtgctgcagcacacctgcggccgagaccagcactcagaggtcggctcccctgacaggaaccgtgtagggtgca

SEQ ID NO: 5849 - DNA, 245 bp, Homo sapiens
tgacgactgggcatttgaaaacccgaaggagtgagggggcaagccccaaagaggtcttgagaaaaagggcttcaggcaattatgctgccagagcaagccaggcggggagcttggaaagctccagaagcagcaaggaagccaggtagcgacagcggagtaggggagggggaggagatgaggtcagggaacccaggcaggtgcaggaaggggtttgcgggtggagcttgcgtgcttggaaagctcca

SEQ ID NO: 5850 - DNA, 947 bp, Homo sapiens
ccagagccagggtgatgtgggcacaggtgtcaagtcagggtggtcggtagccttgcgcccgcaggagagatatggcctgaagcctgctgcacgtgcgtgccacacgcgtgtggggccacctctgcacatcctgaggtgacccttttgggggggtcgtgatggtcagtgcacgtgtgccggcagggctggtcagggttcatcgcctgcccaggagcctgagcctgaggcagggaggtgctggtgaccgttcccccaaggtggctcacccacagcaccgggaatggaccaggtcgtccctgcccctcagtaagcctggggactggcagaccgtctcttttctggggacacgtatccagccacacatgggctgaccccctcccagtctctgcacccgacacagtttgatcccttctcaggccaatcctgaggctcagggctggcacactgtctctatcccaaggcaagcacaggtgggcacactgcccttgtccttggtccactgtgggactggtcctgtctgtctccagcgcccagcatggcctccacacacctctgcctccagggctggctgggcctgccctcagagtccctgccacgccagccgttggctgcaggcatatcacagataggggatgctgcccagggctccgagtagaccaaaagattcctgcccacagcccaggaagagcaggcaggcaacggcgattccccgggaagggaagggccccggagtggggtgctcagaaccctgggccactgtgctgttaaccaccacctcccggcaatggctggcctcagcgaggccccagggcctccccgcagcctcgcagtgtgcatgtccctggccctctcccatcaccaggctgtggtgggtgtgtggggaggctgtggtacacaacgcaggtaaaataatatgagaacatgcacccagcaccaggggactcaga

SEQ ID NO: 5851 - DNA, 660 bp, Homo sapiens
ggaaaccccggagcatgtttagaagatgacaatataatgatcattatgttagtcatgaaatgggaagaatctatcatttggcaccatttggtactgtgtgccaactctggcttaagcattttgctcatattaccctgtaaggtcaataattattatccccattttgctgtagagaaaactgagtattctgatacaactttaactttcctggggtcaaaaaaattatcagtatcactaggatttgaactccaggtcaatctgattttaaagcatgtactcttaagcattagaacagtggttcttttgactgggcatggtggctcacacctgtaattccagcactttgggaagccaagggtggcagattacttaaacccaggagtttgagaccagtccaggcaacatggcgaaaccccatctcaacaaaaaatatttaaaagttagacaggtgtggtggcatgcacctatagtcccggctactcaggaggctgaggtgaaaggattacttgaacctgctaggtagaggctgcactgagccaagattgtaccactgcactctagcctgggcaacagagtgaaattctgtctctaaaaaaaaaaaaaaaaaagagaaagaaagcaagaaagaaaagaacaaaagcaaaaacaaaaacaaaaaaa

SEQ ID NO: 5852 - DNA, 664 bp, Homo sapiens
ggaaaccccggagcatgtttagaagatgacaatataatgatcattatgttagtcatgaaatgggaagaatctatcatttggcaccatttggtactgtgtgccaactctggcttaagcattttgctcatattaccctgtaaggtcaataattattatccccattttgctgtagagaaaactgagtattctgatacaactttaactttcctggggtcaaaaaaattatcagtatcactaggatttgaactccaggtcaatctgattttaaagcatgtactcttaagcattagaacagtggttcttttgactgggcatggtggctcacacctgtaattccagcactttgggaagccaagggtggcagattacttaaacccaggagtttgagaccagtccaggcaacatggcgaaaccccatctcaacaaaaaatatttaaaagttagacaggtgtggtggcatgcacctatagtcccggctactcaggaggctgaggtgaaaggattacttgaacctgctaggtagaggctgcactgagccaagattgtaccactgcactctagcctgggcaacagagtgaaattctgtctctaaaaaaaaaaaaaaaaaaaaagagaaagaaagcaagaaagaaaagaacaaaagcaaaaacaaaaacaaaaaaaa

SEQ ID NO: 5853 - DNA, 420 bp, Homo sapiens
tgcctgtggaattttctacaactttcctctagttccattagttacctcctaccccaggactgggcttgataagcctcatgagaggctgagtagatatttaatctctagactaagcctattgatttcctactttctgccacttggtcaaactttggtctccttttataataatgttcttatataataaacttgcattctttcctttttcttccccagaatactgacctttcatacttttaggaactgtggatcagtatttaaaggcaagattttgatcttcaaaaatttttttctccttcttaggcaccagactcttacagttcatgagttagaaactcaagaacaaatacaatactttggtctttctggttctataggagtgagagagagagtgatgtctgcattctacaaatactagcc

SEQ ID NO: 5854 - DNA, 420 bp, Homo sapiens; identical to SEQ ID NO: 5853

SEQ ID NO: 5855 - DNA, 1218 bp, Homo sapiens
gtcaccttctcctcctttccctgctgggggtggcaggggtccctttaccccctcattcttgacccttctccagggatgcttgtgacctccttaccccaccccccatcacctctctgtcctgaagtgagggtttgtcaccgtccatggcaaggtgtggtgtctggtaggctctatgacctgccttctctcagggtgtttattctgcagcagagaggggtctgcggtctgagtgtaatggtggaaatccaggcttccttccatggcccaaggaggcctttccggagcaacagggttttcctgggactcagcctggcttttgttaaggcaggtcccggatttactcagaagatgggccccagagaggaggagaggaaaggaatacctgtcagtcaaacgtgaagcccactgatgacactgcctggcagagctgcctccggtcagcagtgacccttcaccccccagctcccaagtcctcttcctgagggagctggtccggctttatggaaggctccgcctgtgttcccccactgggtccctggtccctcacctgtcacgtggggcgatggtcaccctccctccctgcctgccctgaaggatacactgagatgaaggtcaggaaatctgctggctgcagaaccaggggccatgcaggagtgagggatggtctggtcaagttgaggctctgccccagcctcagtttccccacacaggcatgagactgtcttcctgactttcagaggacagggctgagatgggatgagggaacacagggaaagcgtttagcacctctgagtgctgtgtggatgcgacctggggggtcctggcctccactctttaattctatctggactgtgtgccctcctacctccagtttccctgcgggggcctttcacagggcctggcttgcggatacggggtttggcgtagggcagtgcttctcaaatgggaaggcgcactgggattcttcaggttggggtggggcctgaggttctgcatttctaatcagttgcctaggactggctctaattcttgttgaatttacaatcacttgtggagttaagaaaaacatactgggccttggttgggtgtggtggctcacacctgtaatcccagcactttgggaggccaaggtgggcagatcatgaggtcgagagattgagaccatcctggccaacatggtgaaaccttgtctctactaaaaaaaaaaaaaaaaaaaaa

SEQ ID NO: 5856 - DNA, 142 bp, Homo sapiens
gggcagtggctcacacctgtaatcccagcactttgggaggccaaggcgggcggatcatgaggtcaggagatcgagaccatcctggctaacatggtgaaacctcgtctctactaaaaatacaaataattagccgggtgtggtg

SEQ ID NO: 5857 - DNA, 151 bp, Homo sapiens
ggtggcaggcgcctgtaatcccagctacttgggaggctgaggcaggagaatcacttgaacccgggaggtggaggttgcagtgagctgagattgcaccattgcactccagcctgggcaaaaagagcgaaactctgtctcaaaaaaaaaaaaa

SEQ ID NO: 5858 - DNA, 7712 bp, Homo sapiens
agggatctgcaaagacttggagaacttcaatctgaattggcaggagtagctgatttctctgccacctatcttcgctgtcaactacttctcatcaaggttggtttgcatccattccatttatgattgtgttgctaaaaatgcatctttgtggatccagcagtgtgtgaggccataagttataaaacttatggtcttaatgcaaccacttgacaatggagaaatatgtactctgcagtgtgattacatttgtctctaattaacgaaatattaactcataggaatttgtaaatttggggagaattcttttatcataatataattagagcagattggataatcattttagttagaatcccaaggttgtaaatgttttgtataatttgattagcaaaggaattgtatgaagttttagactatcttcttaaaatgctcatttgaaggccaggtgcggtggctcacacctgtaatcttagcactttggcaggccaaggcaggaggatcgcttgagctcaagagtttgagaccagcctgggcaacatagcgacacctcatctctacaagaaaatttaaagtaggcaggtgtggtggtgcattcctgtatatccagctactcggctggagttgggaggactgcttgagcctaggaggtcaaggctgcagtgagattgcactccagcctggatgacagaccaagatcctgtctttaaagaaaacaaacaaacaaacaaacaaaaaaactcactgcacttcatcaaagttaaaaggttgatttcattgcttttaaaaagaccagcttgctggcgtttcttactcagtagtcagctatacacagaattggtacccaagaatctatttagttttgctgagttaaaaaacaattaaatgagttcagtatctttcagcttctgtagcagaattttactataaattttggcacagaatttaggagagcccttctcacttgacgaacttttatcttggccctagttcaaagtgttctttgttttcaaagtgattaatgatgtttggctaaagtcagagtaaatcagggagtcaaaagttattttctactgtgtgaacttgtgctaaatgttatatttacagttgtgcaggtgtgcctatacatgtaaaggtgcgtatgtatacttggcacttaaatggtccttgttaggctagatatgttctttctaatgtatatatctgtgtaatcaccaccataggcaagtcgtagaacattttcatcactccaagaagttccttcctgcccctttgcaaggttgtttggcttttccaagcctctgtgaaaccccaggaattcaaggaggccatggagaagaatccacttttctatagtagcaaaatatgggtgaggaaagagaagtgattactcctaaaaagaacacataattgttggttattcaatgacaaggggtgacagtgtaggtgaggggcccagagccagaacccaaggcaagtgtgtttaataacaggaaaaaagctaaataaattttggtacagctacctagcagtatattctgtagtcagtaattctttatgaagaattatacaacaacatgacaaaatatttagggtgtaatgttatgtacccaaaagaaggggagccaatcataatcccaaaagatagtccagaacatcatagtcctaaactgtttaaattccaaaagactaaaatccctaaggtctaaaatcccaaaaaccacagcccagaaaatatcaaaatccccaaaatataattatggaagaaataatttaaaaaatttaaagatatttattttttaaaggggaatttatttgagaaacataaaaacacaacagaatactttatacatcacttaatataataaaacagacaataacaacatacatttttgcaagcataaacactcaggttactaatgacagttgggtgggtctaacagttatgagcagatgagccatatttataaagaaattggtcataaagggaaaggtataaatgcatatcactttggttgttaattgtgtatacccagctttttaactgtggtcatctgaaatactgtgcccaacaacctcaagtcttttgacgagattgatggaaactgtgctgggtcaccactgcatatgcagtcacccaaagagctgagatctcaagaaattttatctttcacaaatgcagatgtacgaaaaggatatctcatttatcgaggaagtttcaacattttgtgtacacactcaatgcttatacacaaagtcagtattgtgatgatgcactttcatggagtcagatttctgatatccaagcagcagaacccagagagtccgttttgctaatatgccatttttttttttttgagacagagtctcagcttatcatccaggctgaatacagtggcgtgatctcggctcactgctgcaacctctgcctcttgggttcaagcaattctcctgtctcagtctcccaagtagctgggattacaggtgtgcaccaccacgcctggctaatttttgtatttttagtagagacagggttttgccatgttggtcaggctggtctccatctcctgacctcaggtcatccacccacctcggccttccaaagtgctaggattacaggcatgagccaccactcccagcccatttcgtcttaagtatttgttctctcctggccactggctgattggatggtgcccgccaacattgagggcagatagtctccacttagtacactcagatttatacactaatctcttctggaaacactctcatagacacaccctcaatgtgtaaaacaaaataatcttttaccaggtttctgatattccttaatctagtcaagctgatatctaaaattaggtccacaagtccaccccttgtcagcttggcactcatacgcatctccttaagccatatttaatttccaaataaagacaataacatggtaatagttgtgcctaacatgatacaactaacatgatgcaactatcctgcatacaacccaaaacacgctaatcacttccccagaatttggatgtgaggatttcaacatttgggattgtatgttttgggattatgatctaatccccaaacttaattctgctttctgactacaactgtcaaaaaacatgcatacaagaaatgattagaagtaaatattccagaaattcctatagtttttatctacagtttagacctaccactgtttaatttgatagccaccagatacatgggactcttgagcactcaaaaagttgttagtccaaactgagatgtgttattaagtgcaaaatacacactggatttctcagacttagtatgaagagaaaatgtaaactaattaataatttaaaaaatactgcatggtgaaatgttaatatcttggatatactgggttaaataaacttttttaaaaaattaacttagtctttgtatcttaaaattaacttacatctttgtaatttaaaaaccgtggctacgagaatatttaaaattatatatagctcatgttatatttctattggacagtgttagtctaggttttctgtaatgtcatttgattacatctgtaattcagaaggactgagaaaataagaggctgtcacagaagtttgtgcaagggatgaggtcatgtggatggataggtgaggagagagatggaaggtaaaatcatggctcttagtggtggttttgaatgtagaaagattgaaagagggagaaatctaggaaagctgcttgatttctagttgaatatgttgataaagtggttggggcttacaacataatgagcataggggaaaagaaaaaagaaccacagttaaggaagaagtatctaggtggcttgggttagtccagtagctctgggaacaaggagtgcctagagcccggaagctggcttgcctgcgcattctggtgaagctttcgtggttcctgtcctctgcttccagaagcactgatctgggacacagagcctttgggccaagaattggatcaaatgggtgggaattcatttagcccaaaccattggtctcatctttctccataatagatacagcttattgggttaaaagaataagatcaattgagaagtcatgttcatgggagactttcaaaggaaaacaaaaatgtaaatcccaaatgataggccagtctttgtgacctcggtattctgttccctcctgatttgtctgcgtaggccttgcaggaaaagttgtggaatgtagctgcccctttgtatttgaagcagagtgatttggcctcagcagcagcgaaacaggtaagcttattcagaccttcccttcaaataggtctctgtccagtaattgtctggtccaagacagagccagaggccttcctatagctctgtctgtgtaggccttgcaggaaaagttgtggcatgtagctgcccctttgtatttgaagcagagtgatttggcctcagcagcagcaacacaggtaagcttattcagaccttcccttcaaataggtctctgtccaggaattgtctggtccaaggcggagccagaggccttcctgtagctctatacctctgctgtggcctccctaatttcaggctatgacagaagttagtgatatgagaaggagcataactaggagacacagcactcactttggactcaggggacctgggtcctagtcccaggtcttcctctgatttgctgagtgatattgagcaagttacttaaattccctggattttttctcttctataaaatgtggcagttgggccgggcgcggtggctcacacctgtaatcccagcactttgggaggctgagatgggcacatcacttaaggttaggagtttgagaccggcctggccaacatggtgaaacgctgtctctactatcatgaatctttcatctgaaaatgtagcccaactcagttaaggttgtttatatctttagcctgtaccatctcttcaacgttaaaaggtcctgggtagttcattaagtaggctttaattttatttgtctctagtttatttctttttagctttgagtcattcccctttgcacctgagtattgagacttggtgatctcttgcaggtcaagtcttccagatagggagtctgtaaatgacccaggaggaagctaatgatggtgactgttattgttacattacagttcactaaatgatttcaagtctattagcttaattaaccctcataataatcccattagataggaataagtattaagtctgttttagagatgaggcagttaaggctcagcaaggttaaattcatagagctataggtaatacagtcaggacttgagaccagatcctctgatacccagaatctgttttctactacagtgctgaactcttgtctgatccagactctttctcagacctggtatgtggcttattgtagaagagtagaatttaatgactagaacccgataattgagccacattggaaggatgggaccagggagcaataatttggaaggaaaagaggaaaggaattaccattgctgtataccagatactgtgataaacacattgcatgctccatttgatacttgaaacttcatgatattggtactgtttcttccctgtttacagaaagggattgagacactcatgtaatttaacttgtcttattgccaattgtaagagagtctggagtcatttccgtgaccctagagtgttcactgggaggcaagcacagaaggaaaagagaagcatcattttgatgaaaatcgcttatttggatagaaccgagcaagatcggggacttgatctggggtcatagacaaatgttttcttgcacttatttctgtcccaaactccctcagaccaggcccatggaacagtctgtcaggataactaacatatggttaatagttcctgatgcttaattcttgaggactttgtggggattgggtttccatacataatatatattaatttgttcccacagcagagtgggcttcatttagggtaagaagcagtgctttcagtgctttgcagtttgcttagtgattaaactttcttatcttcacatcatcaactaagatgattttattaccaggtcagtcttctttttaagtaggcaaaataatttattctctttttacaaggcatactatactaatttctttcaacacttaaaagcataaggatgtaaaatctcagttaagagtttcacctaaggtcatttaacagtagaattctatgctgctctcaagtaagactatgatatttttattgattgttaattatctttcctttatagattatggaagagacctacaaaatggaattcatgtacagtggtgtggagaataagcaggtggtgattatacatcacatgaggctgcaggccaaagctttgcaacttatagtaacagcacgaactacacgagggtaagatgtggggttggccaaaatatgtggcatgttcctttcaaagatacttcaaatgcattcagacatcacacgaaagttaatgataagtgaaatgaaatttaggaaagactagctaaggaatgtgtgatctattcatttttttcagatattacaaattctgttgttggatcagattagacccttggaaatccaattgtgtctctcccttgctaaaaaccctctggtgactctccattacatatagcacaacactggactttatctggcaataaggacactctgtatcctcctacttgatagatttccttaagaatttagtgccagggaccactttttctgttctgaagggactaataagctttttctcaggcaataaggataaattaagaggatgtactgggaagtcagactactttgttcaaatcttgtcttttctacttactagttgtttggttatgaacctttctgtaccttgtttccctgtacaaaatgaaaatgaagacagcatctacctcatggcatttctatgaagaataaatgagataatacatgtaaaaacacttagcatggtacttgatacgtaataagagctcagtgtaattatatctgtaagactttcagataactggaatcgccacatttcattgattccaagatacacattttttattattgtaacttctctgaaatcagatattttgatggtgtcccatagtgttttttgtttcttactatttcataaaataaaggtgcatcttaagaatgatggcatcatagatttgatacaaaaaagtacttaggtgactcattgccagctcacagacatgtttgatgctcagtccagctcctgtgtcaaaaaaaaaaaagtgccatagagatataaatatgaatgcttaaacacagaaacatactaggtcagaaataacatcctgaaaaataaaatattttatttcttcacgtatcttgatagtgacctcataaagtcaaagaatcatttaatcttaaagatattcatatgtggccgggtgtggtggctcacacctgtaatcccagcactttgggaggccaaggtgggcagatcacgaggtcaggagatcaagagcatcctggctaacatggtgaaaccctgtctctactaaaaatacataaaattagccgggcatggtggcatgcaccagtagtcccagctactcgggaggctgaggcaggagaatctttagaacctgggaggtggaggttgcagtgggccgaaatcacaccactgcactccagcctgggcaacagagcaagactccatctttatataaaaaaaaaaaa

SEQ ID NO: 5859 - DNA, 1495 bp, Homo sapiens
gtaagactatgatatttttattgattgttaattatcttttctttatcgattatggaagagacctacaaaatggaattcatgtagagtggtgtggagaataagcaggtggtgattatacatcacatgaggctgcaggccaaagctttgcaacttataataacagcacgaactacatgagggtaagatgtggggttggccaaaatatgtggcatgttcctttcaaagatacttcaaatgcattcagacatcacacgaaagttaatgataagtaaaatgaaatttaggatagactagctaaggaatgtgtgatctattcatttttttcagatattacaaattctgttgttggatcagattagacccttggaaatccaactgtgcgtctcccttgctaaaaaccctctggtgactctccattacatatagcacaacactggactttatctggcaataaggacattctgtatcctcctacttgatagatttcctcaagagtttagtgccagggaccactttttctgttctgaagggactaataagctttttctcaggcaataaggataaattaagaggatgtactgggaagtcagactactttgttcaaatcttgtcttttctacttactagttgtttggttatgaacctttctgtaccttgtttccctgtacaaaatgaaaatgaagacagcatctacctcatggcatttctatgaagaataaatgagataatacaatataaaaacacttagcatggtacttgatacgtaataagagctcagtgtaattatagctgtaagactttcagataactggaattgccacatttcattgattccaagatacacattttttattattgtaacttctctgaaatcagatattttgatggtgtcctatagtgttttttgtttcttactatttcataaaataaaggtgcatcttaagaatgatggcatcatagatttgatacaaaaaagtacttaggtgactcattgccagctcacagacatgtttgatgctcagttcagctgctgtgtcaaaaaaaaaagtggcatagagatataaatatgaatgtttaaacacagaaacatactaggtcagaaataacatcctgaaaaataaaatattttatttcttcacttatcttgatagtgacctcataaagtcaaagaatcatttaatcgtaaagatattcatatgtggccgggtgcggtggctcacacctgtaatcccagcactttgggaggccaaggtgggcagatcacgaggtcaggagatcaagagcatcctagctaacatggtgaaaccctgtctctactaaaaatacataaaattagctgggcgtggtggcatgcaccagtagtcccagctactcgggaggctgaggcaggagaatctctagaacccgggagacggaggttgcagtgagccgaaatcacatcactgcactccagcctgggcaacagagcaagactccatctttataaaaaaaaaaa

SEQ ID NO: 5860 - DNA, 7713 bp, Homo sapiens
agggatctgcaaagacttggagaacttcaatctgaattggcaggagtagctgatttctctgccacctatcttcgctgtcaactacttctcatcaaggttggtttgcatccattccatttatgattgtgttgctaaaaatgcatctttgtggatccagcagtgtgtgaggccataagttataaaacttatggtcttaatgcaaccacttgacaatggagaaatatgtactctgcagtgtgattacatttgtctctaattaacgaaatattaactcataggaatttgtaaatttggggagaattcttttatcataatataattagagcagattggataatcattttagttagaatcccaaggttgtaaatgttttgtataatttgattagcaaaggaattgtatgaagttttagactattttcttaaaatgctcatttgaaggccaggtgcggtggctcacacctgtaatcttagcactttggcaggccaaggcaggaggatcgcttgagctcaagagtttgagaccagcctgggcaacatagcgacacctcatctctacaagaaaatttaaagtaggcaggtgtggtggtgcattcctgtatatccagctactcggctggagttgggaggactgcttgagcctaggaggtcaaggctgcagtgagattgcactccagcctggatgacagaccaagatcctgtctttaaagaaaacaaacaaacaaacaaacaaaaaaactcactgcacttcatcaaagttaaaaggttgatttcattgcttttaaaaagaccaacttgctggcgtttcttactcagtagtcagctatacacagaattggtacccaagaatctatttagttttgctgagttaaaaaacaattaaatgagttcagtatctttcagcttctgcagcagaattttactataaattttggcacagaatttaggagagcccttctcacttgacgaacttttatcttggccctagttcaaagtgttctttgttttcaaagtgattaatgatgtttggctaaagtcagagtaaatcagggagtcaaaagttattttctactgtgtgaacttgtgctaaatgttatatttacagttgtgcaggtgtgcctatacatgtaaaggtgcgtatgtatacttggcacttaaatggtccttgttaggctagatatgttctttctaatgtatatatctgtgtaatcaccaccataggcaagtcgtagaacattttcatcactccaagaagttccttcctgcccctttgcaaggttgtttggcttttccaagcctctgtgaaaccccaggaattcaaggaggccatggagaagaatccacttttctatagtagcaaaatatgggtgaggaaagagaagtgattactcctaaaaagaacacataattgttggttattcaatgacaaggggtgacagtgtaggtgaggggcccagagccagaacccaaggcaagtgtgtttaataacaggaaaaaagctaaataaattttggtacagctacctagcagtatattctgtagtcagtaattctttatgaagaattatacaacaacatgacaaaatatttagggtgtaatgttatgtacccaaaagaaggggagccaatcataatcccaaaagatagtccagaacatcatagtcctaaactgtttaaattccaaaagactaaaatccctaaggtctaaaatcccaaaaaccacagcccagaaaatatcaaaatccccaaaatataattatggaagaaataatttaaaaaatttaaagatatttattttttaaaggggaatttatttgagaaacataaaaacacaacagaatactttatacatcacttaatataataaaacagacaataacaacatacatttttgcaagcataaacactcaggttactaatgacagttgggtgggtctaacagttatgagcagatgagccatatttataaagaaattggtcataaagggaaaggtataaatgcatatcactttggttgttaattgtgtatacccagctttttaactgtggtcatctgaaatactgtgcccaacaacctcaagtcttttgacgagattgatggaaactgtgctgggtcaccactgcatatgcagtcacccaaagagcctgagatctcaagaaattttatctttcacaaatgcagatgtacgaaaaggatatctcatttatcgaggaagtttcaacattttgtgtacacactcaatgcttatacacaaagtcagtattgtgatgatgcactttcatggagtcagatttctgatatccaagcagcagaacccagagagtccgttttgctatattgcctttttttttttttggaaaaaaagtctccgtttatcatccaggctgaatacagtggcgtgatctcggctcactgctgcaacctctgcctcttggggttcaagcaattctcctgtctcagtctcccaagtagctgggattacaggtgtgcaccaccacgcctggctaatttttgtatttttagtagagacagggttttgccatgttggtcaggctggtctccatctcctgacctcaggtcatccacccacctcggccttccaaagtgctaggattacaggcatgagccaccactcccagcccatttcgtcttaagtatttgttctctcctggccactggctgattggatggtgcccgccaacattgagggcagatagtctccacttagtacactcagatttatacactaatctcttctggaaacactctcatagacacaccctcaatgtgtaaaacaaaataatcttttaccaggtttctgatattccttaatctagtcaagctgatatctaaaattaggtccacaagtccaccccttgtcagcttggcactcatacgcatctccttaagccatatttaatttccaaataaagacaataacatggtaatagttgtgcctaacatgatacaactaacatgatgcaactatcctgcatacaacccaaaacacgctaatcacttccccagaatttggatgtgaggatttcaacatttgggattgtatgttttgggattatgatctaatccccaaacttaattctgctttctgactacaactgtcaaaaaacatgcatacaagaaatgattagaagtaaatattccagaaattcctatagtttttatctacagtttagacctaccactgtttaatttgatagccaccagatacatgggactcttgagcactcgaaaagttgttagtccaaactgagatgtgttattaagtgcaaaatacacactggatttctcagacttagtatgaagagaaaatgtaaactaattaataatttaaaaaatactgcatggtgaaatgttaatatcttggatatactgggttaaataaacttttttaaaaaattaacttagtctttgtatcttaaaattaacttacatctttgtaatttaaaaaccgtggctacgagaatatttaaaattatatatagctcatgttatatttctattggacagtgttagtctaggttttctgtaatgtcatttgattacatctgtaattcagaaggactgagaaaataagaggctgtcacagaagtttgtgcaagggatgaggtcatgtggatggataggtgaggagagagatggaaggtaaaatcatggctcttagtggtggttttgaatgtagaaagattgaaagagggagaaatctaggaaagctgcttgatttctagttgaatatgttgataaagtggttggggcttacaacataatgagcataggggaaaagaaaaaagaaccacagttaaggaagaagtatctaggtggcttgggttagtccagtagctctgggaacaaggagtgcctagagcccggaagctggcttgcctgcgcattctggtgaagctttcgtggttcctgtcctctgcttccagaagcactgatctgggacacagagcctttgggccaagaattggatcaaatgggtgggaattcatttagcccaaaccattggtctcatctttctccataatagatacagcttattgggttaaaagaataagatcaattgagaagtcctgttcatgggagactttcaaaggaaaacaaaaatgtaaatcccaaatgataggccagtctttgtgacctcggtattctgttccctcctgatttgtctgcgtaggccttgcaggaaaagttgtggaatgtagctgcccctttgtatttgaagcagagtgatttggcctcagcagcagcgaaacaggtaagcttattcagaccttcccttcaaataggtctctgtccagtaattgtctggtccaagacagagccagaggccttcctatagctctgtctgtgtaggccttgcaggaaaagttgtggcatgtagctgcccctttgtatttgaagcagagtgatttggcctcagcagcagcaacacaggtaagcttattcagaccttcccttcaaataggtctctgtccaggaattgtctggtccaaggcggagccagaggccttcctgtagctctatacctctgctgtggcctccctaatttcaggctatgacagaagttagtgatatgagaaggagcataactaggagacacagcactcactttggactcaggggacctgggtcctagtcccaggtcttcctctgatttgctgagtgatattgagcaagttacttaaattccctggattttttctcttctataaaatgtggcagttgggccgggcgcggtggctcacacctgtaatcccagcactttgggaggctgagatgggcacatcacttaaggttaggagtttgagaccggcctggccaacatggtgaaacgctgtctctactatcatgaatctttcatctgaaaatgtagcccaactcagttaaggttgtttatatctttagcctgtaccatctcttcaacgttaaaaggtcctgggtagttcattaagtaggctttaattttatttgtctctagtttatttctttttagctttgagtcattcccctttgcacctgagtattgagacttggtgatctcttgcaggtcaagtcttccagatagggagtctgtaaatgacccaggaggaagctaatgatggtgactgttattgttacattacagttcactaaatgatttcaagtctattagcttaattaaccctcataataatcccattagataggaataagtattaagtctgttttagagatgaggcagttaaggctcagcaaggttaaattcatagagctataggtaatacagtcaggacttgagaccagatcctctgatacccagaatctgttttctactacagtgctgaactcttgtctgatccagactctttctcagacctggtatgtggcttattgtagaagagtagaatttaatgactagaacccgataattgagccacattggaaggatgggaccagggagcaataatttggaaggaaaagaggaaaggaattaccattgctgtataccagatactgtgataaacacattgcatgctccatttgatacttgaaacttcatgatattggtactgtttcttccctgtttacagaaagggattgagacactcatgtaatttaacttgtcttattgccaattgtaagagagtctggagtcatttccgtgaccctagagtgttcactgggaggcaagcacagaaggaaaagagaagcatcattttgatgaaaatcgcttatttggatagaaccgagcaagatcggggacttgatctggggtcatagacaaatgttttcttgcacttatttctgtcccaaactccctcagaccaggcccatggaacagtctgtcaggataactaacatatggttaatagttcctgatgcttaattcttgaggactttgtggggattgggtttccatacataatatatattaatttgttcccacagcagagtgggcttcatttagggtaagaagcagtgctttcagtgctttgcagtttgcttagtgattaaactttcttatcttcacatcatcaactaagatgattttattaccaggtcagtcttctttttaaataggcaaaataatttattctctttttacaaggcatactatactaatttctttcaacacttaaaagcactaaggatgtaaaatctcagttaagagtttcacctaaggtcatttaacagtagaattctatgctgctctcaagtaagactatgatattcttattgatcgttaattatctttcctttatagattatggaagagacctacaaaatggaattcatgtacagtggtgtggagaataagcaggtggtgattatacatcacatgaggctgcaggccaaagctttgcaacttatagtaacagcacgaactacacgagggtaagatgtggggttggccaaaatatgtggcatgttcctttcaaagatacttcaaatgcattcagacatcacacgaaagttaatgataagtgaaatgaaatttaggaaagactagctaaggaatgtgtgatctattcatttttttcagatattacaaattctgttgttggatcagattagacccttggaaatccaattgtgtctctcccttgctaaaaaccctctggtgactctccattacatatagcacaacactggactttatctggcaataaggacactctgtatcctcctacttgatagatttccttaagaatttagtgccagggaccactttttctgttctgaagggactaataagctttttctcaggcaataaggataaattaagaggatgtactgggaagtcagactactttgttcaaatcttgtcttttctacttactagttgtttggttatgaacctttctgtaccttgtttccctgtacaaaatgaaaatgaagacagcatctacctcatggcatttctatgaagaataaatgagataatacatgtaaaaacacttagcatggtacttgatacgtaataagagctcagtgtaattatatctgtaagactttcagataactggaattgccacatttcattgattccaagatacacattttttattattgtaacttctctgaaatcagatattttgatggtgtcccatagtgttttttgtttcttactatttcataaaataaaggtgcatcttaagaatgatggcatcatagatttgatacaaaaaagtacttaggtgactcattgccagctcacagacatgtttgatgctcagtccagctcctgtgtccaaaaaaaaaaagtgccatagagatataaatatgaatgcttaaacacagaaacatactaggtcagaaataacatcctgaaaaataaaatattttatttcttcacgtatcttgatagtgacctcataaagtcaaagaatcatttaatcttaaagatattcatatgtggccgggtgtggtggctcacacctgtaatcccagcactttgggaggccaaggtgggcagatcacgaggtcaggagatcaagagcatcctggctaacatggtgaaaccctgtctctactaaaaatacataaaattagccgggcatggtggcatgcaccagtagtcccagctactcgggaggctgaggcaggagaatctttagaacctgggaggtggaggttgcagtgggccgaaatcacaccactgcactccagcctgggcgatagaacgagaatctgtctccaaaaaaaaaaaaaa

SEQ ID NO: 5861 - DNA, 1492 bp, Homo sapiens
gtaagactatgatatttttattgattgttaattatcttttctttatcgattatggaagagacctacaaaatggaattcatgtagagtggtgtggagaataagcaggtggtgattatacatcacatgaggctgcaggccaaagctttgcaacttataataacagcacgaactacacgagggtaagatgtggggttggccaaaatatgtggcatgttcctttcaaagatacttcgaatgcattcagacatcacacgaaagttaatgataagtaaaatgaaatttaggaaagactagctaaggaatgtgtgatctattcatttttttcagatattacaaattctgttgttggatcagattagacccttggaaatccaattgtgcgtctcccttgctgaaaaccctctggtgactctccattacatatagcacaacactggactttatctggcaataaggacattctgtatcctcctacttgatagatttcctcaagaatttagtgccagggaccactttttctgttctgaagggactaataagctttttctcaggcaataaggataaattaagaggatgtactgggaagtcagactactttgttcaaatcttgtcttttctacttactagttgtttggttatgaacctttctgtaccttgtttccctgtacaaaatgaaaatgaagacagcatctacctcatggcatttctatgaagaataaatgagataatacaatataaaaacacttagcatggtacttgatacgtaataagagctcagtataattatagctgtaagactttcagataactggaattgccacatttcattgattccaagatacacattttttattattgtaacttctctgaaatcagatattttgatggtgttccatagtgttttttgtttcttactatttcataaaataaaggtgcatcttaagaatgatggcatcatagatttgatacaaaaaagtacttaggtgactcattgccagctcacagacatgtttgatgctcagtccagctgctgtgtcaaaaaaaagtggcatagagatataaatatgaatgtttaaacacagaaacatactaggtcagaaataacatcctgaaaaataaaatattttatttcttcacttatcttgatagtgacctcataaagtcaaagaatcatttaatcgtaaagatattcatatgtggccgggtgcggtggctcacacctgtaatcccagcactttgggaggccaaggtgggcagatcacgaggtcaggagatcaagagcatcctagctaacatggtgaaaccctgtctctactaaaaatacataaaattagctgggcgtggtggcatgcaccagtagtcccagctactcgggaggctgaggcaggagaatctctagaacccgggagatggaggttgcagtgagccgaaatcacatcactgcactccagcctgggcaacagagcaagactcctctttataaaaaaaaaaa

SEQ ID NO: 5862 - DNA, 4403 bp, Homo sapiens
  SITE (1649): n equals a,t,g, or c
  SITE (1669): n equals a,t,g, or c
tagttttaaaaacttaaagatatttattttttaaaggggaacttatttgagaaacataaaaacacaacagaatactttatacaccacttaatataataaaacagacaataataacatacatttttgcaagcataaacactcaggttactaataacatttgggtgggtctaacagttatgagcagatgagccatatttataaagaaattggtcataaagggaaaggtataaatgcatatcactttggttgttaattgtgtatacccagctttttaactctggtcatctgaaatactgtgcccaacaacctcaagtcttttgatgagattgatggaaactgtgctgggtcaccactgcatatgcagtcacccaaagagctgagatctcaagaaattttatctttcacaaatgcagatgtacgaaaaggatatctcatttatcgaggaagtttcaacattttatgtacacactcaatgcttatacacaaagtcagtattgtgataatgcactttcatggagtcagatttctgatatccaagcagcagaacccagagagtccgttttgctattttgcgtttttttgttttttgtttttttttgtttttttttttttttttgagacagagtctcagcttatcacccaggctgaatacagtggcgtgatctcggctcactgctgcgacctctgcctcttgggttcaagcaattctcctgtctcagcctcccaagtagctgggattacaggtgtgcaccaccacgcctggctaatttttgtatttttagcagagacagggttttgccatgttggtcaggctggtctcgaactcctgacctcaggtcatccacccacctcgaccttccaaagtgctaggattacaggcatgagccaccgatcccagcccattttgtcttaagtatttgttctctcctggccactggctgattggatggtgcccgccaacattgagggcagatagtctccacctagtacactcagatttatacactaatctcttctggaaacactctcatagacacaccctcaatgtgtaaaacaaaataatgttttaccaggtttctgatattccttaatctggtcaagctgatacctaaaattaggtccacaagtccaccccttgtcagcttggcactcatacgcatctccttaagccatatttaatttccaaataaagacaataacatggtaatagttgtgcctaacatgatacaactgacatgatgcaactatcctgcatgcaacccaaaacacactaatcacttccccagaatttggatgtcaggatttcaacatttgtgattgtatgttttgggattatgatctaatccccaaacttaattctgctttctgactacaactgtcaaaaaacatgcatacaagaaatgattagaagtaaatattccagaaattcctatagtttatctgtagtttagacctaccactgtttgatagccaccagatacatgggactcttgagcacttgaaaagttgttagtctaaactgagatgtgttattaagtgcaaaatacacactggatttctcagacttagtatgaaaagaaaatgtaaactatctaattaataatttaaacgatactgcgtggtgtactgttatattcttggatatactnggttaaataaactttttaangaaattaacttagttctttgtatcttcaaaattaacttacatctttgtaatttaaaactgtggctatgagaatatttaaattaatatatagctcatgttatatttctattggacagtgttagtctaggttttctgtaatgtcatttgattacatctgtaattcagaaggactgagaaaataagaggctgtcacagaagtttgtgcaagagatgaggtcatgtggatggataggtgaggagagagatggaaggtaaaatcgtggctcttagtggtggttttgaatgtagaagattgaaagagggagaaatctaggaaagctgcttgatttctagttgaatatgttggtaaagtggttggggcttataacataatgagcataggggaaaagaaaaaagaaccacagtcaaggaagaagtatctaggtggcttgggttagtccagtggctctgggaacaaggagtgcctagagcccggaagctggcttgcctgcgcattctggtgaaggtttcatggttcctgtcctctgcttccagaagcactgatctgggacacagagcctttgggccaagaattggatcaaatggatgggaattcatttagcccaaaccattagtctcatctttctccataatagatacagcttattgggttaaaagaataagattaattgagaagtcctgttcatggtagactttcaaaggaaaacaaaaatgtaaattccaaatgatatgccagtctttgtgacgtcggtattctgttccctcctgatttgtctgtgtaggccttgcaggaaaagtcgtggaatgtagctgccccttcgtatttgaagcagagtgatttggcctcagcagcagcaaaacaggtaagcttattcagaccttcccttcaaacaggtctctgtccaggaattgtctggtccaaggcagagcagagcgcttcctatagctctgtctctgtaggccttgcaggaaaagttgtggcatgtagctgcccctttgtatttgaagcagagtgatttggcctcagcagcagcaacacaggtaagcttattcagaccttcccttcaaataggtctctgtccaggaattgtctggtccaaggcggcagacggccttcctgtagctctgtacctctgctgtggcctccctaattttaggctatgacagaagttagtgatatgagaaggagcataactaggggacgcagcactcactgtggactcaggggacctgggtcctagtcccaggtcttcctctgatatgctgagtgatattgagcaagttacttaaattccctggattttttctcttctataaaatgtggcagttgggccgggtgtggtggctcacacctgtaatcccagcactttgggaggctgagatgggcgcatcacttaaggttaggagtttgagaccagcctggccaacatggtgaaacgctgtcgctactgtcatgaatctttcatctgaaaatgtagcccaactcagttaaggttgtttatatctttagcctgtaccatctcttcaacgttaaaaggtcctgggtagttcattaagtaggctttaattttatttgtctctagtttatttctttttagctttgagccgttcccctttgcacctaagtattgagacttggtgatctctggcaggtcaagtcttccagatagggagtctgtaaatgacccaggaggaagctaatgatggtgattgttattgttacattacagttcactaaatgatttcaagtctattagcttaattaaccctcataacaatcccattagataggaataagtattaagtctattttagagatgaggcagttaaggctcagcaaggttaaattcatagagctataggtaatacagtcaggacttgagaccagatcctctgatacccagaatctgttttctactacagtgctgaactcttgtctgatccagactctttctcagacctggtatgtggcttattgtagaagagtagcatttaatgactagaacccgataattgagccacattggaaggatgggatcagggagcaataatttggaaggaaaagaggaaaggaattaccattgctgtataccagatactgtgataaacacattgcatgctccatttgatacttgaaacttcatgatattggtactgtttcttccctgtttacagaaagggattgagacactcatgtaatttaacttgtcttattgccaattgtaagagagtctggagtcgtttccgtgaccctagagtgttcactgggaggcaagcacagaagaaaaagagaagcatcattttgatgaaaatcgcttatttggatggaactaagcaagatcggggacttgatctggggtcatagacaatgttttcttgcacttatttccatcccaaactccctcagaccaggcccatggaacagtctgtcaggataactaacatatggttaatagttcctgatgcttaattcttgaggactttgtggggattgggtttccatacataatatatattaatttgttcccacagcagagtgggcttcatttagggtaagaagcagtgctttcagtgctttgcagtttgcttagtgattaaactttcttatcttcacatcatcaactaagatgattttattaccaggtcagtcttctttttaaataggcaaaataatttattctctttttacaaggcatactatactaatttctttccacacttaaaagcataggga

SEQ ID NO: 5863 - DNA, 389 bp, Homo sapiens
ttttttctttcttaagttttgctagattgttttcttttgtcctccaggggtttgaaagttatgcaccgtaattctaaacacttcaagtgagaggcagtagaacatactggttaagagggctgtggtgccacactgcttgggttcacatcttgactttaccatttgcaaactgagtaacccttggacaagttacttaacacttcttggcctcagtttgttcccataagttaaactgagataatagtagtacctgtctcttcctcacaggggtattgtaagggttattgaattattatatgcaaaaccatttatttattttatttatttatgagacagagtcttgctctatcacccaggctggagtgcagtggcacgatctcaactcactg

SEQ ID NO: 5864 - DNA, 952 bp, Homo sapiens
aacaaagatgaattgagcattaaaggatggtagcttcttgaactacctctgtgtcagcaaaggggatatgggagttagagtttgggaactaccagcccaacctactgggctccacctgttatgtttctgcacaaggacaatgcttttagcactgaagctcccaaagacaaagcattcctttcctgacccatatacctctatcctttcattcattcatccagcatttactgagaacttaactctgtgccaagtctcagtatttctaagcagtagcaatactgagatgaaccaaatgttccatggagtttcattcaggtaaggttagtgaaaatgtgcaaatatttgtagtaggatgagaagaaatggagttgaggatctcagaagacagagtgaataaacccaagtgggaaactgtcatggaagacatgctgttttaactgggtctcgaagtatgaaaatgaataggccttgaatgcagtggttgtagaaggggtaccttctaatggtagagatggtataggaaaagagctgttgaaattatcaaagagataacaaatgggcgagagaaagaagcgttttccagttcaggaagatgagacgttatggagataggaatgaaatttatatatttatgaaaggcatgggggccgggcacagtggctcatgcctgtaatcccagcactttgggaggccaaggagggaggattacctgaggtcaggagttcaagaccagcctggctaaggtggtgaaactttgtctctactaaaaatacaaaaattagccgggtgtggtgacatgcgcctgtaattccagctactcaggaggctgaggcaggagaatcacttgaacccaggaagtggaggttgcagtgagctgagattgtgccactacactccagcctgggcaacaagagcgaaactctgtctcaaaaaaaaggaaaaagaaaaaaaa

SEQ ID NO: 5865 - DNA, 1865 bp, Homo sapiens
ctttcaaaggaaaacaaaatgtaaattccaaatgatatgccagtctttgtgacgtcggtattctgttccctcctgatttgtctgtgtaggccttgcaggaaaagtcgtggaatgtagctgccccttcgtatttgaagcagagtgatttggcctcagcagcagcgaaacaggtaagcttattcagaccttcccttcaaacaggtctctgtccaggaattgtctggtccaaggcggagccagaggccttcctgtagctctgtacctctgctgtggcctccctaattttaggctatgacagaagttagtgatatgagaaggagcataactaggggacgcagcactcactgtggactcaggggacctgggtcctagtcccaggtcttcctctgatttgctgagtgatattgagcaagttacttaaattccctagattttttctcttctataaaatgtggcagttgggccaggtgcggtggctcacacctgtaatcccagcactttgggaggctgagatgggcgcatcacttaaggttaggagtttgagaccagcctggccaacatggtgaaacgctgtcgctactgtcatgaatctttcatctgaaaatgtagcccaactcagttaaggttgtttatatctttagcctgtaccatctcttcaacgttaaaaggtcctgggtagttcattaagtaggctttaattttatttgtctctagtttatttctttttagctttgagccgttcccctttgcacctaagtattgagacttggtgatctcttgcaggtcaagtcttccaaataggaagtctgtaaatgacccaggagaaagctaatgatggtgactgttattgttacattacagttcactaaatgatttcaagtctattagcttaattaaccctcataataatcccattagataggaataagtattaagtctattttagagatgaggcagttaaggctcagcaaggttaaattcatagagctataggtaatacagtcaggacttgagaccagatcctctgatacccagaatctgttttctactacagtgctgaactcttatctgatccagactctttctcagacctggtatgtggcttattgtagaagagtagcatttaatgactagaacccgataattgagccacattggaaggatgggaccagggagcaataatttggaaggaaaagaggaaaggaattaccattgctgtataccagatactgtgataaacacattgcatgctccatttgatacttgaaacttcatgatattggtactgtttcttccctgtttacagaaagggattgagacagtcatgtaatttaacttgtcttattgccaattgtaagagagtctggagtcgtttccgtgaccctagagtgttcactgggaggcaagcacagaagaaaaagagaagcatcattttgatgaaaatcgcttatttggatggaaccaagcaagatcggggacttgatctggggtcatagacaatgttttcttgcacttatttccgtcccaaactccctcagaccaggcccatggaacagtctgtcaggataactaacatatggttaatagttcctgatgcttaattcttgaggactttgtggggattgggtttccatacataatatatattaatttgttcccacagcagagtgggcttcatttagggtaagaagcagtgctttcagtgctttgcagtttgcttagtgattaaactttcttatcttcacatcatcaactaagatgattttattaccaggtcagtcttctttttaaataggcaaaataatttattctctttttacaaggcatactatactaatttctttccacacttaaaagcataggga

SEQ ID NO: 5866 - DNA, 1213 bp, Homo sapiens
cacgcctggctaatttttgtatttttagtagagacagagtttcatcatgttggtcaggctggtcttgaacttctgacctcaaatgatccacctgccccagcctcccaaagtgctgggattgcaggcatgagccaccacacctgggtacacattttattttttatcatggccctgtgcattgagtgcattgttcttgcccagttttcaggaagcagaaagaaaatacaggcaagaactgcaggactttgaattatctgcctagatcattctaagaattgaattgattatgcaataattggactccttttcctgtagattaactgaggcatgaggtggactgtctcctctggttactggaagaggacttcctgattgccttactttgaggcagccagggtgggggtcctcccgagagcatggggagggtcccagggggcccacttcagggttgcctttcatgaaaaacttgtcaaacctttgtacagatgtctttttaataacactcactgctttgcagatccaagtttggactctgggctgctccagtagtttgttggctctgtttatggtagcttaagtgcaaggtttttatgtagccagtaaggtctgtcccatggtcttgagtgaaatggggagcaggaaaacagaaagaaaggaaagtgccacgttgtagcaggggagggtcaggagaccaccttacctgggcattgtggggtgcaggggtgccagcagagcaggagcttacctggtgggcaggggcactgccacatcttgggagggagtatgtgtgtagtttgaaaaagcttacttaatagtttagatttggaaaatggaaaaaacatccttttgaaatgttaaagatcgttaaagaagtttgtgatattttcataaatcaaaatgtggcatatgttttaaaaaattgagaatagctggacacagtggcttgctcccataatcccagtactttgggaggctgaggtgggagggttgcttcaggctgggaattcaagaccagcctgggcaacacagtgagaccccatctctacaacaaaattttaaaaattagctgggcctggtagtgctcctgtggtgccagctgctcaggaggctgaggtgggacggggcctggaaagttgagactgcagtgaactgggatcgtgctactgtactccagcctgggcaacagagcaagaccctgtctccaaaaaaaaaa

SEQ ID NO: 5867 - DNA, 883 bp, Homo sapiens
cgcacattctcttgtccctgcccttgaccatgggtggcatcttggttttcttgcagtctgcatcactgtttgctttgtctttggagagagaattttattgagggaggaaatgttccagggtggatcagattagcatctctgtgaactttgtaccagggtagcgaaggaagtgccaaccccatctttttttcaagaacagaacaccctgggtgcttcaagcaaagtctgggaagcaacccagtgggagggaagacagtgctcttttctctgggtccccacactcaggtcaggcgatgcgagttgttacacttgttttcggtcacgctcggggtgctgcggttcacgtttcttttctattatggagttactgtcaccaggctcttactgttttaaataaagtcattttgcttacgctcaaataattacactcatccaaggcattcttcccttagggttgttgtttatagttatttgaaaagcagggacatactgagtctaacttgtagatctagtaaatgctgatatcaaaagtgatgttaacaactattcctaagactggacctggttggggctgggcgcggtggctcacacctgtaatcccagcactttgggaggcctaagcaggcggatcatgaggtcaggagatcgagaccgtcctagctaacacagtgaaaccccgtctctactaaaaatacaaaaaaattagccaggcgtggtggcgggcgcctgtagtcccagctactctggaggctgaggcaggagaatggcgtgaacccgggaggcggagcttgtagtgagccgagatcgcaccactgcactccagcctgggcgacagagcaagactccgtctcaaaaaaaaaaaaaaaaaaaaaaaccagactgg

SEQ ID NO: 5868 - DNA, 1490 bp, Homo sapiens
gttgtaactcttggtccttctctctctccttttctcttcccttccttccccttccatctttctttccacatgtcctttccttattggctcttttacctcctacttttctcactccctatcagggatattttggggggggatggtaaagggtgggctaaggaacagaccctgggattagggccttaagggctctgagaggagtctaccttgccttcttatgggaagggagaccctaaaaaactttctcctctttgtcctcctttttctcccccactctgaggtttccccaagagaaccagattggcagggagaagcattgtggggcaattgttcctccttgacaatgtagcaataaatagatgctgccaagggcagaaaatggggaggttagctcagagcagagtagtctctagagaaaggaagaatcctcaacggcaccctggggtgctagctcctttttagaatgtcagcagagctgagattaatatctgggcttttcctgaactattctggttattgagcccttcctgttagacctaccgcctcccacctcttctgtgtctgctgtgtatttggtgacacttcataaggactagtcccttctggggtatcagagccttagggtgcccccatccccttccccagtcaactgtggcacctgtaacctcccggaacatgaaggactatgctctgaggctatactctgtgcccatgagagcagagactggaagggcaagaccaggtgctaaggaggggagagggggcatcctgtctctctccagaccatcactgcactttaaccagggtcttaggtacaaaatcctacttttcagagccttccagctctggaacctcaaacatcctcatgctctctcccagctccttttgcataaaaaaaaaagtaaagaaaaagaaaaaaaaatacacacacactgaaacccacatggagaaaagaggtgtttccttttatattgctattcaaaatcaataccaccaacaaaatatttctaagtagacacttttccagacctttgtttttttgtgtcagtgtccaagctgcagataggattttgtaatacttctggcagcttctttccttgtgtacataatatatatatatacatatatatatatatttttaatcagaagttatgaagaacaaaaagaaaaaataaacacagaagcaagtgcaataccacctctcttctccctctctcctagggtttcctttgtagcctatgtttggtgtctcttttgacctttaccccttcacctcctcctctcttcttctgattcccctcccccccttttttaaagagtttttctcctttctcaaggggagttaaactagcttttgagacttattgcaaagcattttgtatatgtaatatattgtaagtaaatatttgtgtaacggagatatactactgtaagttttgtactgtactggctgaaagtctgttataaataaacatgagtaatttaacacc

SEQ ID NO: 5869 - DNA, 1490 bp, Homo sapiens; identical to SEQ ID NO: 5868

SEQ ID NO: 5870 - DNA, 1491 bp, Homo sapiens
gttgtaactcttggtccttctctctctccttttctcttcccttccttccccttccatctttctttccacatgtcctttccttattggctcttttacctcctacttttctcactccctatcagggatattttggggggggatggtaaagggtgggctaaggaacagaccctgggattagggccttaagggctctgagaggagtctaccttgccttcttatgggaagggagaccctaaaaaactttctcctctttgtcctcctttttctcccccactctgaggtttccccaagagaaccagattggcagggagaagcattgtggggcaattgttcctccttgacaatgtagcaataaatagatgctgccaagggcagaaaatggggaggttagctcagagcagagtagtctctagagaaaggaagaatcctcaacggcaccctggggtgctagctcctttttagaatgtcagcagagctgagattaatatctgggcttttcctgaactattctggttattgagcccttcctgttagacctaccgcctcccacctcttctgtgtctgctgtgtatttggtgacacttcataaggactagtcccttctggggtatcagagccttagggtgcccccatccccttccccagtcaactgtggcacctgtaacctcccggaacatgaaggactatgctctgaggctatactctgtgcccatgagagcagagactggaagggcaagaccaggtgctaaggaggggagagggggcatcctgtctctctccagaccatcactgcactttaaccagggtcttaggtacaaaatcctacttttcagagccttccagctctggaacctcaaacatcctcatgctctctcccagctccttttgcataaaaaaaaaagtaaagaaaaagaaaaaaaaatacacacacactgaaacccacatggagaaaagaggtgtttccttttatattgctattcaaaatcaataccaccaacaaaatatttctaagtagacacttttccagacctttgtttttttgtgtcagtgtccaagctgcagataggattttgtaatacttctggcagcttctttccttgtgtacataatatatatatatacatatatatatatatttttaatcagaagttatgaagaacaaaaagaaaaaataaacacagaagcaagtgcaataccacctctcttctccctctctcgtagggtttcctttgtagcatatgtttggtgtctcttttgacctttaccccttcacctcctcctctcttcttctgattcccctccccccccttttttaaagagtttttctcctttctcaaggggagttaaactagcttttgagacttattgcaaagcattttgtatatgtaatatattgtaagtaaatatttgtgtaacggagatatactactgtaagttttgtactgtactggctgaaagtctgttataaataaacatgagtaatttaacacc

SEQ ID NO: 5871 - DNA, 140 bp, Homo sapiens
cctgtagtgccagctacttgggaggctgaggcagaagaatcgcttgaacccaggaggcggaggttgcagtgagccaagatcgcaccactgcactccagcctaggcaacagagcaagactccatctgaaaaaaaaaaaaaa

SEQ ID NO: 5872 - DNA, 832 bp, Homo sapiens
taggatgtgatagatctggtccctctccttgaactacccctccacacgctctagtcccttcaacctaccggtctattaagtggtggcttttctctccttggagtgccccaattttatattctcaggggccaaggctaggtctgcaaccctctgtctctgacagattgggagccacaggtgcctaattgggaaccagggcatgggaaaggagtgggtcaaaattcttctctttctcctccacctctcaaacttcttcactatagtgaccttcctaggctctcaggggctccttcagtccccatcctatgagaaactagtgggttgctgcctgatgacaaggggttgtttcagcccctcagtcatgctgccttctgctgctccctcccagcaggattcaccctctcattcccgggctcctgggccctgttcttaggatcagtggcagggagaaacgggtatctcttttctctcttctaattttcagtataaccaaaaattatcccagcatgagcacgggcacgtgcccttcaccccattccacccttgttccagcaagactgggatgggtacaactgaactggggtcttcctttactacccccttctacactcagctcccagacacagggtaggaggggggactgctggctactgcagagacccttggctatttgagtaacctaggattagtgagaaggggcagaaggagatacaactccactgcaagtggaggtttctttctacaagagttttctgcccaaggccacagccatcccactctctgcttccttgagattcaaaccaaaggctgtttttctatgtttaaagaaaaa

SEQ ID NO: 5873 - DNA, 140 bp, Homo sapiens; identical to SEQ ID NO: 5871

SEQ ID NO: 5874 - DNA, 832 bp, Homo sapiens; identical to SEQ ID NO: 5872

SEQ ID NO: 5875 - DNA, 832 bp, Homo sapiens; identical to SEQ ID NO: 5872

SEQ ID NO: 5876 - DNA, 140 bp, Homo sapiens; identical to SEQ ID NO: 5871

SEQ ID NO: 5877 - DNA, 4401 bp, Homo sapiens
gccaccaaacatctcccaccgagttatttggtgggatttgcagggacttttctgggagaacttaaaggcccatagtaactgcgaatgaagcaatataccactaacctgcagaaaaacacaaacaaaaacagactcccactgtctccagaagtcgtggccttccagaacagtctgcccctcaaggaagggtggggcaggcagtacccccaagcaggctgctcccagaggtggggaacccttcataggaaatccccacccccgtccaccccagagaccctgcccttccacccggaggccaaaggccaactgtactcccaaaggcatgggagaaggttggcgagaagacccctgactaccacatccttgtgtttgcgtgtagagacgggggatagtgagaacctaagccccatcgtagcacagtattacatgtggttgggaaaaataaaaatacaggggtgcggaatactccaaaacctagaaatgctgtaggaataaatctgcggtaactatagaggtttaacttatatcattttcaaactatttaattttttcttttcctggttctactaattatactgtgtcagatttggaactaaacaggcaaggaggctttgagtcacatcgttttcattttaaatcaggctgtgatgcactgtggctggtgccgtcttgcatgaaacgcatgagccgtgagcgcccagttcagactggggccagggaggggcagtccttggcactttctgtcctagaggacactgtcagttgagttaatacaagtgacatagcttcccttccctcccccttcacccactccctccagaacatttagtgtagatgaaaatgtggtgatagaaatgggtgcatgatcttcacgtgtgacagccaggcctttgcctcttggccaagtaaagcccttccgggtcgctctccttcgattccattttacctcctcttctgatcacttccagagatgagctgtttctggataatggcacacgggcaaatctgtgtgccctgtgggccgctgttacttaccctctcctgcgagacccaggggcttttccctactgttcccacgcttcctctctctcgaggccactgaagtttggagtcaaaaggcccagagtctgagtcccagccctgagcacttaggagccttctgacttagggtttgtcactccacctcattgagcctgactgttctgctccataaaatagggtaataaaggtcaaacatcagtgagcaagctgtgtacactggaaaacactgaatcaatacaatgcgtttgtgattatcattagtaaggtaagtcttagatcagagccctccagcccttctttttgaaacctcccaatggcatttcagaagtgagcagtggaattttcctgccatcctaataagagccctggattccatcattaacatttcagcccattggatgaagtggtgccctctcctctggtcccccgcgaaaaggtaaatacacccaaagggagggacctagttaagtcactggcacctagataagttaggagggtaaagccactacctcgtctgaaggactggacttgacaccccacagtggaagggagcatcaggagaggaacaaaaaaagggatctcagggagaggccagtgtcaaacttgacctcccttgtttggcctagaatgaacccttctctttagctcctggatatgaaaggccatctgcttggagcacagaaagatattgccattttacagcttaagagagtaaggccttgggctgtgctgtgacctgcccaagatttgacactggctaggagcagaggctgcgtcaggctcttaaagtcatgtgtttgcatgctggatgctatactgtccagccaggacacaagacttctgatttctaccctcaagatactcccagatcctaaatccagtagcctcccaggcaaaatatagcaatctgccacaactgccagatgaaaagcaacaatcagagtagaaaaatctgttgcctgatatacataacaccaatcagaccgtgtggatttttctctgaattgactgattttgtttttttcttactgaaaatggacctgcctttcactgaattttctgagggcagagtcttagctgttttctttaagcaccttttttttttttttccattgggaaatggctgatgagttcacatttagggatgtacacacacagatggcagacgtctccccactcatccagccccagatctgagccttgacgcaggccaagtggaaaaatactttcccgcccccctcccctgttcccacttcctcatctggcactatgcatgtctcactcaccctccacagcactcagtcccatcgacgttcactgaacattggctttctctttctgactcctgcctgttttagtccactatatattgctgtatttgcttaaatgctggaaagtaactgttaaaatgtgaaattgtaatttttaaaaaggctacaattaaattttagccaatgccactcaccaaatctttgcacctagtagatatatcaatgtaaaaacaaatacctaactgtacagtgagtgtgggggaaatgtagtaacctagttagtagtcttcaatataaccaattgtacaaggggaagtggtgtttacctacttgttcatcaccattactgaaagccgtactgatcagttagttgacaacgggcatttttttttctttgcttcatggaatgatttcttttcttaaccttcgacttatcctgaggtcaagccttttgtctttatgtgtaaccgacgttcagtctattctaggaatgaaccagcaagttgttcatttaaaactgaccaaagacaattaattcctggtctagtttcctgggccttgtggctcagctgccactaaagagctttttggataaaattgagaacaagctgtgcttcctaccccactctccccgtccccttttattcccttttcctcttaaagagctgctctgagctgtgggattctatgaaaaattcttgcctttccttgtttcagtgctaacgatttctcacctcgaagcgccttttgaaccccggacagagtgcacaatcggagggaattgcgagcttgggaattagactttggagtcttttctctgaagtcaccaggccaggggtcaggagagagatggattcccaagggatgaaaggtttctattcaatgaagaaatcggagtgggaagagacacagggaaattgagccatattttggctatcggctggaaccagcagttcagagatctgccttataaacatttaaaaccggtttgtggtacacaaagaggaaccagtgtgggaaggggcctttatgtggggctttcttctctgttggagtcccttggagtgccttgttgggtatatttctctgtcattcaggaggcacgaatgtggaggacttctcgtgacctggtcgtgatgtggcattcagtgcatgtccacagctaatggaaaaacacgaggactcgggtaatggttcttcctctcagtctttctattcctaacttttcacacatccagatggttccacactagtgcaaatgcctcactctcctgagaaacccagaaagaagagtggctggctcacaaccatggggttagcccctgctgggctgggagtcggggtggcggccaggaggaaaggcagaaaggggtgagccgaggtgttgcctagctgattttctgctgtgcagagctaatgctgacatttcatgtcaacttccccggttctctggggtctcctctcctctgagcagccacatagaacattccccacatatccaaagctgcccaggggagccgagagaagggactttgctgtcaggtccaagccctcctgacctccctgagattgatctgccagtgtcctgctgtccctctgggactggccacatggccatcgctgccccttgttgacacctcctttctgtgtgagttgtccccggccaataacaaagctgttccttgaaccagaacaaccagagtgcacttttccttccttagacggaagtagatcctggctagggtttctgcccaggcccttgttcccggcagtgtgactgtttacatggtttggcaataggtttgattctgattgcttcagagtggctggtctattttgtttcctttggtttccttcctccccaaattgtgacaggaaaaacagaccaaaaccaccctaggaaattgctggttgcctgtccccacgtgatgataaatgttgccctcttctggatatcgtttctctaccttacgaccaaacgcccgtcctatagagtgtctgattggatcctctgtcgcgtattctgatggtgcctgctggtttgacgtggagctatcctgtgaaataaaacagcttaacttttctcaaa

SEQ ID NO: 5878 - DNA, 4401 bp, Homo sapiens
gccaccaaacatctcccaccgagttatttggtgggatttgcagggacttttctgggagaacttaaaggcccatagtaactgcgaatgaagcaatataccactaacctgcagaaaaacacaaacaaaaacagactcccactgtctccagaagtcgtggccttccagaacagtctgcccctcaaggaagggtggggcaggcagtacccccaagcaggctgctcccagaggtggggaacccttcataggaaatccccacccccgtccaccccagagaccctgcccttccacccggaggccaaaggccaactgtactcccaaaggcatgggagaaggttggcgagaagacccctgactaccacatccttgtgtttgtgtgtagagacgggggatagtgagaacctaagccccatcgtagcacagtattacatgtggttgggaaaaataaaaatacagtggtgtggaatactccaaaacctagaaatgctgtaggaataaatctgtggtaactatagaggtttaacttatatcattttcaaactatttaattttttcttttcctggttctactaattatactgtgtcagatttggaactaaacaggcaaggaggctttgagtcacatcgttttcattttaaatcaggctgtgatgcactgtggctggtgccgtcttgcatgaaacgcatgagccgtgagcgcccagttcagactggggccagggaggggcagtccttggcactttctgtcctagaggacactgtcagttgagttaatacaagtgacatagcttcccttccctcccccttcacccactccctccagaacatttagtgtagatgaaaatgtggtgatagaaatgggtgcatgatcttcacgtgtgacagccaggcctttgcctcttggccaagtaaagcccttccgggtcgctctccttcgattccattttacctcctcttctgatcacttccagagatgagctgtttctggataatggcacacgggcaaatctgtgtgccctgtgggccgctgttacttaccctctcctgcgagacccaggggcttttccctactgttcccacgcttcctctctctcgaggccactgaagtttggagtcaaaaggcccagagtctgagtcccagccctgagcacttaggagccttctgacttagggtttgtcactccacctcattgagcctgactgttctgctccataaaatagggtaataaaggtcaaacatcagtgagcaagctgtgtacactggaaaacactgaatcaatacaatgcgtttgtgattatcattagtaaggtaagtcttagatcagagccctccagcccttctttttgaaacctcccaatggcatttcagaagtgagcagtggaattttcctgccatcctaataagagccctggattccatcattaacatttcagcccattggatgaagtggtgccctctcctctggtcccccgcgaaaaggtaaatacacccaaagggagggacctagttaagtcactggcacctagataagttaggagggtaaagccactacctcgtctgaaggactggacttgacaccccacagtggaagggagcatcaggagaggaacaaaaaaagggatctcagggagaggccagtgtcaaacttgacctcccttgtttggcctagaatgaacccttctctttagctcctggatatgaaaggccatctgcttggagcacagaaagatattgccattttacagcttaagagagtaaggccttgggctgtgctgtgacctgcccaagatttgacactggctaggagcagaggctgcgtcaggctcttaaagtcatgtgtttgcatgctggatgctatactgtccagccaggacacaagacttctgatttctaccctcaagatactcccagatcctaaatccagtagcctcccaggcaaaatatagcaatctgccacaactgccagatgaaaagcaacaatcagagtagaaaaatctgttgcctgatatacataacaccaatcagaccgtgtggatttttctctgaattgactgattatgtctatggcttactgaaattggacctgcctttcactgaattttctgagggcagagtcttagctgttttctttaagcacctttttttttttttccattgggaaatggctgatgagttcacatttagggatgtacacacacagatggcagacgtctccccactcatccagccccagatctgagccttgacgcaggccaagtggaaaaatactttcccgcccccctcccctgttcccacttcctcatctggcactatgcatgtctcactcaccctccacagcactcagtcccatcgacgttcactgaacattggctttctctttctgactcctgcctgttttagtccactatatattgctgtatttgcttaaatgctggaaagtaactgttaaaatgtgaaattgtaatttttaaaaaggctacaattaaattttagccaatgccactcaccaaatctttgcacctagtagatagatcaatgtaaaaacaaatacctaactgtacagtgagtgtgggggaaatgtagtaacctagttagtagtcttcaatataaccaattgtacaaggggaagtggtgtttacctacttgttcatcaccattattgaaagccgtactgatcagttagttgacaacgggcatttttttttctttgcttcatggaatgatttcttttcttaaccttcgacttatcctgaggtcaagccttttgtctttatgtgtaaccgacgttcagtctattctaggaatgaaccagcaagttgttcatttaaaactgaccaaagacaattaattcctggtctagtttcctgggccttgtggctcagctgccactaaagagctttttggataaaattgagaacaagctgtgcttcctaccccactctccccgtccccttttattcccttttcctcttaaagagctgctctgagctgtgggattctatgaaaaattcttgcctttccttgtttcagtgctaacgatttctcacctcgaagcgccttttgaaccccggacagagtgcacaatcggagggaattgcgagcttgggaattagactttggagtcttttctctgaagtcaccaggccaggggtcaggagagagatggattcccaagggatgaaaggtttctattcaatgaagaaatcggagtgggaagagacacagggaaattgagccatattttggctatcggctggaaccagcagttcagagatctgccttataaacatttaaaaccggtttgtggtacacaaagaggaaccagtgtgggaaggggcctttatgtggggctttcttctctgttggagtcccttggagtgccttgttgggtatatttctctgtcattcaggaggcacgaatgtggaggacttctcgtgacctggtcgtgatgtggcactcagtgcatgtccacagctaatggaaaaacacgaggactcgggtaatggttcttcctctcagtctttctattcctaacttttcacacatccagatggttccacactagtgcaaatgcctcactctcctgagaaacccagaaagaagagtggctggctcacaaccatggggttagcccctgctgggctgggagtcggggtggcggccaggaggaaaggcagaaaggggtgagccgaggtgttgcctagctgattttctgctgtgcagagctaatgctgacatttcatgtcaacttccccggttctctggggtctcctctcctctgagcagccacatagaacattccccacatatccaaagctgcccaggggagccgagagaagggactttgctgtcaggtccaagccctcctgacctccctgagattgatctgccagtgtcctgctgtcaactctgggactggccacatggccatcgctgccccttgttgacacctcctttctgtgtgagttgtccccggccaataacaaagctgttccttgaaccagaacaatcagagtgcacttttccttccttagacggaagtagatcctggctagggtttctgcccaggcccttgttcccggcagtgtgactgtttacatggtttggcaataggtttgattctgattgcttcagagtggctggtctattttgtttcctttggtttccttcctccccaaattgtgacaggaaaaacagaccaaaaccaccctaggaaattgctggttgcctgtccccacgtgatgataaatgttgccctcttctggatatcgtttctctaccttacgaccaaacgcccgtcctatagagtgtctgattggatcctctgtcgcgtattctgatggtgcctgctggtttgacgtggagctatcctgtgaaataaaacagcttaacttttctcaaa

SEQ ID NO: 5879 - DNA, 3304 bp, Homo sapiens
actgaagtttggagtcaaaaggcccagagtctgagtcccagccctgagcacttaggagccttctgacttagggtttgtcactccacctcattgagcctgactgttctgctccataaaatagggtaataaaggtcaaacatcagtgagcaagctgtgtacactggaaaacactgaatcaatacaatgcgtttgtgattatcattagtaaggtaagtcttagatcagagccctccagaccttctttttgaaacctcccaatggcatttcagaagtgagcagtggaattttcctgccatcctaataagagccctggattccatcattaacatttcagcccattggatgaagtggtgccctctcctctggtcccccgcgaaaaggtaaatacacccaaagggagggacctagttaagtcactggcacctagataagttaggagggtaaagccactacctcgtctgaaggactggacttgacaccccacagtggaagggagcatcaggagaggaacaaaaaaagggatctcagggagaggccagtgtcaaacttgacctcccttgtttggcctagaatgaacccttctctttagctcctggatatgaaaggccatctgcttggagcacagaaagatattgccattttacagcttaagagagtaaggccttgggctgtgctgtgacctgcccaagatttgacactggctaggagcagaggctgcgtcaggctcttaaagtcatgtgtttgcatgctggatgctatactgtccagccaggacacaagacttctgatttctaccctcaagatactcccagatcctaaatccagtagcctcccaggcaaaatatagcaatctgccacaactgccagatgaaaagcaacaatcagagtagaaaaatctgttgcctgatatacataacaccaatcagaccgtgtggatttttctctgaattgactgattttgtttttttcttactgaaaatggacctgcctttcactgaattttctgagggcagagtcttagctgttttctttaagcaccttttttttttttttccattgggaaatggctgatgagttcacatttagggatgtacacacacagatggcagacgtctccccactcatccagccccagatctgagccttgacgcaggccaagtggaaaaatactttcccgcccccctcccctgttcccacttcctcatctggcactatgcatgtctcactcaccctccacagcactcagtcccatcgacgttcactgaacattggctttctctttctgactcctgcctgttttagtccactatatattgctgtatttgcttaaatgctggaaagtaactgttaaaatgtgaaattgtaatttttaaaaaggctacaattaaattttagccaatgccactcaccaaatctttgcacctagtagatatatcaatgtaaaaacaaatacctaactgtacagtgagtgtgggggaaatgtagtaacctagttagtagtcttcaatataaccaattgtacaaggggaagtggtgtttacctacttgttcatcaccattactgaaagccgtactgatcagttagttgacaacgggcatttttttttctttgcttcatggaatgatttcttttcttaaccttcgacttatcctgaggtcaagccttttgtctttatgtgtaaccgacgttcagtctattctaggaatgaaccagcaagttgttcatttaaaactgaccaaagacaattaattcctggtctagtttcctgggccttgtggctcagctgccactaaagagctttttggataaaattgagaacaagctgtgcttcctaccccactctccccgtccccttttattcccttttcctcttaaagagctgctctgagctgtgggattctatgaaaaattcttgcctttccttgtttcagtgctaacgatttctcacctcgaagcgccttttgaaccccggacagagtgcacaatcggagggaattgcgagcttgggaattagactttggagtcttttctctgaagtcaccaggccaggggtcaggagagagatggattcccaagggatgaaaggtttctattcaatgaagaaatcggagtgggaagagacacagggaaattgagccatattttggctatcggctggaaccagcagttcagagatctgccttataaacatttaaaaccggtttgtggtacacaaagaggaaccagtgtgggaaggggcctttatgtggggctttcttctctgttggagtcccttggagtgccttgttgggtatatttctctgtcattcaggaggcacgaatgtggaggacttctcgtgacctggtcgtgatgtggcattcagtgcatgtccacagctaatggaaaaacacgaggactcgggtaatggttcttcctctcagtctttctattcctaacttttcacacatccagatggttccacactagtgcaaatgcctcactctcctgagaaacccagaaagaagagtggctggctcacaaccatggggttagcccctgctgggctgggagtcggggtggcggccaggaggaaaggcagaaaggggtgagccgaggtgttgcctagctgattttctgctgtgcagagctaatgctgacatttcatgtcaacttccccggttctctggggtctcctctcctctgagcagccacatagaacattccccacatatccaaagctgcccaggggagccgagagaagggactttgctgtcaggtccaagccctcctgacctccctgagattgatctgccagtgtcctgctgtccctctgggactggccacatggccatcgctgccccttgttgacacctcctttctgtgtgagttgtccccggccaataacaaagctgttccttgaaccagaacaaccagagtgcacttttccttccttagacggaagtagatcctggctagggtttctgcccaggcccttgttcccggcagtgtgactgtttacatggtttggcaataggtttgattctgattgcttcagagtggctggtctattttgtttcctttggtttccttcctccccaaattgtgacaggaaaaacagaccaaaaccaccctaggaaattgctggttgcctgtccccacgtgatgataaatgttgccctcttctggatatcgtttctctaccttacgaccaaacgcccgtcctatagagtgtctgattggatcctctgtcgcgtattctgatggtgcctgctggtttgacgtggagctatcctgtgaaataaaacagcttaacttttctcaaa

SEQ ID NO: 5880 - DNA, 263 bp, Homo sapiens
ggggaaagagggtttggaaatgtcaaagcaaaggcaagttgggagtagtagctgtcatctgcagaaagtgtcttcaaaagtttaagataaattatcagaggccactgggtactgatacatcaaggcacatgcaacattttgatgttcattgtctacaaacgtcatataacctcttggacttttgtttttacctgtgtgtgtttgtgaactgtttattgaccacttatttctgtcccagccactagattaaaccctttacctgt

SEQ ID NO: 5881 - DNA, 263 bp, Homo sapiens; identical to SEQ ID NO: 5880

SEQ ID NO: 5882 - DNA, 263 bp, Homo sapiens; identical to SEQ ID NO: 5880

SEQ ID NO: 5883 - DNA, 1075 bp, Homo sapiens
gccaccaaacatctcccaccgagttatttggtgggatttgcagggacttttctgggagaacttaaaggcccatagtaactgcgaatgaagcaatataccactaacctgcagaaaaacacaaacaaaaacagactcccactgtctccagaagtcgtggccttccagaacagtctgcccctcaaggaagggtggggcaggcagtacccccaagcaggctgctcccagaggtggggaacccttcataggaaatccccacccccgtccaccccagagaccctgcccttccacccggaggccaaaggccaactgtactcccaaaggcatgggagaaggttggcgagaagacccctgactaccacatccttgtgtttgtgtgtagagacgggggatagtgagaacctaagccccatcgtagcacagtattacatgtggttgggaaaaataaaaatacagtggtgtggaatactccaaaacctagaaatgctgtaggaataaatctgtggtaactatagaggtttaacttatatcattttcaaactatttaattttttcttttcctggttctactaattatactgtgtcagatttggaactaaacaggcaaggaggctttgagtcacatcgttttcattttaaatcaggctgtgatgcactgtggctggtgccgtcttgcatgaaacgcatgagccgtgagcgcccagttcagactggggccagggaggggcagtccttggcactttctgtcctagaggacactgtcagttgagttaatacaagtgacatagcttcccttccctcccccttcacccactccctccagaacatttagtgtagatgaaaatgtggtgatagaaatgggtgcatgatcttcacgtgtgacagccaggcctttgcctcttggccaagtaaagcccttccgggtcgctctccttcgattccattttacctcctcttctgatcacttccagagatgagctgtttctggataatggcacacgggcaaatctgtgtgccctgtgggccgctgttacttaccctctcctgcgagacccaggggcttttccctactgttccc

SEQ ID NO: 5884 - DNA, 1338 bp, Homo sapiens
ttcaagtataaattgtttttgacattaagaccaactcctgttcattacaagcacctgaccaactgtcttaatagaaagtactctagactcagtagcttataaacaacagaaatttatttctcacggttctggtggctaagaagtctgagatcaaggccccaataaattaggcctctgatgagggcctgtttcgtgattcgtagatggtaccatcttgctatgttctcacataatggaaagggaaaggcagctctctggggcctctttttattagtgcacgaatcccattaatgaggaccccacccttatgacctaatcactccccagccacgcctcccaatacgatcacattggtaattaggtttcaacatatgaattttgtggagagacaagcattcggaccataacaacaacattcttaaaactaccattgtaggccaggggcagtggctcacaactgtaatcccagcactttgggagcctgaggtgagagaattgcttgagcccaggagttcaagacctgcctgggcaacatagtgagacctcatctctacaaaaaatttaaaaattggctggggtggtagagcaagatgttgtctcaaaaaaaaataaacaccattgcaggctagtcagccactattagattgtggaatctactgtgtattttatgtaccagaaatccagggtcttaaacttttttgctgagctctgaagataccaccaccatgcatcatattttcaagtagcctctaggaaatgccttgtagaacccaaattgaaaactaacgtataactctttatgttgtgaaggtggtcctaatgaaatctaaccatccccaaaagtgtcttccatacctgactcatacctttagcaagtgacatcacattaaatttgtcaaaatcagtctttaataccttatttagaattatgcagctatagaaggaacatggaggaaattatagagctgtgctgcccaatatggctagccactagctcacatgtggctgtttaaatttaattgaacttaaattgaaaatataggtcctcacttaaactagccacatttaaagttcacaatagccacatctaagtagtgactaccgtattgacaacgcagatgtagaactatgtagaacatttgacaatactgtctagaaagtactgatacaaaaagcactttagttgataatggcttatatatttatataaaaatgcctatatgatgacttctcaagagaaaagattgtttataactggaacctataattttatttcattgtgccagaaaagtagcttttaaatttataaattctacttttttcccttaaactcctacc

SEQ ID NO: 5885 - DNA, 9479 bp, Homo sapiens
gccctttctaaggcacaaaatgatgtgatggaaatgaagatgcagtcagagagactttcgaaagaatatgatcaactcctgaaagaacactctgaacttcaggtgggtgtgacatgcactttatgcacctaaatgttttgaaatagtaattacctaagtaaattatttgggttatttgtccttaactaatcaagatgatgtacttaatcctggctttgttaaacgatttaaagaagccagatttttacctagagggtaaagattaggacattgcaggaaaatacaagataattttaaggaattgctgacttgcatacttacagcattccagttttggtgaatttttaagcaaaagaagccacaaaaatggcagcattggaaaacagactggttctagaaaaggtgagttttgctctttgggatgtttgccatattcatgccaaaatgaggccaaaatttcaagttccacatcacactactcttgtctcagtgttttagacatattaggacaagactttagcattcaaatttatcatttacctccaaatgttgatttgaaagatggaaatgggaaaaaaatgtttcattgttaaagccacaaagtcagatctgggccataggttttctttctctttctctctaattcaataaaagaaatggtcatccctgttaggcttgtctttcctccctcccttctgctgccagccagtaacctgaattgatttctcagacacactctgatcaattggggaagagaccattccagagacagccctggccttccctcccagtttctcccaagacagactggttgggcttgtcttcaaaatttggcagcctttgtggctttcagtcagggctttttacaaataatagctttttatttcactgtacacatttccctgcatcttaatggtcatggtatctccaagactcagcactgttcctggcacaaggcaagcatacactatactcatagactttgtagtcagacctacttggaatacctacctatacctggctgcatgctaggttttttatcttaggcaggttatagcatccctttggggctcacttctttcatctataaaaattgaaacaataatgatgcctggctcactggattgttaagagaactaaataaaatgtgtaggttttttagcactatgcctagctgacagtaaacactcaagaaatgataggtattatcatcatcatctgtattacttcctctgtaggaattttgctgaaagaatgacttattctcaaccaaccactttggccttggtttagagccagtaattaagtaacccaaagcacatatttgtaatctgatattcccagttggtttgcatgtttggtttaactagcctactttgacaatagcaaaagacaaggtagccagagaagggtgaataccctgtatgctccaatcccaggacactgagggctcagttcacatggcctggagcagataggtagattgtcagcaagaccaccccttccccgtctcaaaaatagagaccctaaaattgctgacctcattggggcatgataattattcgtggtatctttcaaggtccaccttggaaagtgaagaagtcacttcagagacctcttgcctagaaatacaacattttccccctatttgtgagattagggtttactcagccaggttgagtatcgacattagtggactttgccatgatgtcagacatgcttagatctttgaatggagaaaggaaaaccagaagtatgccttcagtttcttatggccagtgtccattgttgaatgtctccattgttgaatgtctccattgttgaatgtctccattgtggtaacagccattggttctcttaattctgaagaatatatataacagtgagatttcctcaacccatttcctccccacagaaaagccacagtcagcctggagctgctgcattcttggtaaaggaagtagaaagcttttaagagtgattcctggctgagcgtggtggctcacacctttctttaatcccagcactttggaaggctgaggcgggcggatcatgggagatcaagaccatcctggctaacaaggtgaaaccctgtctctactaaaaatacaaaaaattagccgggcatggtggcaagtgcctgtaatcccagctactcgggaggctgaggcaggagaatcacttgaacctgggaggcagaggttgcagtgagccgagatcgcgcttttgcactccagcctgggtgacagagcgagactccatctcagaaaaaaaaaaagtgattccttcccaagaaaatagttgttataatagttgtcatacctgtttctgtggaaaagaccccatcccagattatgccagacaccatgccgagagtagggccttgtttgatagcacttcaggacttgatctaatttctgcttgtatccagtttttgaaatatttaatagatgtcatttgttgagagtatgctctggactaagcacttggctaagggcttcgtatatgttgttttgtttactctccatgacagctcaataattgaaagtattttaatatccctattttgtgaatgaggaaactgagacccagagatgttatataatttatcgaaagtaactagaaagtgatagcattcaaagtcagagaatctttctccagaacctccatcattaaccactatgttctttggcctttgctgatcattggattgtgttcttggatccattctcctctcaccactgctttactctgtatctctgggaggcccgtttccaaggctcccttgctgtctgactcagtctgggcaggtttagccagtggcaggcactagaagactgaaggcaggaggaaggggaaagccagggatttcttctactctttctgctatagaggccttctcctttatgactccagttccttccctctaggtcccactgggcagcttctacatactggccttcgcacctgggctccataaccctcatccctccagcccaagaagtggtggtggcttttctgctattgataatcccagaggtgccttaccaccctgtttggtgtgtgtactttttcatcacctgtaaaaccaatttcccataatatctctgttggaaggaaaacaaaatctcagctccatagtttaccacttctgtaacccacaggtgactcatttgacatctatgctcctcaggtactttactacttaaataaaggttgtaataccttatgaaaattaaaccagatcctgtataagaaagcactttatatatttataatcaagaatgctatttattatgtcctgactggttacatttttttccttcacctacccatcccccaccgttgtccaatatgagaccctgtataagattctcagatttagatatcattaagagccccattttgtttgtttgtttgttttttgagacagtgtctcactctgtcaccaagactggagttcagtggcacaatctcagctcgctgcaacctccacctccccaatttaatcgattcttgtgcctcagccttctgagtgactgggactacaagcacatgccaccatgcgcagctaagttgggtatttttagtagagacagggtttcaccatgttggccaggctggtctcgaactcctgacctcaagcgatccgcccacctgggccttccaaagtgctgggattataggctcgagccaccgtgcccagccaagaacccttttctttaactcttgtgctttaatgttcgtctgagccctgcttgagaagcaaaagatagttacagatcctctatggtaaaaagctctatcaaattgtcctcatgaatttacttctgttgtcaaactaatcttagatattgaattatatgctaaggttctttggaactagcttcctgaattttacacagttgacatattttcattggaacaatcataaaacgaaagatcattaaaatattaaggaaacaaaggttaaagagggaaacgctgatttctttactgtaaatagatcccaatttgcatcttttaaatccttttggatttccccatctggtcccctccctgttataggcactaaataaatattagaaaacagtcccttcaaaacatgtagtcctttccttatttgccctgcctctcttctaaaaaaaaagaaaaacagaactaactagagattattggctgcacaaacccatcagcacctgccagtttttaaatttcattttggaaaatcagccatcacttaagggacttgtccataatagcttcattaaagctttgttttttatcaaaagggggccacatatgtaaacttgtggaagtaatttacctcctctactcttgtctttttatttgattgcaaaagttaatgttattaaagttgctatggaagcattaatgttcagcctgaacaagagcttgacgaacttctttatacaagcaataacactctgcaaccccattttatgagatatttttcatgatgtagacatttactttcttagcacaagtgatctcttaagattaatttcttttccattttccttcagttttaaatgatgtaatatagtaatctttataacatgatcagccaagtataatttgagaagtcagttctgttggcaaatatctgaaggacaaaaccaaagccaccctagctgaggtttttgtcccttccttctttcatttaccaaaaaccttaattgggttaacagtaggggaattttagaaatcatgttttcctaatgtaacctgtgaaacaaaagcaaaatagattaaggcaaggggaaaaatgaacttaccaagagtgttctttttcctaagtaaaaaccacaaattttatagttttttaaattttagactttctcaatcctttttttcacatttaattattctcataagtatacatagaagagagaatgttttttaaaagtccttgtcatgtctatgaatctgtttctctttgctgtactacataaatcatatttttttccttacaggatcgtttagaaagaggcaacaagaaaagactgtgaactttataaaagacacttgcaatatactgtgtcaaaatgataattttgttatgttagcctctagaaaatttaagttcagaaaaatgcactatgaccggttcgtaatttttttaatgccacacataggttgtattgtaatggcattatcaaaatatttgatgatgtttcagatatattgcaaagtctgtattccagctcttaagaaaaatataagcatgttaaataccatatttacatattgataatgtcattggtatatggtggctgtttaccaataaaaggaaaaaattcattaaccggttgcttccaaaattagaagttttaagttgcatgaaaccattaatagccttgaaagctttgataagttttcagtaataataacctatttaatcagatgatgatgtgtttgaaaatagtgttcaatatcagcaaatttgtacacagggaatgtaaataaggataactgatcagagttatccactgtatttataaggaagagtcggaaaaaacaatgaccttagttttttttaagcctgatgatactatggtttactctaataagatagctatattgataattatatttttgttactgtgcccttgcacattttggtctttttgttaatatttttattaataacacataattagtaaccactctactgtttcaagttaatctagtaatagagcttacatatatttgtataactgctataccactgaactgaatttattttacaacagtgtagaattcttgaaaagttaacgtagaaaatatccaaaaagcagtatttctagaaagtgtccaaaaagcagtatttctttcccttggttgtgagagtaactaattatataaatattacctcaaaaatacatacactggtatcacacagtctttctacaatgtttctgtattctgaaagctaaatattaagtactatttttccattcaaatattcatttagaatttcctttagaagatggcagtgattataatattaatatgatttcatttgttccagtgtttagacatgaaatcatcttccttgtctcatgaaaacctaaatataaaaaaaaggaaaatactggagtttttatttctcttgtctttgttacatcctctgtttattataattttagcaccaacttcacacctagctaatttttttcatcataaagtggatgaaatgagcaagtacctaaaaattttatttcagataaaagtcaggagttactgctaaaaaacagacatgtaggagacattcaacaggagtatgaaatgagagttagaccatatgggctgacaacaccataaataacaagaaaagggagtgctgaaataggagagaacagagcaaatgttagctcaaagtatagacttagaaatatcaaagtaagagctatctggataaatatatagatattgagtgcttggaatcctagcctactatgtgaaaattaagtctaatgtcagaataacttacagaaaaatagaaaatgcacagctttaaaatgggcagagttaaaatctattcccagctttatcacttatttagccatgctagcctaggcctctatttccttgtctccaaaatgagaataataaaatttaggtcaggattactatataaactaagataatacagtgattctcaaagttgttcagactgtatagtaaggagaaagtctggttgcactttgaagagcttgaagatttgaaagattcccaaaaaagcattttaaagtttacatttaagggaccttggacctcaaccctctcaagtttacaagtctgaaactttagacatcaaaagtttgagcagtttttccaaggcaacattgatagttagattcagggccaggctgtaagtctagaatttagatatcctgatcccccagataccgctcttctggttatacacagaccagctataatttgctaaacataaaatattgcagtgtattagccggctgtggctccagagtctgtgccctttaccaccgtgcccaactgtttcacatgctgtgtttggtagtttttcctagtactctccttaataatggtggtgtttagcaaattgtattacataaataaatatttatttcatggattgagttatgttgcatattaaattactttccttcccattgtcaataatgacttctttatgtcttaggctgtattataaattcaaacacaggaatgttattcttgcctttttccatcagaattacctaaagttttattagactttccccctacttgcaaatctgcctggaggttctggtctttaggaagtagcacttagcaagttctggataagcactccagaatttgggatgagttatccttgttgtttgtccagctctatcttggaccccagtgctgctaattagattcatgccttgttctttagggcataagttcctctcttggctatttttcctagtatgctgagaactaggattccctttcagtgacagagtcctgccctggaaccccaatcaagagcctaaagtttaactactctctgagatattagcctgatgccagcagcctgcctggatctctaaatattacccattctgggagttgttagtggtctctgctttcctgcagtgtcactcctgcttcctcattgggcctgctagccacagctacttggatgtacccgaacctgttgccttgccctacctctgtgggctggttcagttctgcattcccattccagtgtccactgccttctcgctatccctcccatctgtgcgccaccaccagcttatccccagccctgctaacatgacaaactattgtgcatttgagtgcccactatacaatgtgtgaatataaccgtgcttttaagcattgactttaatgtctgggatgatccgtctagagtccatggaaccctcctgtgttttttcatccctttcttagtaatcttggaaatccacttatgaaattctttttctaacatttctttgctgaacggcatttttaaaattactttcacggtgtttctttccagtttgatctctacacaaacacaactttattacttgcaccagaaatgatttcaaacactttaggaactgtggtaggcttaattatgacttcccaaaagatatccctataccaatccctggaacctggaaatgttctcttctatagcaaaagatatgattaagttaaagtcttgagatggagagattattctgggtaatctgggagtgccctaaatgcagctacatctatgcttatatagaagcaaagggagatattaccacacagaagaggagaaagcacagtgaccacagaggcagagattggagtgatggagccgcagcaaaggaatgctgacagccaccagaagctggaggaggcaaagaacagattcttccccagagcctcttccagcaggagcatggccctacagataccgataaaactgatattggacttcctggcctccagaactatgggaataaatttattgtttcaagctatcaagtttgtgattatttgttactgctgccatagtaaattaatacaggagcatgcaggacagatctgtaatggcctgaactgaatttcaaggggtgtggaaaacagttactctttaacaccactccgtcttccccattagccatttggataagtcaaagatagccttagccatctcctatcttagttacttttctccttcaactgtattttgccattgtcgttgccattgcctctgcctaactgcaagccatcatcatctctcacatggactatgacgacctcctcatctccctgtatcttctctaatgcttctctcatatacatgctctcagcagccacctggtttaaaacaaaaacaaaaaaaacactaatcatgtcattccctgcttgtcttcccgttctttccaactgtcattccctgcttgtcttccaattctttccaactgcagttaagatcaaaccaccaagacctcaccaggctcccatctacttttcagcctcaactcagtccacctgctctgccaatcacacctgtttctttttgttgttctttccctaggatatagatcctggcatacctgcattctgattcttcttggaacaagccaaattctttcccctgtcagtacgtttgcatgtgtagtacatgttgcatcccaggcctgtctgccttcttaccctattttattttcatcatagcacttactaccatctgaaatgatctcatttatggtttgtctcctcagtgattaacacagttcctgcacacagtaaatcagtagttctcaacaggaagtgaagaggtcatcctgaggggaacatttagcaatacctagagacatttctggttgtcataaccaggggaatgctcctagtggatagaagtcagggaggctgttaaacccattccacaatgcacaggactggaacaaagaatg

SEQ ID NO: 5886 - DNA, 617 bp, Homo sapiens
gcctttcattgcctgcctgtgctggccatgcttctgctaccaggctgggcctgctcatggggcccagtttctttttcctcttcagtgtggccttctctatcttcagggttcaccttgctcttcctcctaatctgataaagaatgtttcagacctgtgatttccccagattggactcctgtgttctttcattcgacattgatggttctcagtgaggctgcaatacagtctttctctcaactatcctacagattctcttttgcaacagctactaccttctactcattccttcctcctccacagtcctctcttctctcatgagtcttctgagactatcaggcggctggttctccaccacagggctatctctctacatctctgacttctttgcatgactgctgcacgctgggctctctgggccacttctcccacccgaactaagccctgcccccctgtctctgctgctttgattccttacatgcttgatttctgttttgagacttatctgacatttattgtttgtaatgatccttgtggaacccaaatcctttgatatgactacctgggcattggcccaaatcttctctgaaatttctatttgggttaaaaaaaaaaaaaa

SEQ ID NO: 5887 - DNA, 617 bp, Homo sapiens; identical to SEQ ID NO: 5886

SEQ ID NO: 5888 - DNA, 54863 bp, Homo sapiens
gatgatatgagtaatgctggtgattttctaaatgacaatgcagttgagatcccttctttttcaaaagggattataaatgatgatgaggatgatgaagacctcatgatggcttcaggtcgtcctagacagcgaagtcacatcctagaagatgatgaaaactcagttggtaagaatttgactttgtgcatgtgattaccctgttgattaatattttagattttttattaacactattaaagtcattattgaatttgtagaatgtagctaagtggtgcttagaggaaattttatagcattaaatgactttgttaaaaaaggtttcaaatctataatccaagcttctgctatggcagactagaaaaagagaaaactaaaccccaagcaaatggaaggaaataatacagagcaaaattcaataaaattgacaacagaaaacctatagagaaagtcaatgagaccaaaagctggttctttgacaagatcaataaggccgggcacggtggctcacgtctataatcccagcactttgggaggctgaaatgggcagatcacttgaggtcaggagttcaagaccagcctggccaacatggtaaaaccctgtctctacaaaaatacaaaaattagctgggtgtggtggcacgtgcctgtaatcccagctactcaggagactgaggcaggaaactcacttgaacccaggaggtggaggttgcagtgagccgagatcgcgtcaactgcatgccagcatgggcaacagagcaagactccatctccaaagaaaagaaaagatcaataaaattaataaatatctatcgtggttgatcaataaagagaagacacaaattactaacatagagaatgaaagagaggtgggccatcactatagatctgtagatttgtgctatccaatatatagtagccactagccacatgtagctgttgagcacttgaaatgtggttagttcaaactgagatatgttatgagtgcaaccggattttttttttttttttgaggcggagtctcactctgtcacccaggctggagtgcggtggtgtgattttggctcactgcaacctccgcctcctggattcaagtgattcttgtgcctcagcctcctgagtagctgggattacaggcatgcgccaccacgcctggctaatttttgtatttttagtagagatggggtttcaccatggagtgcaaccagattttgaagacaatatgaaaaaaagaatgtaaaaatcttgggaaattttttatattgagtacatgttgaaatgataatatgtattttaaatgcactatattattaagattatggctgtttctttttactctttaaactttagaaatattagaaaatttaaaattacagctgtaactcacattatatgtctgtatggcagtgctactattaatatcaaaggcataatggcaatattatgaataactttgtgcccataaatttaacaacttaaatgaaatagacgaattttctgaaagacacaaagtaccactgctaactcaagaagtaatagataacctgaatagtattgtatctattaaagaaattgagattgtaatttaaaatcttcaaatagagtgcttattgtaacaacttacatgctacaataacacttgaacattatcaagtaaaatgaagaaattgagattgtaattgaaaatcttcaaatagagtgcttattgtaacaacttacatgctacaataacacttgaacattatcaagtaaaatgccaatgtgcagtgctatgttgtgctttttaaagtcatatagagtttatagaacagcagtcctcaaatgttttggtctcagtagcctttatactctaaaaaattttgaggacccttccgagagcatttatttatacagagttacggctatcgtcatttacatattagaaattaaaattcagaaatttaaaaatatttattcacttaaaaataacattaataaactcatgtaaacatgaatagtacttttttatgaaaaacaaaaaaaattagtgagaagagtggcattgcaatctttgtaatgtctatcatagaggatagctggattctctcatctacttttctggattaagtctattgctatacattgtttttgtttgaagtgtataaagaaaatttggcctcacataaatatgtaatttgaaaagggagaagtattttaagaaatcttttaatagcacattcaattaattgtggatattctttgatgttgcaccaagactcagaagatgatcgtttcctaaagattacttgcaaagtgtaatctgaaaacttcagtgaactcttacggctctgttatgttaagattcattggtctggctgggaatggtggctctcacctgtaatcccagcactttgggaggcccaggcaggaggattgcttgaggccaggagttcaagaccagccagggcaacatagtgagacctcctctctacaaaaaaactttaaaaattagccaggtgtggtgacgtgtgcctgtaatcccacctacttgggaggctgaggtaggaggatctcttgagcccgagaggtcgaggctgcagtgagccatgattgcaacagtgggctccaggcagggtaacagaacgagaccctgtctcagaaaaaaacaaaataaaatcaaaaaattcattggtctgacttgaatgttgaatggattttttaaaatcatgtttaattttgtaacatatgaattgataatattggttcactgaagtttatagatcctctttatactgacactttttattatctaatataaattatttgtttttgtttttaattaattatatgttgtttttaattaattaatttttgtttttagagatagcatcttgctctgtcacctaggctggagtgcagtggtatcatcacacctcactgtaaccttgagctcctgggcttaagcagttctcccactcagccttccgggtagctaggactacagatgcatgccaccatgcccatctaattttttattttttgtagagatggaatcttgctttgttgcccaggctggtcttgaaatcctggcctcaagtgatattccctccccagcctcccaaagtgctgcaattacaagcgtgagtcacagcacctggctgtaaattatatctgctagtgttgttaccaatctcatcagtagtttctaagtattagaaagttgtgaagctcataatggcaaatagaagctttccaatatcttaatttttaattgaaagctcaaatttcttgtttttattttttgagagggagtcttgctctgtcacccagcctagagtgcagtggcacgatctcggttcactgcaacctctgccctctgggtacaagtgattctcctgcctcagcctcctgagtagctgggattataggtgcccgccaccatgccaggctaatttttgtattttagtagagacggggtttcactatgtaggtcaatctggtctcggactcctgacctcaaatgatctacccaccttggcctcccaaagtgctgggattacaggcctgagccactgtgcccagctcttttttttttgagacggagtctcccgggttcaagcgattctcctgtctcagcctcccgagtagatgggattacaggcatgtgccaccatgcctggctaatttttgtattttcagtagagacagggtttcaccatgttggccaggctggtcaacgtggaactcccgaccttaagtgatctgcctgcctcggccttgcaaagtgctgggattacaggtgtgagccaccgtgcctggcctgaaagctcaaatgttatcattggcaacaaattctgccagttattttttcttaattgataggctcacttcattcatttacaagaaaatgtttgccaaagatccaattctgcataaccgtagtttatctggcatgtgttttttaagtaaaagtagtgttgtatgaaaaaaaatcacttagttcagcttacaactcaaacaattgcataagtgctttttttcaagacaaccatcacacttctcattttagcacacagaactttaaaaaaaaaatctgtgtaagcgtcaagatttaataaaattaatatttttactgcaagtgagtagtggttaacaatgcagtaacgactaatacagttaggtgccactgccttgattggtgccaaggcaccaggaattttacccaccattgcttttgcaccatcactgcatctctttaacacagtgaaagaggcaaatagcatgtcagtgtcattgaatatgaatgaaaaagttactagattccataatgctttcctttttccaaatcattggtattcgtgattcccttaattatgatcctttgtgttgtagatatttcaatgctaaaaactggttctagtcttctcaaagaggaggaggaagatggtcaagaaggcagcattcacaatctaccacttgtaacatcccaaaggccattttatgatggacccatgccaactccccggcaaaagccatttcagtcaggttctacaccgttgcatctcactcacagattcatggtaagacttggatctacacttaacttcttagtaggttttcagcacttttttcttactatagttaatttttttggataaaacatatttttaaaaactttgattaagtagcctggagcactttggttgattacagttttgtggttggtttattttatggttagctcacagttttaatcttgtttcaaccttattgaaaatgatgttaaataaaattctgctttccaaaatgacattaaatgaacataagtaaatattactatcttgcaatatttcttggcaatactttcaaaccttattcttcatggtcattgttacatagaagattatactgactccaaaacactagtaaggaggtgctttcttagaaggcaactactagtataatatattagaaggtggcaagtactatggggggaaaagtctgacccttttcctcactccaccacccaccagaatgtaagctacacgaggataaagatttttgttttgtttactgatatgttcttaggatttggaacaaggtatgatacagtgcacattaaatatatatttcatgaatagacaaaatgaatatattggctttttgccttagatttgagttctttttttttttttttgagatggagtctcgctctgttgcccaggctggagtgcagtggcacaatctctgctcactgcaagctccgcctcccaggttcacgccattctcctgcctcagcctcccgagtagctgggactacaggtgcctgccaccatgcccagctaatttttgtatttttagtagagatgggatttcaccatgttagacaggatggtctcgatctcctgacctcgtgatccgcctgcctaggcctcccaaagtgctgggattacaggcgtgagccaccgcgcctggcctgagttcttataaagtttagtttttctgtgttggttatatgatgttttccattctgaggattttgcctttttaaaagtataggcctggcataaatttgaagagtataggcctggcataaatttttatgtaaagattaagggtggtgattaatattaataaaactttttattgctatcagtagtcatcaagtcataggtcttaatttttttattagtgtcaatattttatttatagttatgttaaataaaatattggcactaattttattagaaactctagggcctagtgtgagcctataatggacatcagtggaagataagttttccaagtggtatcaatttatgttgcctctgccgggcgtgatggctcacgcctataatcccagcactttgggaggccaaggtgggttggtcacttgaggataggagttggagaccagcctggccaacatggtgaaacaccctatctctactaaaaaaatacagaaattagctggacctggtggcatgcacctgtaaccacagctacacaggaggctgagggaggagaatcacttgaatccaggaggcagaggttgcggtgagccgagatcatgccactgcactccagcttgggtgacagagcaaaactgtctccaaaaaaaaaaaaaaattatgttttcttaaaatgtatgtatttattttatcatagaatagttaggaaaaaagtctgttgttatttgcatccatatttgtaagaaaactcaatttttgaaatatttcttttgaggaatttaatggtttggttgttcaaaggacaactgtaatgtgcttttaaagtaacagtcatgtaatttatttttaaatattattaaatactctatttgctaattaataagtatatatgtatcttattctcaccaaggaaataataagtaattgtagctctggtattatgactcctgtcagaaactatttagagatagatgagatgtagtaactcccaaaacctaaatcttaatacaaatttaattataatatttgttaatttgtactactgtggcttactgattctaggagcttcagtttttctcagacttatatttaatcttacctgtttgtaggtgtggaactctattggaattattcgctgctataatgatgagcaagacaatgccatagatgtggagttccatgatacctccatacaccatgcaacacacttatcaaacactttgaattatacaatagcagatctttcccacgaagctattttgttggcatgtgaaagcactgatgaactagcaaggtaaactcaagattattaggaagaatttggcactgttgaactgttagatacagttgttgaaattaaagacaaaaagttaataaaacaaaatttattttttgtaatatgaaatttcagaagagtttggtacaaacaccagcacacccaaaatacctcagaacatatgtctgtttttgccataatgattccctcattacatgctctaactacatagcaaaatgacatggcatagttagtaatgcaagagatgggattttttttttacattgttaagtgcttttttttttttttactattataagagtaatatacattcattgtaaagaaaaaaaaccagtatacagtatagaagtttcggaaaatgaaaactcctcccagaattctactctcagatataactgctatttacaatttgatatgtatccttccagatttctttctatttgaacctcccttattttaatttactttattgagatgtaatttatttacaataaaatgcacccatttgatgagttgacaaaggtgtatatacacagataacccctaccacaatcaaaatacagaatgttctttatcacccgaaaatgttttcttatatccctttgcagttagttcaaccctagccttggccaactattagtctagatttttgtcactacgtctttatcacccaagaatgttttcttatatccctttgcagttaattcaacctgagccttggccaactattaatctacatttttgtcatgatggattaaatttaaaatctctcttcgagaaaggaaaaaaaaacggaaaaacaaaccaaaaaatgtactagtcacccgtttgctttttctacttaatattttttggatgtttacatgttttgataagtaggtaggtaagtaaataggtagatagatgtcaagaaaaaaattatgatgggaaagcaatgggtgcagaatgtttttcttttcaaaagaaaagaaaatattttttcagctttttgttaatcaagagattgccctctcttgatcccttcttcagctgattatagtactgatacacttcatggattttactatcttctatgtgatttgaaatttgtatccttcaggctgggcatggtggctcacgcctgtaatcccggcactttgggaggccaaggcggacagatgacctgagctcaagagtttgagaccagcctgaccaacatggtgaaactgcatctctactaaaaatgcaaaaattaaccaggtgcagtggcacccacctgtagtcccagctactcgggaggctgaggcaagagacaggagaattgcttgaacctgggaggcggaggttgcagtgagcagagatcacaccactgtactccagcctgggtgacagagcaaaactccatttcaaaaaaaaagaatttgtatttaataataacttacatatatgtatgtgcaaagaaaaaaggctggaaagatatcaatatagttcattttaagggtatttcataattacttttttaaagcaacttcttatactagtgtataataggaagtaaactatttggtttttttgttgaatatcatgattgcttatatatatatatatgtaaatatcatatgaaagtttgattgtttctgtcttgttttaatttttagcaagcttcactgcctgcactttagttcttgggattcaagcaaagagtggataatagacttgcctcagaatgaggatattgaagccatatgtctcggtcaaggatgggctgctgccgctactagtgccctgcttcttcgattgtttactattggaggggttcaaaaagaggtattcagccttgctggacctgtggtgtcaatggcaggacatggagaacagcttttcattgtttatcacagaggtagatttttttcagtcttttatgacttgaagtaaaatggaaattacttgagcttttttgctgtttttgttactctttttgtcttggattatatacttccttttgaatccgtgtaatctttaaatgtagataattttgttgtgttcactagcagcaatgaaaatgaaaatgtttcttaatagaactatattatagagagaattccaaggtggaatttggttaattacttccatgtctaaatcttaccattttggcaagcacgaccagagaactttcagcgttgaaattccacaaaaataactcctagtaggaagggccaaaacaactctgaatgtgacactttttaaaagctgctgcctcctttttcctcccctcatgtctttcttcagtccccgtcactatgctaagactggtcttatcaaggtaaccgataatctctgtgcttttttaaaaaaataattccattgaaaataccttcttctcatgacttctgtgacatcatactttcaatatttttcctcactggcagctccctttttacttttttgttggctctatcttttagctggagtgtatcccctttttctctactactctctaggtcagggtctttcagtctttttgtctgctttgccacagtaagaaatagattcatagattctggaccaggtatggtgtggtgtggtgtggtggctcacacctgtaatctcagcactttgggaggccgaggcgggagagttgctttagcccaggagttcaatacaagtctggatagcaatagcaagcccctgtttctatttttaaaagaaaaacagaagaaaagaaatatattctatataactgttctataaatatctgcaaatgtaactgaaataaaagtctcctggacaatgtttactcttttgatatcagtttaaatttttttatttcattttttaaaatgctagttgcaaattaaaattgattccatgactcttaggtcaaaatatgcagtttgagaaaccaccctggggaattttatcataatccatggctttaaatacatctcagtgtctatgacttttaagttgatagcaccaaccctaccctctccttgtgtctccagacttacacatccagttgcctacttgaaatctatttagagtttggacagacatttcagacttaatttgctcacaataaaaactgatttttttccttccaagcttgcttcttatgtagtttccccatcttagtaaatggcttactaacaatctagtggctgaagccaaaaatctaaaaattatcctcgattcttctctttccatttcccctgcatcaactccaacagtaaaattatatcatcatgtcaattctatggaataacacattctaaatttgtctcttttcatttcttctgctaatacaacctggatgtcatctcttggactgtcatagtagcctcctaactagtcttttagcttcagttcttgccttccacagtccattctccacagagcagcctaggtgatcttttaaaaatatagatcatgctcctcttctcaaatccctctgactttccttcacttttagaatcaaagtcaaacttctgatagctgtcaaggtgatctactgatcccgtataatctgacctttgcctgcctctccaacctcatctcttaccgttgtttctcattaccatgttctggccatactgcctctttgtgttcttcgagccctccattcttcctaccttaggactttgcattagctgttccctccatccacttccgtgttccttcccctaatgtttgcatggcaggctccagcttgcagttcatgtctcagcttaaactttactttctgagaggtcacttctgactaaccagtctaacaaaccactctgacattctgtatcacattattttaactttgtgataatttttttgttctttttgtgttttttaatttgtcttctacctgaaatttgaatttaataagagtggtgactttgtttattgctgtagccccagtatctaggccaatgctggcgtgtagtaagctctctgtaaatatgtcttgagtgaataaatgcccacttataaggactttatgtgaagagtccatgtaacatcttactgtgtttctaatacctgaatgatgcctcagttggatgggttattcataaaaagtagtgctagtcagtctagtaatttaccacaaaatcaattcacagaaaataatttagactgcgttatagttggataacctttgatgcctgatttatatttacattttctcattaggtacaggatttgatggggatcagtgccttggagttcaactgctagagctggggaaaaagaaaaaacaaattttgcatggtgaccctcttcctcttacaaggaaatcctaccttgcatggattgggttttcagctgaaggcaagataaatttgtttaaaaaaaacaagtataatataaagtgttagatattcttcaagaagaaaattatttcattgttttattcctaattaatttaagaataaattatctctattttatattttaaatttctattttaatatgttggcagaactgggagctgcaatctttaggcaaggtagccattgttttatgtataagatcttgtttttatttttatgttcttttaagacagggtctggctctgttgtccaggctggagtgcagtggcatgatctcggctcactgcaacctccacctcctgggcttaagccatcttcctacctcagcctccttagtagctgggactacaggcatgtgccaccatgcctagctaatttttgtattttttgtagagacagggttttgccatgttgcccaggctggtctcaaactcctaggcgcaagtgatccacccaccttggcctcctaaagtgctgggattacaggcgcgagccactgcacccggctaagagctctcttcatgagaattctcattagaaaacttataaagaaggaaatatatttttctgaaagtattaaatagcaaggaggtgatacaaatcaataataagttgtgtcttttccagcagatcatacagaaaacttagaattttctagagcttcactgtttactacaataactagtatgtgtgtctgttgagcacttgaaatatggctgagatgtgcttgtatgtgtaaaatactctggattttgaagacttagcatgaaaaaagatataaaaatcaatttttttatgttgattacatgttaaatgataatatttgagatatcttcgatgaaataaaatgtattattaacattaacttcatcctttttttctttaaaaataattttttttttggctgggcatggtggctcatgcctataatcccagcactctgggaggccgaggcaggaggatcacttgagcccaggagttcaagaccagagtgggcaacatagtgagatcccatctctatttaaaatttttttttttttaaggaataaattaggagtcttgctctgttgcccaggctggagtgcaatgatgcgatctcagcttactgcaacctctgccttccgggttccagcaattctcctgcttcagccttctgagtagctgggattacaggcttgcgtcaccacactcggctaatttttgtatttttaatagagacagggttttaccatgctggccaggctggtcttgaactcctgacctcatgtgatccacccgcctcgacctcctgaagtgctgggattacaggcgtgagccaccgcccccagcctaaattttttcacttaacttttttttgttgttcagatacatggtatgtagccattttttttttaatgtggcactaggaaattaaaaattacacttgtggctcacatgatatttcttttggataagtgctattttagaccaaattctagaggcttatgacagatgatttgaaagacactgaggagtaccttattttattttatttgtttttgtgtttgtggtttttttgacgcagagtctcactctgtcacccaggctggactgcagtgatgtgacctcagatcactacaacctctgtcttctgggttcaagtgattctcgtacctcagcctccggagtatctgggactacaggcacataccaccacgcctggctaatgttgtatttttagtagagatggggttttgtcatgttggctaggctggttttgaactcctggcatcaggtgatccacctgcctcagcctctcaaagtgctgggattacaggagtgagccactgcacctggcccaggagtaccttattttaaatcacctgtcatctctgtctcatggggacttaaatatttctctttttggagattcatgttcttcatttacattgctggaaactccactttgtctttaaaatatcaaccatttctaaatgtgttttctattagtcattcaggctttaataatatgaaccattgataacttccatttgtatagatttttttctcccaagtaccaattagatccagaccctgcggaaactaatgtttgcagagtgaggggggtgtgaagccacagataagaaaagggataatcaggtaatttgccacagatttcctgagttggaagcagaataggtggaaaacaagaatgcttccctgttttacgaggtaagaattgcttacctagtagttggggacagagtagtgacaaggccaacaaaaagaagagagaggaagaagagtactaaagataaatttcgtaaagatcactttgtatcagattttggtcatttttctaaatgtttctcaagcgggagccttctgattcatgtttaattttttactaaaattggctttaaaattattatcggccgggcgcggtggctcacgcctgtaatcccagcactttgggaggctgaggcgggtggatcacaaggtcaggagattgagaccatcctggctaacatggtgaaaccccgtctctactaaaaatacaaaaaaaaattagctgggcgtggtggcgggtgcctgtagtcccagctactcgggaggctgaggcaggagaatggcttgaacctggaaggcggagcttgcagtgggccgagatcgcgccactgccctccagcctgggtacacatcaagactccatctctttttttttaataataataataaataaataaataaatgaaattattattatcttccagcaggtggcatagttttcactgaaactcagttttttcactttatttgtgtaaattttagtcatatcaaatccaatgttttttctttttttagttaggtcttactttatatggttaatgaaattttacgtaataatcttagattatttgcttctgttttgtgttttgcttttgaaagcaaagttgaatccttggtatgtataatatatttgaaatagggttcctttaacaacatgtagctatgtctccaagtgatttttctgttggtgtttaggtaccccttgttacgtggattcagaaggaattgttcgaatgcttaacagaggacttggtaatacgtggactcctatatgtaatacaagagagcactgcaaaggaaaatctgatcactactgggtggttggtatccatgaaaatccccagcaactaaggtgggctattaaaagaagtctaaagttgactctttttaaaaagtatgttgaaattctttttatgaggccctttaagtgtatttgtcttttatcttagtccaattacttgctttccatagtcactaaattaggaatttgttcatattcactctgaagttttcagtcacttgctttacttgaaacatgttgaacaaaatagaaataattaggatgaccttaccatcatttcagccacacagggagaggaattctgattaaacatggcatttcaccttttattactgtcttttattttaataaaataacaataaatataaaagttaaagtgaaaataaaacaatatatattcaattgagaattgaaatatacaattaagctgctttttgagatgttttgcttaattatcgtaataggaggaaggactaatagaagacagagtctcgctctgttgcccaggctggattgtagtggcgtgatctcagctcactgcaagctccgcctcacgggatcacaccattctcctgcctcagcctccccagtagctgggattataggtgcgcaccatcacgcctggctgatttttttgtatttttagtagagagggggtttcaccgtgttagccaggatggtttcaatctcctgaccttgtgatctgcctgcctcggcctcccaaagtgctgggattacaggcatgagccaccacgcccagctgagtttttttttttttttttttttttatgtggagtctcactctgtcacccaggctggagtacagtggcgtgatctcagttcactacaacctccactttgagttcaagctattcttctacctcagcctccccagtagctgagattacataggcatgtgccaccatgcccagctaatttttgtatttttagtagagacagggtttcaccatgttggccaggctggtcttgaactcttgacctcaagtgatccacctcaagtgatccacccaaagtacaggcatgagccaccgtacctggtcctggactaatagtattttatattgatccgtgtgcacattaaagtttgggaagtactgctgctggcatatgtataaaatgatacattggctgggtgtggcatgggatttctttttggggtgatgaaaatgttcagaaattagtgttgatagatgcacaattctgtgaatatacaaaaaaaccactgaattatgtcttttttttttttgagacagagtctcactctgtcacccaggctggagcacagtggcccgattatgtctcacttcaggctcacttcagtgacatcctgggctcaagcgatcctcccaccttagccttccaagtagctgggactacaggcacgcaccaccacacccagctactttttgtagagacagggtttcaccatgttgcctaggctggtctcaaattcctgggcttaagggatcttcccgcctcggcctcccaaagtgttgggattacaggcatgagccactgtgcctggctgaattgtatacttaccatatgatatggctggtacattctctgtgaactcaatattatgtgaatcatatcttgacaaagctgttaaaaaggatgaggacactatataatgatatagaaaaatctgcaagatgtgttaagtgaaataaataccatttgtgtaaaagtggggaaagaataagaatatgtaattgtatttgctttacatacgcaaaagaattcctagaagaatgaaaaggaaactaacaataatagttacctcacggagagaaactcagtggatagtataggagacttttctctgtattcatttttatactttttgagcatgtaaattgagcatgtaactttgaattactagttcaaaagttaaataaattgaatttttaaacaaagcagcaattcaataaactaaatcagataaggccagaagttaagttcaagaagacttcttaatttggctacatggaggttaacggtgactctgataaaagtgataaaatgttaaattccagattggggtgggcatgggaggtaaagaaatgaaagtagaatatgtggataactcttatcaagaaatttgactattgggccaggcgaggtggctcacgcctgtaatcccaacactttgggagcccaaggcgggaggaatgctggaggccaggagtttgagaccagcctgggcaacatagtgagacccagtttcaacaaaaaaaaatttttttaattacccaggcatgatggcacacacctatagtctctgctacttgagaggctaagaggggaggatcacttgagcccaggaggttgaggttacagtgagtcatgatcacacctctgcactcctgtctaggcgacagagaacctatctcaaaaaaaaagaactttggtgtgaagaggagcaaagatttggggtggcacctaaaggaggataaaaagtctttgaagggattttttagcttaggtgactctatagcatttttgtaatcttttggcaatgaatttagtaaagaagataagattgataatttaaaagaaggagccaatgaaaggaatgaaaaaagaaaaaaaagtagtagcttttagatcacctgtctaaaataggaaaatagacatttcatcagttctggaaagggaaaaaaataggcacaaatgcagatagatttggtagccaaaaggtaacaaattcctatcttctgtttttggcttctgttttgttggcagatcatgaagcagaattcagttatttctggagacagtggttggcattgtgggatgtttgagaagaaaagacatatagtctcagaggatgcaaaattgaattagtagagaactacagaggaattggtggttatttctgtgtgttttgcctttacagttgtaatcactgaatattacattctaaatattgacatatttagtatcagaagaagtatattcattaacggttttttttttttagagccagggtatcactcatttgcccatgctggagtgcagtagtgcagtcatagctcactgcagccttgaattcctgggctcaagtgatcctggcacctcagtctcctgagtaggtagaactacaggcacaggctaccacacctggctaatttttaaaaatattttgtaaagatggggtctcaccatcttgcccagattgacctctaattcctggcctcaactgatcctcttgcatcagccttccaaagtgctaggattataggtataagccagatgccaagccacattcactatttttagtagttcttatagtgtaggttgttctcagtgatttcttgcatgtccattttcaggaatctagttagtttagtaatttgaattaaagaattcacagtctatcttaatagtaggttaaggtttgaacctatgaggatttttactattctgcctaatgcttattcaagtaagattattcattttgttagtgaatgtcattatcttagaggtatatgaaattatttatttgcaatatatgaaattagtcatctgcaatgaacaattttgcttcttcatttcatttaatattacaagtatttcatcaattgcagttttcacacccttagtaatttatccagctggctttttttttcttaacatgcttttttttttttccacacaaccctttggaacacattttttacttgctttttatttaagatttgtaaagaattttaacttgttaaaaactacgataattacagctggtaacatttaactgttatattcaataatggataaagaaataatggactgtaaattacagcttttacacttagaaggattttagaaaccgtctatactagtagctcctgacattttcaaatataagagccctttttatttatttatttagaaacagggtctccttacgttatccaggctggacttgaacaagagtccttttttaaatgttgaacagttcatgcctccaaataatagtagctctagtagctctacatttagtatcagctaataaagaatatttctttattgagacacagtctcgctatgttccctaggcttttcttgaactaacctcgagtgatcctcccaccttggcctcccaaagtgctgggattacaggcatgataacataagcttctgtagacctgaaaattttattttaatataaaattgtatttacaaatcacgttatctgcatacatgtgaaaattttagtatgtaaagtggaaactatttttgtatttggtctacagacaattcatggtgcttgtgtgcattcctagacactttataatagctcagcagccctacaggaataaaagaatgggaactaccaagttcttttggtctatttgctgtctctcttcacccccagcacttctccccaatttttacatatgagaaaactaaggtccaaaaagattaaagtaatttggtagagagtacacatctatttattggcaaaaaaaaaacaaccttatttttttgtattaaaatataggaacaaagggagttagctgataagtagattgaaagaataaatacttctcctataaagaccagcttgttgtagaataattgaattactgaggggaatcttatacagtaggcatttgaagcactgagaagatacactaaaaaatctgttgatagaaatgtatttatttgtatattatgtgataaattgataactgcagactgttttcatattttcatattttcctggctttatgctggaataataaacttgaataagaatatttttctttttttttggtacacccttgtagaacatttatttatttattatttattatttattttttggtatatagccttaaatatttttcaaagattggaagcaacacttctcagtatggcttactgtacttttcacaccagttttgcttaacatgttggcatatttagagatgattcatttcctttctgtggatagcggtacatggaagttcggggaataaaattctgcaatcacttttttagtagcctgctgttgtgtttaaagagccttacctattttggctagcaagaaattcatttttggccaggctttgtgactcacagctgtaatcccaacacatcgggaggccaaagcatggggatcacttgaggccaggagtttgaggctagcctgggcaacatagagagaccctgccaggcatggtggtacatgcctgtagtcccagctgctcgggaggctgaggtaagggtatgacttgaacccaggagttcaaggttatacagcccctgcaccccaacctgcgtgacagaaggagactttgtctctaaaataaaaaggaaataaagaaattcatcttcatatttatttgcatttttaatgcctctgtttgctctcattgtttgtgataaagatagcaaatcacatgcttctctggaaagccaatgtggcctagtggtccagagctcgagctctcgagtgacactgcctgcttgtggtatcctggctgaaatcctcgttcagtagccctggctctgtgccactgtttcctcatctctaaaaccacagtgtacccatttcacagaatttctgtgaagatgaagtgacttagtgatacctctttctttattcttttaactttaaatgcattttctaacccaactcagtggtatttatgctttctttttgttcagagatcctttaaaagaaagtacattttgtgaaaaataatttttaaaaattcatttgagagcgtgtcacatcggtgcacacctgaataccagctacttaaaagacaggggcaggaggatcactggagcccaggagtttgcagacagcctgggcaacagcaaaaccccgtctctttaaaaaaaaaagcattaatttaagtcaatataaaattttcctattttcctttaattatgaatatgaggttgggtgcagtggctcacgcctgtaatcccagcaccttgggagggcaaggcaggcagatcaccctgaggtcaggagtttgagactatcctggccaacatggtgaaaccctgtctctactaaaaatacaaaaattagccaggcctggtggcagatgcctgtaatcccagctacttgggaggctgaggcaagagaatcgcttcaacctgggaggtagaggttgcagtgagccgagattgcgccactgtactccagcctgggcaacagagggaaactctgtctcaaaaaaaaaaaaattatgaatatgagaaattactgatctgtattaatgtcatccctgccccctttgagctgaacttcagtttaccaagtattgtttcttctaaagattttttcatgacactactggttaatacataactgagagttaataaattttgctgtgttacagtctaatttgctctctaccaacagagaccttctttctttttctgtttagtttttcaaaacaagagttatttaatgtgcttgaaaactagacatttttcctagttgtgttcactgaattagcatttattatagtaccgactagatgtgctataccacacaaagataaatgaggctgtggcctggaagaggtaggcttgtaaagtcattatgctactcccaaataagtgctttaaaagagatgtgagcaaagtcccctcaaatgcagaagacagtccggtccaacacagaagaaaaagcaaaacttgctggctggggcaaggttaatctggacacgacctagttttctccagtttggcatttttatttattttttcgagacagagtctcattctgtcatccaggctagtacagtggcacaatctcatctcactgcaacctcctccttccgggttcaagtgattcttatgcctcagcctcccaagtagctgagattacaggcatgtgccaccatgcccagttaattttttgtatttttagtagagacagtgtttcgccaggttgcccaggctggtctcgatctccagagctcaggtgatctgccggccttggctcccaaagtgctgggatattacaggagtgagccaccacgcctgattattttggcatttttaaactctttctttaatataacaaaaaaaaaaaaaacaaaacaaaacaggttttgtggtcaatttgaaaacaaattgaagtaattttttttttttttgagacagaatctctctctgttgcccagactggagtgcagtggcgtgacctcagctcactgcaacttctgcctcctggcctcaagcgatcctccgtcctccgccttccgagtagctaaagctacaggtccatgctgccatgcctagcaaattttttgtattttttgtatttttttgtagagacgaggttttgctatgtagcccgagctggtcttgagctcctgagctcaagcgatctgcctacctcagcctccttatgtactgggattacaggcatgagccactgtgcccagccacttttgtctttttagtaaaccaggtttttcattgtttttttttttttaaattcctcttccaggtggtttatgcacatagtttccaggaaactccgtcgtcatcaaaacccaccaaattagcagtttaaatgtgtttgttttttccttgaattcttctatgacggggatatttaacagagaaaacatctttttagttgaagtctctaaagctaaggaaaggataaaaaaatgcgaattggtgctctgctttgatgtaaatgtggcttagaaagtaacttaataaaatcctactcagtatttcctttttctttgtgataattgcttactatgtgtaaatcaataaagtgagctgtaaaatgtttttaaacaggacattttagaaaaaaatgtttaggcaattaacatttctcacagtgtttcttctaattttgttaatgtacatatatatgtacctggactcatcttttgtgaatgcacatgctctttttcattttgcatgactagtaaagtagtgattcttgtaaatagagatttatgacagaattgccacaagattctttcaaacttgaggtattcacactgccacctcatactgtgtggtgaaaactagattttttataaaatcataaaaggagagaaggaagaaataaatgaaattgtatgttcaaaaaaattagaaccctaaaaacatttgtatttttattgtatagtcagaaaaaaaagaagggagggtatttgaatctcacaagaaaggggcctgagtagtttgaaaaagaatactagacattgtcacttacttgttttctaattactctagtgggcatttgataatactggaagatatttataaaatttttaaaccctagggtctagcttctacttagtatctcccttcaagaatgtcctgattaaaaggctatactataaattaagtggatgattattagtaagcattcaaaaagagatttcgtctttttaaatgactttatgaaaatatgaaatttgcctgtggtatttatagtgtgcagtcatggttttccagtgcttttctaataaataaatcggagtacataagttgaaagagttctatatatatataaatcattctgtgattaattaatgctttttaataaatcagctgcgagagcactactcatgatgggcgtgtttgaatgccttatatagactactcagaacaggtttagacagtctttgccccgttgacctgttaccatatttatcagagtagatatagattatagtctttctaatgatgttctgcttcactctgaccaatatctaataaacacttaacctatattaggcatttcaccatctttctgtctctcttttttggaatggagtcttgctatgttgcccaggctggtctcctggcttaagtgatacccttctgtctcagcctcctgaatatctgggattacaagtgcccactaccatgcctgatttttttctcttttttgacaactcataccgacagtactaagaattcccaaactgatggatgaaagtgaatatgcctcattggcattttttttttttttttttttttgtgacagtcttgctttattgcccaggctggagtgcagtagtgcaatttcccaggttcaagagattctcgtgctttaccctcccgagtagctgggattacaggcgttcaccaccacacccagctaatttttgtatttttagtagagatgggttttcaccacattggccaggctggtctcgagctcctggcctcaagtgatctgcctgcctcacccctcaaagtgctgggattacagacatgagccaccatatctggccaacttttttttttttttttggtgagaccgagtctcactctgtctcccaggctggagtgcagtggtgtgatctcggctcaccgcaagctccgcctcccgggttcaccccattctcctgcctcagcctcctgagtagctgggactacaggcgcccatcaccacgcctggctaattttttaaaatatttttagtagagacagggtttcactgtgttagccaggatggtctcgatttcctgacctcgtgatccacccgcctcggcctcccaaagtgctgggattacatgtcttgccatgttgcccaggctggtctgaaactactggtttcaagtgatccacccacctcagcctcccaaagttctgggattatgggtgtgacccaccgttcccagccttgtatgtcttcttttgaaaagtgtctgttcatgtcctttgcccactttttattggggatatttgttttttgctgctgatttttttttaagttccttatagactctggatatcagatctttgttggatgcatagcttgcgaacattttcttgcattctgtgggatgtcttttttttttttttttttttttttgaggcagagtctcattctgtcacccaggctacagtgcggtggtgagatgagatcatggctcactgcagcctcgactttctgggctcagtgatccacctcaggatctgcaaatgtctttccatttgtttgtgtcatctatggtttctttcaacagtgttttgtagttcttgtagagatctttcacctccttggttagatatatcctaggtattttgtgtgtgtgcatatggctattgtaaatgggattgcacaagactacaggcacatgccaccacacctggataatttttaaatttttttgtagagacaggtctccctttgttgcccaggctggtctcaaactcctgggctcaagtaatcctcctgccttggcctcccaaagtgctgggattacagatgtgagccattgcacctgacctgtttactcttggtagtttcttttgctgcgcagaagctctttggtttaattaggtcccacttgtcaatttttgtttttgttgcaattgcttttgtggacttagtcatgaaatatttaccaaggccaatatcctgaagggtatttgctagggtttcttctgggatttttatattctgaggtcttacatttaagtgtttaatccatcttgagttaatttttgcacatggtgatagttaagggtccagtttcattctgcatgtggttagccagttatctcagcaccatttattgagtagggattcctttcccagttccttgtttttgtcagctttctcaaagatcagttggttgtaggtgtgtggctttatttctgtgttccctattgtgttccactggtctgtgtttctgtttgtgcaccagtgccatgttctttttcactagccttgaagtagagtttgatgttgggtaatgtgatgcctccagctttgttgtttttgttttagatcctttggctatttgggctcttttttggttccatatgaattttagaatagttttttctaattctgtgaaaaatgacattggtaatttgataggaatagtgttgaatctatagattgctttggggagtatggtctttttctttcttctttctttctttttttttttttttggtgctgtgacttcgatgcaaaccaaggttgctgcagacacagtatggtcattttaatgatattgattcttctaatccatgagtgtggaatgtgtttccatttgtttgtgttatctgtgatttctttcaacagtgttttgtagttcttgtagagatctttcacctccttggttagatatattcctaggtattttatgtacatgtatgactattgtaaatgggattgcatacttgatttgactctcagctcgaacattattggtgtataaaaatgctactgatttttgtatattgattttgtatcctgaaactttaccaaagtcttttatctaggagccctttagcaattctatgtatagagtaatatagtcagtggagagatatttgacttcttttcctattttggtatcttacttgattgttctggctaagattttcagtactctgttaaatatgagtgaaaagagtggccaaccttgtcttattccaattcttaagggtaatgcttccagctttttcccattcatatggtgttgtctgtgggtttgccatagatggctctttttattttgagttatgttccttcaatgcctagtatgttggaggtctttattatgaaaggatgttgaattttatcgaaagctttttctgcatctattgagatgatcatgtggtttttgtttttaattctgttgatgcagtgaattgcatatattgatttgcatatgttgaaccaaccttacatcccaggagtaaaacctactggttgtggtgtattaacttcctaaagtactgttgggtttggtttgctagtgttttgttgaggatttttatatctgtgttcatcaaggatattggcctgtagtttctctttttgatgtgtctttgccagattttggtatcaggataatgctggctttatagagtgatttggagaggagttggtattttggaatattttcagtaggactggtaccagttctttgtgcatctagaattcagctgtgatttttctggtccagggctttttttggttgataggttttttatttattacgattcaattttggaactcattattggtttgttcagaatttctgttttttctgagtcagtcttgggaagttttatgtttccaggaatttatccatttcctctagattttctttgctgtgcagaagttctttagtctaattaggtcccacttgtcagttttggtttttgttgcaattgcttttgaggactttctctttctctctctctttttttttttttttttcttgaaacggagtcttaatgctgggcgcggtggctcacgcctgtaatcccagcactttgggaggcataggcgggcggatcacaaggtcaggagatcgagaccacggtgaaaccccgtctctactaaaaatacaaaacattagctgggcgtggtggtgggcacctgtagtctcagctacttgggaggctgaggcaggagaattgcgtgaacctggaaggcggagcttgcagtgagccgagatcgtgccactgcactccagcctgggcaacaaagcgagactccgtctcaaaaataaataaataaataaatagaaacaaggtcttacctaggctggagtgcagtggcatgatcatggctcactgcagcctcaacctcccaagctcaattaatcttcccatctcagtcttctgagcagctggagctacagatacacaccaccacacctggctaatctttaaaaatttttgtagcaattgggtctcattttgttgcccagggtggtgtcaaacttctgacctcaagtgattctcccacctttgcctccaaaagtattgggattacaggtgtgagcccatttcctctaaattttctggtttgtgcacatagaagtgttcataatagtctctgaggatcttttgtatttctgtggaatcagttgtagtgtcacctttgccattttctgattgtgcttatatggagcttccctcttcttttctttgttaatctagctaggagtttatcgatcttgtttatcctttcaaaaaatcaattttttttgttttattgatcctttgtatggattctttagtctcaattttgtttagttctgctgttattttagttatttcttttcttctgctagctttggggttagtgtgttctcgtttatctagtttccctagatgcaatgttagattgttaatttgagatctttctaacttgatataggtgtttagtgctataaacgttcctcttaacattgcttttgctgcatcccatatattttgatatgttgtgtctgttttcatttatttcaaagaatatttcaatttctgcttaatttcattgtttattcaaaagtcattctggagtatgttgtttactttccatgtaatttgtgtggttctgagagatcctcagtattgatttctatttttattttactatggtctcagaatatatgcttggtatgatttcaatttaaaaaaaatttttgagacttgctttacggccaagcatgtggttgaccttagagtatgttccatgtgcagcttcatcagcatttatcttggtgataacatggattccatgacaggtattaatggtacaatttttatgttttaaaagtggtagtttgctaaggaaaatatgaagagagctgatttcacttttagtggttgtcatttaataaagtgagatgtgaggttgggcagggtagctcacgcctgtaatcccaacactttgggaggcaaaggtgggaggcacactttagcccaggagttcgagtccagcctgggcaacatggcaaaaccccatcgctactgaaaatacaaaagttagccaggcatggtggcatatgtctgtagtcccagctacttgggaggctgaggtgggaggattgcttgaacttgggaggttggggcttcagtgagccgtgatcacaccaccgtgctttagcctgggcaacacagtgagaccctgtctcaaaaaaaataaatcaagtgagatgtgagaaggaatttttctattcttgaaatgcatgtagggatagtctttatgcctagtcaagcctaaaacacttttttaaaaagagatatttgttatatatgattaaggcagctattataatattactattctaagttactaacttttgaaaactttttaaattttgtagtttttatgacatgttagtaaatttttatgatggaacttttctttactaacaggtgcattccttgtaaaggttctcggtttcccccaacccttccacgccctgctgttgctatattatcctttaagcttccttactgtcagattgcaacagagaaaggacaaatggaggtatgtggaagtcttaccttgacactttgaatttgataatacagcacctgtgatacacacactttaaaattatcctgatggccagtattgaatattcattactgtataattacataaataggggtagcagggagggaagaggactgcttgggatcaccaggccacctgattgccatcactgcttccagggactttgtctacaaagtaaatgggtgtgactgtcagagacccactggggaaagacttactctcaggatggggcatgtccctgagaagaagtgcctccatacattttgtgccataacacctggcttgcctgaccctagtcctagccttgtgtcatcaaaagtcatttgaaatcttgcagttagttattctaaataagaaacaagttagcttttaaaaatcttgtttaccaaattctctgagcattaattatgatagctaggaaactgttttaaatgctgtattcctccccagctgccttttttaaggataggggaaaaagttaagctgtagtatcacactagaatttaaattgtaaaataaacttatagaaaggaagagttcagaacatattttattcaaaaactggtatcttaagataaatatttaacgcttgcctcatattaaggtgatagttggccttaagcaattttatttgcttttataggagcaattttggcgttcagttatatttcacaaccaccttgattatttagctaaaaatggttatgaatatgaagagagcactaaaaatcaagcaacaaaagagcaacaggaacttttaatgaaaatgcttgcggtgagtaaaataaatatactgaaaacgttaaagttaaatgcttttctataggttgaatttcttaaaggtctgtgcattaggactaagtcccacaacctaagattcttaagtttttttttgttgttgttgttgttttttgtgcgacggagtctcgttctgtcacccaggctggagtgcagtggtgcgatctcggctcactgcaacctctgcctcccgggttcacgcaattctgcctcagcctcccgagtagctaggattacaggcacacaccaccacgcctagctaattttttttttttttttttttttttttagtagagatggggtttccctatgttggcccgactggtctcgaactcctgacctcgtgatccgcccgcctcagcctcccaaagtgctgggattacaggtgtgagccaccacacccagccattcttaagttttatctggtggtgttttcccttgtaaagttctatcttctagttggtcttgcagttaaaatttttttctttttttttttttaggcggagtttcgctcttgtttctcaggctgaagtgcagttgtgcagtcttggcttactgcaacctccacttcccgggttcaagtgattctcctgcctcaaccttccgagtagctgggactacaggcgtgtgccaccatgcctggctaatttttgtatttttagtagaaacagggtttcaccacattggtcaggctggtcttgaactcctgacctcaggtaattcacctgcctcggcctccgaaagtgctgggatcacaggcatgagccaccgtgcccagcctaaaataaataaaacagtaccttgtagctaagatcatgtgcaggaataaacatctctagggctacttcccttttgcttttgcccatcagtctatgttttaacgggctctcaaggtaactgagaaccactgctctagtttctgttattattttacaaagtttgagtatatactgttttttaatctccagggctgggcaatcttaagaactttgatcgggctgttagatatgcctgccttttgtcatcctctttgagttaggcagctgtgtgtgatgaaaatttatttgtgaccagtggccaggtttggtgtctagaatatttaagtacatttatctttggagcagggtgtcttaaagttcctgtgcttgtgtccccactcaaggttggtttatggagaggagtatagtatcatttcttctttatttgtcttacactagactttatgccccagagggcagagacctgctcactgctgtatgccaggcactgacatggtggcttaacacatagtagacctcgatatttgttgacaagagtgaatggtccagacttttaattttaaaattggagaaaaaaggttcttagagaaaagtggtatatgagaccacagagcaaattgccactcttgtctccaaaaggtagtactcactactgtcacctttatgcaacatggccttaagtttggtattaagaaaactcagtttattgtagaaaaagttttattccttttataaagtgttacttgtggtccaggaactagtagcctttttatttgtacaacacatataaggaaacatatttcatgtatttgctatttagcctagaggagcttttccctgtggcagtgtttctcatatcaaaaataccaggggactcatatcaaagatgccagggcaggaggatatcttgagcccaggagttcaaggggattgttgagttcttctttagcattcctgacccccgggcaaatgcctttagttcagaatagtcactgtggaaaccagactattcctttttatttctttttttttttttgaaacgaagtctcgctctgttgcccaggctggagtgcagtggcgcgatctctgctcactgcaagctccgcctcccaggttcacgccattctcctgcctcagcctcccgagtagctgggactacagttgtctgccaccacaccagctaattttttgtatttttaatagagactgtgtttcaccgtgttagccagtatggtctcgatctcctgaccttgtgatccacctgtctcagtctcccaaagtgctaggattacaggtgtgagccactgcgcccggcttcctttttatttctaaatgccccctgaggcagtgtaccatcccgattaagaagtactgattatagataaatgatactaaaaatcttgaaaagggcatccaggtgaatatctaaagcttttgtgctgatggatcagacatggaatatctaagtaagaaaatagttctaatacactatgaattaggagacccttagtaatcttcaaaataccaacttttctcagtttgttgtttttcttttttgtattttttagagaaagggtctcactctgttacccaggctagagtacagtggcaagattgtaactcactgcagcctcaacctcctgggctctagtgaacctcctgtctcaggctcctgagtagataagactgcaggtgcatgccaccacgcccagctaatttattttttgtagttatagggtctcactgtgttgcccaggttagtctcaaactcctggcctctagcagtccctctgccttggccttccaaagtgctaggattacaggtgtgagccagcacacctggcccccttgattttttttttttttttttttttgagacagagtctcgctttctcgcccaggctggagtgcagtggtgcaatcttggctcactgcaacctccacctcccgggttcaagcgattctcctgcctcagcttcccgagtagctgggattacaggcgcacgccaccacgcctggctaattgtgtttttagtagagacggggttttgccatattggccaggctgatctcgaactcctcacctcatgatccacccatctgggcctcccaaagcactggtattacaggcgtgagccaccgtgcccagcctcccccttgaattttttaaacaaatttcttaattttcttgcaattagtagattaaagtggtatgtaatatttcatcaaatctaagccactgtttattgcatagtgcaccattactttattcatttaagccatggagacataaaaatgctgccaaactgacccaccattaattgtaattaattgtaattccaatttcagagatgttaaaacttgtaaaaatgtgcatcttagaattagggagatagagtagctagaaaactattgtctcagttttactagtagtgtcagtatctttaaaaagttttacttgatgttatttgatctcccccccccccccctttttggattagctttcttgtaaactggagcgagaattccgttgtgtggaacttgctgatctaatgactcaaaatgctgtgaatttagccattaaatatgcttctcgctctcggaaattaatactggctcaaaaactaagtgaactggctgtagagaaggcagccgaattgacagcaacccaggtggaagaggaagaagaagaagaagatttcagaaaaaagctgaatgctgggtaagaaataatttagttgtttgaattttcctttactgtcttgaatgttaagttggtctttgcatagctctttattgaataatattattttctcttagttacagcaatactgctacagagtggagccaaccaaggttcagaaatcaagttgaagaagatgctgaggacagtggagaagctgatgatgaagaaaaaccagaaatacataagcctggtgagatacattttcaagcccataaatcatgagaactatcatggatgtggcttttcccattttgcttaactgagggaaattgaatactcatactttttttcagacctctttgctatctggttgttgtatattgaggatgactatattttccccatttacattatattgctttattttaatctgtaggacagaactcgttttccaaaagtacaaattcctctgatgtttcagctaagtcaggtgagaaatatttataaatttgtaatatcaaggaaattttgcaagtcatctgcaaagtgacacatctacgcaaatacaccttaactcttaaggccacttttggtgtgtgtgtgtttatgtttttgtttttttaatctcagatgttgtttgtgaagctatggtcatttaacagatgtttataaaatgcctattgagtgtcaggcattttacttaatggtggatacagaagtcaaacagacatgtgtggttgatctctgttttaatgctattttagcccagctgagaagacagatgttgaagacagatctgggtatcactgaggaagcatgcaggatactggagaaacagttaaaaggaattgaaggctgggcgcagtggctcacgcctgtaatcccagcactttgggaggccggagtgggcggataacgaggtcaggagttctagactagcctggccaacacggtgaaaccccatctctactaaaaatacaaaaattagctgagggtggtggtatgtgcctgtaatcccagctactcgggaggctgaagcaggagaatcacttgaactcaggaggtggaggtagcagtgagccgagatcgtgccattgcactccagcctgggcaatggagtgagactccatctcaaaaaaaaaaaaaaggagttgaaaatggttgcgtacagggagtgggcctgggggataagagaaggttgaagtaaggcactgctggcccttttttggtggggagcataaaccttatagtaccatttgactttttaaactgtggacatatgttactttgatttaaaaaaattaacttaaaaaacatgtagaatatgaaaagagcgtatgacacatagctgtcatctagccagtggtggaggatgggtagggacttcaaggcaggcctcatggagtgtttacagcagagacctgaaggatgaataacagtcagcaaggcaaaggtgcatgggaacaggagcagaagagaagcatttgggcttaaggaacagtatgtgtgaactgaaggctgcaaaagggtggtgtgaaaagctcagagagcaaagagaaagtggtgctgaagggtttcggagtgatgggcaggagccaagtcatgcagatctgtgtaggccatattaaggattttggtcttttttttattttattttattttttttaatagagatggggtgtcactctgttgtccaggctggtctcaaactcaagcaatttcctcacctccacatcccaaagttgttggacctgcaggtgtgagccaccacacccggtcaggattttgctctttattctaaggtcactgagagactgttgtaggttttaagcagaggtatagcatggcacactgtgctgaagaagaacagataatagactactggccaggtgtgatggctcatgtctgtaacctcagcattttgagaggccaaggtggaaggatcacttgagaccagacgtttgagaccagccttggaaacaatgaaaccctatctctacaaaaagtaaataataaaaatattagccaggcatggtagtacacaccggtagtcccaggtatttgggaggctgggacaggaggatatcttgagcccaggagttcgagggtgcagtaggctatggttgcaccactgcactccagcctgggtgacagagcaagaccctgtatcaaaaaataaataggccaggcgtggtggctcacgcctgtaattccagcactttgggaggccgaggcaggtggagcacttgaggtcaggagttcaagaccagcctggccaaaatggtgaaaccacatctccactaaaaatacaaaaaaaaaaattagccgggcatggtggctcatgcctgtaatcccagctactcgggaggctgaggcaggagaattgcttgaatccaggagtggggagttgcagtaagtggagatcacgccactgcactccagcctaggtgacagagtgagacttcatctaaaataataataagaagaagtaaataaaaattaaaaaataaagagactacaagctgggcgtggtggctcacacctgtaatcccagcactttgggaggctgaggagggtggatcacgaggtcaggagattgagagcatcctgaagaacacagtgaaaccccgtctctactaaaaatacataaaaattagccgggcatggtgacaggcacctgtaatcccagctacttgggaggctgaggcaggagaatggcgtgaacccgggaggcagagcttgcagtgaggtgagatcataccaccgcactccagcctgggcgacagagcgagactccatctcaaataaataaataaacaaacaaactacagaggcagtccaaatgagattgaataagggcctgagctagggtggtgatggtgatgttagaaagaatgggcagagttggagagctatttctgaagatgatgaagagagtgtaggagttcagggcgtaaagagtgattctcagtttcttgtaatagaagaaaaacttaagcacatttgaatcttgaaggattaatttgaacattcagtgattcatgaatcagggaggcaccaaaccgcaaggggctagcactctgccaggagagacaaaaggggaaacttttataaagtattttcagaaacgagataaataaaacaatttttattggctagatggaaaggtttttttgtttgttttttttgtttggtggggggggtgcggatacagggtatcttgctttgtcactcagactggagcagagttggagtgcagtgatgcagtcctagctcgctacagccttgaactcgtatgctcaggtgatcctcctgcctcaccctactgagtagctatgactacagttgtgcatcaccatgcctggttaattttttgtgtgtactttttgtagagagaggagcttgctttgttgccgaagctggtctggaactcctgggcttaagtgaccctcctgccttagcctcccaaaattttcggattacaggcacaagtggccatgctcagctagaaatttcctgcctgcctgcctgcctgcctgcctgcctccctccctcccttccttcttccctccctccctccctcctcttccccccgccagggtgtgactgtcatccaggttagagtgcagtggcgtgattatggctcactgcagcctcaaccccccagacccaagcgatctttccacctcagcctcccaagtaactaggaccacaggcatgtgtcaccatgtctggctagttttgttttggtttgggttttttgttttgttgttttttgtttttgtagagacagggtctccctatgttacccatgctagtcttaaactgggctcaagcagtcctccctcctcagcctcccaaagtgctgggattacaggcttaagccaccatgccaggaaagctcttaattagagattagtttgttaacactggcttgagtacttgagtgaatgatggtgccatttcctaagtcaggaaacactagagaaaagcagatttagagaggaagatgatgaattactgtaaggtgagtagaatgtcgtgaagacagatatttgaatcaggagctcagggaagtattctggtcaagagatacaaagtgaaaatcattggcataagtatagcaatttaaaccatgagcatgggtaagcaagcattgggggagaatgtaaagcaaaaagaaaaatgagcttaagcctagggaatctccaacatttgagcatcaggtagaggaagaggaggaaccaactattggaacacaatgagtccacaggtccagagaggaaggaactaagtcagggaatgcagtatctcagaagtcaagagaggacaaagtatcaagaagtaaggaacagtcagctatgtgggatgccattgatagagcaaacaaggtgactgaaaggtatccaccagatttgacaatgtagagatcactgagggccttagcaagaggagattctgtagggtggtagagctggaagtgctatattgtatggaggaatgtatgggtggtgaggaaatgataatagtgtcaacagttcttggaaaaatttggctggatgaccgggcgtggtggctcatgcttgtaatcccagcactgtgggaggccaaggcagacggatcacctgaggtcaggagttcaagaccagcctggccaacatggtgaaaccctgtctctattaaaaatacaaaaattagccgggcgtggtagcaggcgcctgtaatcccagcaattcgggaggctgagacagtagaatcgcctgaacctgggaggtggactttgcagtgagccgagatcacaccattgccctccagcttgggcaacaagagcgagactctgtctcaaaaaaaaaaaaaaatggctggatggaggaggcgagagaaaatggtgactggaaggaatgtggggtagagaaggtttgttttttgtttctttttaagttgggagactttaggggccaataaatagggaaaagtcaaagatgtaggatgtcaagaaacttgataggtcaggttttctgacaaagcaggagggcatgggatgcagaacacaagtaaagggattactaaccttagctcagacgagctgccactcttccgcagtaacagaagataaaagatctgtacatactgaatatgtttcatagtggcacgttggggtggttcacatttaatagcttttattttggcttagaagtaggaaagaggatatctgttgttaatagttttgaaaagttgcaaaatacatttgttttcatttaatggggattaaaatactctgtctagtattatagatgtcagaagtcatctattttctaccattattaagcaagggtttcttttttgtgaaaggtgcagttacctttagcagccaaggacgagtaaatccctttaaggtaaactcttccaagtgatgttttatattatttaaatacatttgtatacaaagaaatatttccaaatgatgagatgactctccccagacttggaggcatgaaagactgatctgtgtggaaacagaagaaagcagcacttgggctgagagttgtcttttctacttaccttctaagtacctatggttttgaaagatacctctgtctttcttggggatgtggtatttgggaatatacgtatcattcttaatttggattgtaccaaatgtatttagttctaaagatgagatggcaatacaaacttaacagaaatttcaagaaaaaataagtctcttgggattttatttttcttctttaaacatacagtgctaacactagtttgctctttaggtatcagccagttccaaagaaccagccatgtcaatgaattcagcacgttcaactaatattttagacaatatgggcaaatcatccaagaaatccactgcacttagtcgaactacaaataatgaaaagtctcccattataaagcctctgattccaaagccgaagcctaagcaggtactgtttcagctaccctcatctgcagtaagcagcatgggatctgtttgtcttcagttttgttcactgtttcagatataggataggaggttctgattgtttacaattgtcttgctagggaagtgggttcaattctgtttttgcagctaggcacagtggcacatacctgtagtcccagatactcaggaggctgaggtgggaggatcacttgagcccaggagtttgagtccagtctgggaaacataagagataccccatctgaaaaaaacaaaccccaaaacagttgtgttttttgtttcagaatcactccctattctgcctcgtgagttgttacacactttgtagcagattctgacttccaagatcactatcctgctccccctgtcttttttgagacagaggctcactctgtcacccaggctggatggagtgcagtgtcaggatctcagctcactgcagcctctgtctcctgggttcaagcaattctcatgcctcagcctcccgaggagttgggattacagaggcctgacatcacgcccagctaattttggtatttttagtagagatggggtttcagcatgatggccaggctggtctcaaactcctggcctcaagtgatccacccacctcagcctcccaaagtgctggtattacaggcatgagccaccgcacccagcctatcctgcccctctccttgtttttacagatcactttttaaaaatatatatactcagaccccagaagctcagacatttatctgtatttttattaaaatcacccagatagttctgatgtatattcgtatttaatagtggctgatattgtacatggccctaatttttccttgttctgagtcctgatttttccactctgataagtatttgatcccggattagtcattggtaaaatagatctattgcttatcttttctatttaatataattgtattcatttagaaaacatggaatttaggccagccgcggtggcaggtgcctgtaatcccagctacctgggagggtgagtcaggagaaccacttgaactcggagggtggaggttgcagtgagccgagatagcgccactgcactccagcctgggcaacagagtgagactccgtctcaaaaaaaaaaaaaaaaaaaaggaaaacatggaatctgaagtgtagttttttggttttgcatgtgtttgcctatttatttacaactgagaactccagatttcacatgttagtataagaattctcaataattatagatgtttcttcacatttttcagaacgtgcttataaaacatataaaattatactagatgttattgcagtattcatgtttgtttttataggcatctgcagcatcctatttccagaaaagaaattctcaaactaataaaactgaggaagtgaaagaagaaaatcttaaaaatgtattatctgaaaccccagctatatgtcctcctcaaaacactgaaaaccaaaggtcagtacatagagaaatttagcatgcagtgaccaagtaaaaagtatacagtagcagcaatacaaaattatgcaatgctgttattccttaatacaaataatacattggcattggtagtgggcattctggacacttgtgactataaggaagccacaaatattaatgtctatttataatatttattaaaatatgctttaataaattgtatatttttaaattgtggatatattttattgggacattatattttgtaattaattttttgtttgtttttaaatagtttaatggggagaaatagcaaaagatacaaaaagaagagtgataataagtagtttcatccaactaatttctgtctccaaaaacaatcactgcaacaagtttcttgtggaactttccaaaattattctatttatgtgcaaatacatatttgtctattttttgttttacacattattctgtaccttacttttttaacttaacaatagcttttgtagcttattttatattactacataaagaacttctttatactggctgggcatggtggctcacgcctataatctcagcactttgggaagccgaagcaggcggatcatctgaggatgggagttcgagaccagcctgaccaacatggagaaaccctgtctctattaaaaatacaaaattagccaggcttggtggcacatgcctgtaatcccagcaaatcggaaggctgaggcaggagaatcacttgaacccgggacgcggagattgcagtcatctgagatcacaccgctgcactccagcctgggcaacaaaagcgaaactctgtctcaaaaaaaccaaaaaaacaaaaagaacttctttatactatagcaaggctatcagaaaaagtaaatacataaatggatggatagatagaaaaataagagctttaatctttgtgtatccattgaatagacatgtcatagttcatgtagttctctacttgtggacaaaagatggttaccggtcttttgctagtacagacagtactgcaatgaataattttatatgaatagcatttctcacagatgcatatatagctataagatggattcatgtatggttcaagttaatctgcacttataattccaatgccagattgttctgcattgatgttgtatcattttatacacctttagcaatatgagtattcctatttgctcatatcctctttgtccacaaacacagtatgttacctattttcttgatctctactatgctggatttctttgtatttatttattttttctgagacggagtttcgctcttgttgcccaggctggagtgcattggcacgatcttggctcactgcaacctccgcctcccaggttcaagcgattctcctgcctcagcctcctgagtagctgggattgcaggcatacgccaccatgcctggctaattttatatcttttttttttttttaaatacttttaagctctagggtacatgtgcacaacattcaggtttgttacatatgtacacatgtgccatgttggtgtgctgtgctcatcatttacattaggtatatctcctaatgctatccctccctacttcccccaccccacaacaggcccaagtgtgtgatgttccccttcctgtgtccaagcgttctcattgttcagttctcacctatgagtgagaacatgcggtgtttggttttttgtccttgagatagtttgctgagaatgatggttcccagtttcatccatgtccctacaaaggacatgaattcatccttttttatggctgtatagtattccatggtgtatatgtgccacattttcttaatctagtctatcattgatgaacatttaggttggttccaagtctttgctattgtgaatagtgccacaataaacatacgtgtgcatgtgtttttatagcagcatgatttataatcctttgggtatatacccagtaatgggattgctgggtcaaatggtatttctagttctagatccttgaggaatcgccacaccgccttccacaatggttgaactagtttacagtcccaccaacagtgtaaaagtgttcctatttctccacatcctctccagcacctgttgtttcctgacattttaatgattgccattctaactggtgtgagatggtttctcactgtggttttgatttgcatttctctgatggccagtgatgatgagcattttttcatgtgtctgttggctgcataaatgtcttcttttgagaagtgtctgctcatatccttcgcccactttttgattgggtttgtttttttcttgtaaatttgtttgagttctttgtagattctggatattagccctttgtcagatgggtagattgcaaaattttttcccgttctgtaggttgcctgttcactctgatggtagtttcttttgctgtgcagaagctctttagtttaattagatcccatctgtcaattttggcttttgttgccattgcttttggtgttttagacatgaagtccttgcacattcctatatcctgaatggtattgcctaggttttcttctggggtttttatggttttagatctaacatttaagtctttaatccatctggaattaatttttgtataagatgtgaggaatggatccagtttcagctttctacatatggctaggcagttttcccagcaccatttattaaatagggaatcctttccccatttcttgtttttgtcatgtttgtcaaagatcagatggttgtagatgtgtggtattatttctgagggctctgttctgttccattggtctgtatctctgttttggtaccagtactgtgctgttttgtatagtttgaagtcaggtagcgtgatgcctccagctttgttcctttggcttatgagtgacttggcaatgcgggctcttttttggttccatatgaactttaaagtagttttttccaattctgtgaagaaagtcattgatagcttgatggggatggcattgaatctataaattgccttggacaggatggccgttttcacgatagtgattcttcctatccatgagcgtggaatgttcttccgtttgtttgtgtcctcttttatttcattgagcagtggtttgtagttctctttgaagaggtccttcacatcccttgtaagttggattcctaggtattttattctctttgaagcaattgtgaatgggagttcactcatgatttggctctctgtttgtctgttattggtgtataagaatgcttgcgatttttgcacattgattttgtatcctgagactttgctgaagttccctatcagcttaaggagattttgggctgagacgacggggttttctaaatatacaatcatgtcatctgcaaacaggtacaatttgacttcctcttttcctaattgaataccctttatttctttctcctgcctgattgccctggccagaacttccaacactatgttgaacagaagtggtgagagagggcatccctgtcttgtgccagttttcaaagggaatgcttccagtttttgcccattcagtatgatattggctgtgggtttgtcataaatagctcttattattttgagatacatcccatcaatacctaatttattgagagttttttagcatgaagcgttgttgaattttgtcacaggccttttctgcatctattgagataaccatgtggttttagtctttggttctgtttatatgctggattacgtttatttatttgcgaatgttgaactagccttgcatcccagagatgaagcccacttgataagttttttgaagtgctgctggatttggtttgccagtattttactgaggatttttgcatcgatgttcatcagggatattggtctaaaattctctttttttgttgtgtgtctgccaggctttggtatcaggatgatgctggcctcataaaatgagttagggaggattccctctttttctattgattggaatagtttcagaaggaatggtaacagctcctccttgtacctctggtagaatttggctgtgaatccatctggtcctggactttttatttggttggtaggctattaattattgcctcaatttcagagcctgttattggtctattcagagattgaacttcttcctcgtttagtcttgggagggtgtgtgtgtccaggaatttatccatgtcttctagattttctagtttatttgcatagaggtgtttatagtattctttgatggtagtttgtatttctgtgggatcagtggtgatatcccctttatcattttttattgcatctatttgattcttctctcttttcttctttattagtcttgctagcggtctatcagttttattgatcttttcaaaaaaccagctcctggattcattgattttttgaaggcttttttgtgtctctatctccttcagttctgctctgatctcagttatttcttgccttctgctagcttttgaatatgtttgctcttgcttctctagttcttttaattgtgatgttagggtgtcaattttagatattttctgctttctcttgtgggcatttagtgctataaatttccctctacacactgctttaaatgtgtcccagagattctggtatgctgtgtctttgttctcgttggtttcaaagaacatctttatttctgccttcatttcgttatgtacccagtagtcattcaggagcaggttgttcagtttccatgtggttgagcagttttgggtgagtttcctaatgctgagttctagtttgattgcactgtggtctgagagacagtttgttataatttctgttcttttacatttgctgaggagtgctttacttccaactatgtggtcagtgttggaataagtgcgatgtggtgctcagaagaatgtatattctgttgatttggggtggagagttccgtagatgtctattaggtctgcttggtgcagagctgagttcaattcctggatatccttgttaactttgtctcgttgatctgtctaatgttgacagtggggtgttaaagtctcccattattattgcgtgggagtctaagtctctttgtaggtctctaaggacttggtttatgaatctgggtgctcctgtattgggtgcatatatatttaggatagttagctcttcttgttgaattgaattgatccctttaccattatgtaatggccttctttgtctcttttgatctttgttggtttaaagtctgttttatcagagactaggattgcaacccctgccttttgttgttttccatttgcttggtagatcttcctccatccctttattttgagcttatgtgtgtctctgcacatgacatgggtctcctgaatacagcacactgatgggtcttgactctttatccaatttgccattctgtgtcttttaattggagcatttagcccatttacatttaaggttaatattgttatgtgtgaatttgatcctgtcattatgatgttagctggttactttgctcattaattgatgcagtttcttcctagccttgatggtctttacaatttggcatgttttttcagtggctggtaccggttgttcctttccatgtttagtgcttctttcaggagctcttgtagggcaggcgtggtggtgacaaaatctctcagcatttgcttgtctgtaaaggattttatttctccttcacttatgaagcttagtttggctggatatgaaattctgagttgaaaattcttttctttaagaatgttgaatattggcccccactctcttctggctcatagagtttctgccgagagatcagctgttagtctgatgggcttccctttgtgggtaacctaacctttctctctgaacattttttctttcatttcaactttggtgaatctgacaattatgtgtcttggagttgctcttctcgaggagtatctttgtggcattctctgtatttcctgaatttgaatgttggcctgccttgctaggttggggaagttctcctggatagtatcctgcagagtgttttccaacttggttccattctccctgtcactttcaggtacaccaaacaaacgtagatttggtcttttcacatagtcccatatttcttggaggctttgtttgtttctttttactcttttttctctaaacttttcttctcgcttcatttcattcatttgatctttgatcactgataccctttcttccagttgattgaattggctactgaggcttgtgcattcgtcacgtagttctcgtgccatggttttcagctccatcaggtcatttgaggagttctctacactggttattctagttagccattcgtctaatcttttttcaaggtttttagctcctttgcgatgcgttcgaacttcctcctttagctcggagaggtttgatcgtctgaagccttcttctctcaactcgtcaaagtcattctccgtccagctttgttccgttgctggtgaggagctgcgttcctttggggggggagaggtgctctgatttttagaattttcagcttttttgctctgttttttccccaatctttatggtttcatctatctttggtctttgatgatggtgacgtacacatggggttttggtatggatgtcctttttgtttgttagttttccttctaacagtcaggaccctcagctgcaggtctgttggagtttgctggaggcccactccagactctgcctgggtatcagcagcggaggctgcagaacagcaaatattggtgaacagcaaatgttgctgcctggtcattcctctggaagcctcgtctcagaggggtacccggccgtgtgaggtgtcagtctgcccctactggggggtgcctcccagttaggctacttgtggatcatggacccacctgtcactgaggaggcagtctgtccattctcagatctcaaactctgtgctgggagaaccactactctcttcaaagctgtcagacagggacatttaaatctgtagaggtttctgctgcctttgttcggctatgccctgcccccagaggtggagtccacagaggcaggcaggactccttgagcttcagtgggctccacccagttcgagtttcctggctgaggctgccgccttgtagttcaatctcagactgctgtgctagcaatgagtgaggctccatgggcatgggaccctctgagccaggagtgggatataatctcctggtgtgccgtttgctaagaccattggaaaagcacagtattagggtgggggtgacccaattttccaggtgctgtgtgtcacagctttgcttggctaggaaagggaattttctgaccccttgcgcttcccgggtgaggtgatgccttgccctgcttcagctcacactcggtgtgccacaccccctgttctgcgcccactgtccgacaagccctagtgagatgaacctggtacctcagttggaagtgcagaaatcacccgtcttctgcatcgctcatgctgggagctgtaggctgaagctcttcctattcgaccatcttggaaccgcttaattttgtatctttagtagagacgaggtttctccatgttggtcaggctggtctcaaactcctgacctcaggtgatctgcccaccttggcctcccaaagtgctggaattacaggtgtgagccaccactcctggccttatttttaatatatccgttaaatttgaaaagtcacaattttggcctggcacagtggctcacgcctgtaatcccagcactttgggaggctgaggtgggcggatcacttgaggtcaagagttcgagaccagcctggccaacatggtgaaaccccatctctattaaaaatacaaaagtttgccaggtatggtggctcatgcctgtaatcccagctacttgggaggctgaggcaggagaatcgcttgaacacaggagacggaggctgcaatgagccaagattgtgccactgcactccagcctgggcaacagagtgagactccatctcagaaaaaacaaaaagaaaagaacagtcacaatttcatttttaccataatatatctcatttttctcatgctgaacagtccagggagaaaaataataataaagtatatcttattttcttaatgactttatgttaaccagtttgagggagtggctgtggttttcacatttcctgttttgttctgaatttaatttaggtcttaaacagtgaaaattttatttaagaaaattgataggccgggcatagtggctcatggttttttttccgcttaacacttttttctttttgctcttgttgcccagactgcaatgcaatggcacaatctcggctcactgcaacctctgcctctgggttcaagtgattctcctgtctcagcctcctgagtagctgtgattacaggcatgcgcaaccatgcccgactaattttgtatttttagtagagatgaggtttctccatgttggtcaggctggtcttgaactcctgacctcaggtgatccacccgccttggcctcccaaagtgcagggattacaggtgtgagccaccatgcctggcccgcctaacactttttttgagacagtcttgccctgtcaccaaggctggagtccactggtgcaatctcagctcactgcaacctccaccttctgggttcaagcaattctcatgcctcagcctcctgagtagctgggattacaggtgtgtgccaccatgcccactaattttgttattttttggtagagatggagtttgccacgttggccaggctggtctcaaactcttggcctcaagcgatttgcccatctcggcttcccaaagtgctggggttacaggtgtgagccaccacacctggccaagcctaacactttggaaggccaacatgatcagttagcttcagcccaggagattggaaccagcctgggcaatgtagggagaccccatctctaccaaaagttttaaaatcagccaggtgtgtgtggtggcacatgcctgtagtcccaactgcttgagagtctgaggcaggaggattgcttgagcccaggaatttgaggtggcagtgagctgattataccactgcactccagcctgggcgacaaagcaagaccctttctcttaaaacaacaacaaagaagattgataatttaatttttcatactatcagttggttatacaaaaaacttacttttgaaattttaaggaattaccactattgaaactaatattttgtcacagatgttgatatacttaatcagaaatgtccagttttagccaggtggctgtgcactcttgtagtcctagccactcagaaggttgagtcagaagggttgcttaagcccagaagtttgaggccagcctaggcaacatagtgagactcacgtctctttaaaaaacaaagaaagaaatgttcaattttggttttctttttaaaaatagctgtttagaagtagatgattgcaggccactaagtagacttgtgacattgccccaagtttcattaaaatgggtcttcattaatttttggaaattcaggaacctttgttataccttgatttttacttgttttgatttgttctgttatttttctggaaatcggtttacgttaagattacttaaaatttgcatattttcagaaattgggcaaatggttatggtcatactagtaattttttaataaaaatttttttaaccttaaaaagtttagactttttatttaggattcatttaggttcagcctagtgaggggcgtatagctgctgggttaaacataagagactctgggccaggcacagtggctcacgcctgtaatcccagcactttgggaggccgaggcgagtggatcatgaggtcaggagttcgagacccacctggccaatatggtgaaaccctgtctttactaaaaatacaaaaattagctgggtgtggtggcgcgtacctgtagtcccagctgtttgggaggctgaggcaggagaatcacttgaacctggaaggtggaggttgcagtaagccaatacagagccactgtactccagcataggggaaagagctagactccatctctacaaaaaaacatagactttggagtcaaattgcctggttgttggatcccaggtctgagttttactgtttgtgtaacctgggataggttatttcacatctctgagcctcccttttctcacttatggaatggagataataactgtatccatctcatagtgttattgtcatttaaatgaggtactatacataaagcttttagagtagtgcctggtagatagtaagtgatcagtaaatgttaaatatttgcattaaaccttcacttgtgtgacttaaagacaatttgtattgtgagtggaatctaatgaaatgtacaaatgtgctgtgtccgtgcttcacctaatgctgatgcaggtcagctctgagagcaagggtgaggcgatggcaaaggggcttgagaaaagtcgtgaggaattcaaatagctggtttggggaaatagaaaaagagcctaccaaggacatgtggtaggccacaagggctaagtgaggttggagaccttgagcctgtcaacattcattaaaaagttgaaagtacagagttcatggttgctgcacttggaaaatacaaacgtgagtgatccttttgaattgaccttacaaaggattttccagttcattgatcctgcagtctccaggcagtttaaagtaatatgaggccaggcacggtggcttatgcctgtaatcccagcagtttgggaagccgaggcgggcagatcacgtgaggtcaggagtttgagaccagcctgaccaacatggtgaaaccccatgcaaaaaattagccaggtgtggtggcgcatgcctgtaatcccagctacttgggaggctgaggcaggagaatcgcttgaacccaggaggcggaggttgcagtgagctgagatcgcgccattgcactccaggctgggtgacagagtgagactctgtctcaaaaaaaaaaaaaaaaaaaaagtaacatgaattaacaagtgtaactgtgtcttccttactttatataatagatgtcagagacttatggttgattactaacttaaaatcatgaggcactttaaactctgtcttaagtataaaatgttttcacataattgtgattttaggccaaagaccgggttccagatgtggttagaagaaaatagaagtaatattttgtctgacaatcctgacttttcagatgaagcagacataataaaagaaggaatgattcgatttagagtattgtcaactgaagaaagaaaggtaaggataattgtgccgagattgagatcttagtgaattcccagatttaaaaaattcttatagaaatgccttttggctgggtatggtgtcttatgcctgtaatcctagcacattgggaggtcgaggcggatcacttgagctcaggagttcgtgaccagcctgggcaacatagtgagacatcgtctctaataataataataacaacaacaaagataataacgatcatgacaactaaaaaaaaaaggaaaagcctttttctgtttttggaaattgaatacatccaccaaactttttaaagaggaaagtaagtgcggatatatggtaatatggatatgtagtaattattatgtaatggtgatgggttttttgttttgtttttgtttgaggcaggtcttgttctttcacccaggcaggagtgtcgtggtgtgatcatggctcactgccacctcgacctcctgggcacaagcaattgtcctcttttttttttttatagagacaacctctcactgtgttgcccaggctggatggttaattttttgacggtttactgttttaatctctataagttcctgtatgttttaagttaggagaataccccaagaaaagatgcatttgttaaaaatcaaaagtgtcaagctgagttcgttggctcaagcctgtaatcctagcactttgggaggccaaggcaggaggatctcttgagcccaggagtttgagaccagcctagacaacatagtgatacaccatctctacaaaaatttaaaaattagcctggcatggtggcacacacctgtagtcccagttactcaggaggttgaggtgggaagatcacttacttgagcccaggaggtcaaggctgcagtgagccgtgattgtgtcactgtactccagcatgggtgacagagtgagaccgggtctctagggggaaaaaaattaataagtaaaaatgaattcacattttttgaatactactttagggttcttgcaagcagaatttttaaaaattgtatctacttacacattaaatactacatgagactattccttttgggaaaaagactggtgttctgttccagcctttcacatggaaattaggacaggtggctggcttgcttctgataaacttctgccatgtgaaggaaggaaggcacaatctctcagttagaagtggaaggaatgtgtgtggtgtaccagttaaatcctcaggtttcacttccccaggaatggcagggcgcagcacaggcacctagtaacgtagatacttgctttggtaaattgggttttatgaaaaaggtgttgcataatgaggaagccagaaactggtttaaacacctttagcgtcatttagaacctcatttacaattttatgtttctcatttgttgttcaataaaatggcgtctaaataaataagactttacactgcaaaagaggaagagacttggcaaagtctgtgattgtgtttttgaatacttaaaaatgtaatcagtatttttaaggtaaaccctaaacatttacttaaatccagtttgttaatgtgagaaattctacagcttgaagagcccttgaaatggccagggaaataaagtaggagtggggaactattatagattaaaagagattttagagacagatgaaatgaatggaccttgtctggctcttgctgagtgaataaaaaccaaaccccaaagaatatatactcatttatataacattcctgaaatgacaacatgatcaagatggagaatagagtagtggttgccaggggttggagtcggagttggggcttggggaagaggttctgtattttgactgtggtggtaaacaaaccaacccacaataaaagtaaatacatacatacgctcaaatgagtagaagtaaaatgggattgtttcaatgtcagttccctatagttgtgattgttgggctatagttttgcaaaatgttaccactggggaaaactgggtgaaggctacacaggatctttctgtattatttcatacaactgcatgtgaaactgcaattatcttagaataaaaagtttcatttttattatttatttatttatttatttatttattttttgagacggagtcttgctctcgcccaggctggagtgcagtggcgtgatctcagctcactgcaggctccacctcccgggttcactctagtctcctgcctcagcctcccaagtagctgggactacaggcgcccgctaccatgcccggctaatttttttgtatttttagtagagacggggtttcactgtgttagccaggatggtctcagtctcctgaccccgtgatccacccacctcggcctcccaaagtgctgggattacagacatgagccaccgtgcctggccaaaagtttcatttttaaatagtactgcaattatagtattttgcaactaatatgattaatataagcaaagcttagattgagatataaaagtagtgtaaatctttaatgtgctctgcatttaagtaataaaagatttgttaacaatgagaacacttaattcaagtgctaattattctgctttatatataaaaatattacctggaaaagtaaataaatcatttacttcttatttgttattttctaaaaatctttccttttcactcctgccattttacaaaggtgtgggctaacaaagccaaaggagaaacggcaagtgaaggaactgaagcaaagaagcgaaaacgtgtggttgatgaaagtgatgaaacagaaaaccaggaagaaaaagcaaaagagaacctgaatttgtctaaaaagcagaaacctttagatttttctacaaatcagaaactatcagcttttgcatttaagcaggagtaaaggaagaaagtgaccctagggaagtaatggatttttttttactcatctttgaatatagactcgagtctttgggaaactcattatatatatattttttaaagagtttgaagcaactgtttgtctttataagataatgtagtaattatattggtgtaggtaacaggacatatgtaaaaactatcatctttgcagattactctgcctccaaatgcagggcctttcagagatgcattgtgattgtaattactgagttgaagctccaaccaatttgaatttgtttcttaaccttgaaaaatcattaaagccaaggtattaaaacctttgtgcattaataccttctaggggtttggttcatttggtttttgtcatgtgcaaggaaggacaatagtcctctttccaagtgtgttagcatagacttctctatatgtttctactagacctaggggatgacgtcttttaataatactggccctaaacatgtaaataatcttgtaggtgagactttttcttttgtgtttcggaaatttcctatgtggctttcagttgtctgtttgtatagcctggatttttttgaggtaaatgaaactttctcatttgt
